United States Patent Application Publication US 2006/0134663 A1 - sequence listing, part 39

SEQ ID NO: 70762 - DNA, 2195 bp, Homo Sapiens
  misc_feature (777)..(796): n is a, c, g, or t
  misc_feature (1857)..(2015): n is a, c, g, or t
  misc_feature (2018)..(2018): n is a, c, g, or t
  misc_feature (2021)..(2023): n is a, c, g, or t
  misc_feature (2025)..(2030): n is a, c, g, or t
  misc_feature (2039)..(2055): n is a, c, g, or t
gcagtaactaccacggtcttaggtagcgaggcctgggtgtcgaattcggcacgagggctcagcggtgttggaacttcgttgcttgcttgcctgtgcgcgcgtgcgcggacatggcctcaaacgattatacccaacaagcaacccaaagctatggggcctaccccacccagcccgggcagggctattcccagcagagcagtcagccctacggacagcagagttacagtggttatagccagtccacggacacttcaggctatggccagagcagctattcttcttatggccagagccagaacacaggctatggaactcagtcaactccccagggatatggctcgactggcggctatggcagtagccagagctcccaatcgtcttacgggcagcagtcctcctatcctggctatggccagcagccagctcccagcagcacctcgggaagttacggtagcagttctcagagcagcagctatgggcagccccagagtgggagctacagccagcagcctagctatggtggacagcagcaaagctatggacagcagcaaagctataatccccctcagggctatggacagcagaaccagtacaacagcagcagtggtggtggaggtggaggtggaggtggaggtaactatggccaagatcaatcctccatgagtagtggtggtggcagtggtggcggttatggcaatcaagaccagagtggtggaggtggcagcggtggctatggacagcaggaccgtggaggccgcggcaggggtggcagtggtnnnnnnnnnnnnnnnnnnnntggtggttacaaccgcagcagtggtggctatgaacccagaggtcgtggaggtggccgtggaggcagaggtggcatgggcggaagtgaccgtggtggcttcaataaatttggtggccctcgggaccaaggatcacgtcatgactccgaacaggataattcagacaacaacaccatctttgtgcaaggcctgggtgagaatgttacaattgagtctgtggctgattacttcaagcagattggtattattaagacaaacaagaaaacgggacagcccatgattaatttgtacacagacagggaaactggcaagctgaagggagaggcaacggtctcttttgatgacccaccttcagctaaagcagctattgactggtttgatggtaaagaattctccggaaatcctatcaaggtctcatttgctactcgccgggcagactttaatcggggtggtggcaatggtcgtggaggccgagggcgaggaggacccatgggccgtggaggctatggaggtggtggcagtggtggtggtggccgaggaggatttcccagtggaggtggtggcggtggaggacagcagcgagctggtgactggaagtgtcctaatcccacctgtgagaatatgaacttctcttggaggaatgaatgcaaccagtgtaaggcccctaaaccagatggcccaggagggggaccaggtggctctcacatggggggtaactacggggatgatcgtcgtggtggcagaggaggctatgatcgaggcggctaccggggccgcggcggggaccgtggaggcttccgagggggccggggtggtggggacagaggtggctttggccctggcaagatggattccaggggtgagcacagacaggatcgcagggagaggccgtattaattagcctggctccccaggttctggaacagctttttgtcctgtacccagtgttaccctcgttattttgtaaccttccaattcctgatcacccaagggtttttttgtgtcggactatgtaattgtaactatacctctggttcccattaaaagtgaccattttagttannnnnnnnnnnnnnnnnnnnnnnnnnnnnnnnnnnnnnnnnnnnnnnnnnnnnnnnnnnnnnnnnnnnnnnnnnnnnnnnnnnnnnnnnnnnnnnnnnnnnnnnnnnnnnnnnnnnnnnnnnnnnnnnnnnnnnnnnnnnnnnnnnnnnnnnnnnnnnnaanaannnannnnnntttgggggnnnnnnnnnnnnnnnnnaaaaaaattttttttaaaacccttctttttggggggccgcgcggccccccaagagggaaaaagaaaaacgggggcacaaaaagttttttcttccaagaaaaaaccccgggggaaacaaaaccaaaaggggtgggtttttt

SEQ ID NO: 70763 - DNA, 1167 bp, Homo Sapiens
  misc_feature (42)..(76): n is a, c, g, or t
  misc_feature (926)..(928): n is a, c, g, or t
  misc_feature (930)..(930): n is a, c, g, or t
  misc_feature (932)..(935): n is a, c, g, or t
  misc_feature (937)..(937): n is a, c, g, or t
  misc_feature (941)..(942): n is a, c, g, or t
  misc_feature (951)..(1006): n is a, c, g, or t
  misc_feature (1056)..(1057): n is a, c, g, or t
  misc_feature (1071)..(1085): n is a, c, g, or t
gcgaacgagcgcagcggagtctgtgagcgaggaagcggccgnnnnnnnnnnnnnnnnnnnnnnnnnnnnnnnnnnncagtcgacggtaccggacatatgcccgggaattcggccattacggccggggaagtgtttccggtggattcccagggactgtcggaggtgtggactctgcctgcctacctggtctgggaagatgttctaccatatctccctagagcacgaaatcctgctgcacccgcgctacttcggccccaacttgctcaacacggtgaagcagaagctcttcaccgaggtggaggggacctgcacagggaagtatggctttgtaattgctgtcaccaccattgacaatattggtgctggtgtgatccagccaggccgaggctttgtcctttatccagttaagtacaaggccattgttttccggccatttaaaggggaggtcgtggatgctgttgtcactcaggtcaacaaggttggactcttcacagaaattgggcccatgtcttgcttcatctctcgacattccatcccttcagagatggagtttgatcctaactccaacccaccatgttacaagacaatggatgaggatattgtgattcagcaggacgatgagatccgcttaaagattgtggggacccgtgtggacaagaatgacatttttgctattggctccctgatggacgattacttggggcttgtaagctgagcctggtggcctcctacccttggtcctactctaggaagtgtgattgtcacacttatcatgttgtccagaggtccagtctggctgctgttgtggaggcaaggaaggcaactcatcccagaaggcatctggtgcttcttgtagcttaactactgcctcctcatttttcagtatgtgttctaagtataaaaagtccttggttctcatggaaaannnancnnnnanaatnncccccaaannnnnnnnnnnnnnnnnnnnnnnnnnnnnnnnnnnnnnnnnnnnnnnnnnnnnnnntatcttaccccccactatctttcggacaccccccattaaaaaaacaaatnnaaaaattgtggggnnnnnnnnnnnnnnntaaaaaaatttcttaaaaactttttttggggcgcggggcccccctttaggcaaggggacaaggggccaaaacctttttcctc

SEQ ID NO: 70764 - DNA, 1303 bp, Homo Sapiens
agactgatgcagatgaaccctccggagtggacaatgctgtcagcacctggggaggagccctccgataccatcaagggaagatttcatccttaaagaggtcgccagctctccagatcctgctgaccaacaccaaagtccctcgcaataccagggcccttgtggctggcgtcagaaacaggctgctcaagttcccagagatcgtggcccccctcctgacctcaatagatgccatctccctggagtgtgagcgcgtgctgggagagatgggggaagccccagccccggagcagtacctcgtgctggaagagctcattgacatgaaccagcaccatctgaatgccctcggcgtgggccacgcctctctggaccagctctgccaggtgaccagggcccgcggacttcacagcaagctgactggcgcaggcggtggtggctgtggcatcacactcctcaagccagggctggagcagccagaagtggaggccacgaagcaggccctgaccagctgtggctttgactgcttggaaaccagcatcggtgcccccggcgtctccatccactcagccacctccctggacagccgagtccagcaagccctggatggcctctgagaggagcccacgacactgcagccccacccagatgcccctttctggattattctgggggctgcagttcgactctgtgctggccagcgagcgcccagctcctgacactgctggagaggccccagccgcttggcgatgccagccaagctctgcagtcccagcggtgggacctagggaggcatggtctgccctctgcatcctctggagccagccgagcaggaggcctaggagggtcctctgagactccagacctgaggcgagaagggctgcttccctgaagctcccacagtcccatctgcttcaggcccccgccttggcctgtgttcttcctggccgcctgggtccaatgctcaggtgctggggcctggttcccggagaagtgtgccttctctctcccttttcagggaccgccccctgtctctcagggccaggcctctccctcctccaggaagccttcccctaccccttgtcgcccctccctcccagagcacctgctgtctgggtggctcactcagcacttggtgtggccttcccttctacctagcgggatggggctcccccaggggctgtcccggaggcggtgggcctggttaaataaggcagggtttatatgcactttcttccgatctgtacctgagaggtttgtggaaaagatggcaaatggggaataaaaagattttgtgtcaacagtaaaa

SEQ ID NO: 70765 - DNA, 914 bp, Homo Sapiens
ggcaaagtctgggctcaaaggagagcagagtcaggtgggtttgaagacctgaagcagggctgagggcgaccacgggggctctgccagagcttcctgcccttccccaatgacccatttctggctcctcagatgaggaagaagaagaagaggatgatgaagggcccgcgctgaagagagctgccgaagaggaggtttgggctgggttgctgggcctgaggggctgtcagggatgcagccgggctgggcgccctttggatttggacccagatccctgtgtggcaggggtgggggctggaacaggaccgggacagggggaggtctcccctcccattttacagctcccccattctctccctctccacaggatgaagcggatcccaaacggcagaagacagaaaatggggcatcggcgtgagcccctgccaacaggctggggttgggaggcctctctgggcctggaggtgggggtgggggcagccaagtccagccactcttcacctggctccctgctctgggccctgcaccagagctgccaccctcttctttctccccagccttctcatttccgcctctccagacactgcgccctccaccctcactctgccattgttccacctcctgacctgctccatctgagctctccagctggcccccaattgctcctctctctctttgctctctttctccctcccctaccagcctcattcttcctccggtagcctctcccacctaacctctgcatcccccagcctcatgtcctgccccatccctatcctgcctgatccctggatctccctcagatcccctcttctcagacagcgccaggccggggtggggccggggttggggccgagccccacagctgcccccctcccctccctttttgtataatttaataaagaaatggtcgcgct

SEQ ID NO: 70766 - DNA, 1343 bp, Homo Sapiens
  misc_feature (73)..(141): n is a, c, g, or t
  misc_feature (732)..(785): n is a, c, g, or t
  misc_feature (925)..(938): n is a, c, g, or t
ggcacgagggcgaaagaaagaagtggtggaggaggaggagaacggggctgaggaggaagaagaagaaactgcnnnnnnnnnnnnnnnnnnnnnnnnnnnnnnnnnnnnnnnnnnnnnnnnnnnnnnnnnnnnnnnnnnnnngcccgcgctgaagagagctgccgaagaggaggatgaagcggatcccaaacggcagaagacagaaaatggggcatcggcgtgagcccctgccaacaggctggggttgggaggcctctctgggcctggaggtgggggtgggggcagccaagtccagccactcttcacctggctccctgctctgggccctgcaccagagctgccaccctcttctttctccccagccttctcatttccgcctctccagacactgcgccctccaccctcactctgccattgttccacctcctgacctgctccatctgagctctccagctggcccccaattgctcctctctctctttgctctctttctccctcccctaccagcctcattcttcctccggtagcctctcccacctaacctctgcatcccccagcctcatgtcctgccccatccctatcctgcctgatccctggatctccctcagatcccctcttctcagacagcgccaggccggggtggggccggggttggggccgagccccacagctgcccccctcccctccctttttgtataatttaataaagaaatggtcgcgcttctgtttttnnnnnnnnnnnnnnnnnnnnnnnnnnnnnnnnnnnnnnnnnnnnnnnnnnnnnngggggcgcgcgcgcggcctaagaaagagtctactcctccgaggaggggcgcccagaacgtttcggtcgcgagcacctccgacggttattctggtgtgtaacaagcaggtgggcgtcccccataaaaaggggagccgcggnnnnnnnnnnnnnnccgcagaagcgacgcagtgagcgcccggcgctggttaatcacaacgcggtcgctgagagctaggtgagagacaacacgtgtagcgtaacgttgtggaggcgatctctttgtgaggaggagagaagagagagcctcccttaatatctctcatgcgagggggggcggggagagagacaaatattatattgtgggtgggacgaacaacatctactactctctacaaagagagtagatatatataaagaaggcgtctctcatatgaggagggagcagatattactatatattaaaatactttttacgaagagggtggtgatatatatagtgtgtgtgggttatatacaaaacatattaacggcgctgtggtgatatatatgtgctgtgtgtggcggcgcgtgctgtgag

SEQ ID NO: 70767 - DNA, 892 bp, Homo Sapiens
  misc_feature (228)..(286): n is a, c, g, or t
  misc_feature (417)..(474): n is a, c, g, or t
  misc_feature (513)..(592): n is a, c, g, or t
aaggtagcgaggcctgggtggcgaattcggcacgggggcagctctgctggtgcgggggcggcgagcccgggatcgagctaccgcggccgagcgcgccggccaccgcctgcaccgcccttccgcccgccctccggacggccgcagccctgcgggtctccgctccagacccacccccgccccaccccgcgcgcctctgccgcctcttccagagacccagcttgccgagcnnnnnnnnnnnnnnnnnnnnnnnnnnnnnnnnnnnnnnnnnnnnnnnnnnnnnnnnnnnaccctccgccgtccagggcccctccgtctcggccccgggaccccggctccccgccagccccggccccggccccggcaccatgtcggagaaaagcgtggaggcagcggccgagttgagcgccaaggacctgnnnnnnnnnnnnnnnnnnnnnnnnnnnnnnnnnnnnnnnnnnnnnnnnnnnnnnnnnntggtggaggaggaggagaacggggctgaggacgaagaannnnnnnnnnnnnnnnnnnnnnnnnnnnnnnnnnnnnnnnnnnnnnnnnnnnnnnnnnnnnnnnnnnnnnnnnnnnnnnnggcccgcgctgaagagagctgccgaagaggaggatgaagcggatcccaaacggcagaagacagaaaatggggcatcggcgtgagcccctgccaacaggctggggttgggaggcctctctgggcctggaggtgggggtgggggcagccaagtccagccactcttcacctggctccctgctctgggccctgcaccagagctgccaccctcttctttctccccagccttctcatttccgcctctccagacactgcccccctcccctccctttttgtataatttaataaagaaatggtcgcgca

SEQ ID NO: 70768 - DNA, 679 bp, Homo Sapiens
  misc_feature (19)..(19): n is a, c, g, or t
gatgcccagaagactcacntatatctcgcagagcatatttcaatggacagagcttcagtgcttcaattcagaaaatatctttctttgatggctttgaaggaggttttaatttccgaacattacaaccaaatgggttactattctattatgcttcagggtcagacgtgttctccatctcactggataatggtactgtcatcatggatgtaaagggaatcaaagttcagtcagtagataagcagtacaatgatgggctgtcccacttcgtcattagctctgtctcacccacaagatatgaactgatagtagataaaagcagagttgggagtaagaatcctaccaaagggaaaatagaacagacacaagcaagtgaaaagaagttttacttcggtggctcaccaatcagtgctcagtatgctaatttcactggctgcataagtaatgcctactttaccagggtggatagagatgtggaggttgaagatttccaacggtatactgaaaaggtccacacttctctttatgagtgtcccattgagtcttcaccattgtttctcctccataaaaaaggaaaaaatttatccaagcctaaagcaagtcagaataacaagggagggaaaagtaaagatgcaccttcatgggatccctgttgctctgaaactcccagagcggaatactc

SEQ ID NO: 70769 - DNA, 583 bp, Homo Sapiens
ggctgtttcttcaaaaattgatagagagtgttatattgctctagggctgttgaaaaggtggcaatgagagtatcttggagtattccgctctgggagtttcagagcaacaggatcccatgaaggtgcatcttaacttttccctccctttttattctgacttgctttaggcttggataaattttttccttttttatggaggagaaacaatggtgaagactcaatggaacactcataaagagaagtgtggaccttttcagtataccgttggaaatcttcaacctccacatctctatccaccctggtaaagtaggcattacttatgcagccagtgaaattagcatactgagcactgattggtgagccaccgaagtaaaacttcttatcatttgcttgtgtctgttctaaaaaccctttggtaggattcttactcccaactctgcttttatctactatcagttcatatctgcaaaagaaaaaggcttctttacataccacagagctagcattttaccttgacccactctaggttggataagcaggttttctcatgaaattgaaatggaacactgtggttaatgaaaag

SEQ ID NO: 70770 - DNA, 2185 bp, Homo Sapiens
gctaggtacgaggccgggtgtgaattcggcacgaggggccttccagaggcgtaggcgggtgaattcggactgtgactctgtgttaccctccaacttcctcctggggggcaatatctttgatcccctgaacctgaatagcctcctggatgaggaagtgagccgcactctcaacgcggagacccctaagtcatccccccttccggccaaagggcgagatccggtggagatcctcatccccaaagatattactgacccgctcagtctcaatacttgcactgatgagggccatgtagttcttgcttcgccactcaagactggtcggaagcggcatagacaccggggacagcaccaccagcagcagcaggcagccggagggagtgagagtcaccccgtgccgcccacagcccctctcacccccttactccacggggagggcgcctcacagcagccgcggcacaggggccagaaccgggatgccccccaaccctatgaactcaacacagccatcaactgcagggatgaagtggtgtctccccttccatctgctctgcagggtccctcaggctccctatcagcccctccagctgcctcagttatctctgcacccccatcttcctcctcccgacatcgcaaacgtcgcaggacttccagcaagtcggaggcaggggctaggggtggaggccagggttccaaggaaaagggccgagggagttggggaggccgccaccaccaccaccacccactgcctgcagcaggcttcaaaaagcaacagcgcaagttccagtatgggaattattgcaaatactatgggtaccgcaatccttcctgtgaggatgggcgccttcgggtgttgaagcctgagtggtttcggggccgggacgtcctagatctgggctgcaatgtgggccatctgaccctgagcattgcctgcaagtggggcccgtcccgcatggtgggcctggatatcgattcccggctcatccattctgcccgccaaaacatccgacactaccttttcgaggagctgcgtctcccaccccagactttggaaggggacccggggggcagagggtgaggaagggaccaccaccgtttcgaaagaggagctgcttcccagcctcgctgactgccagccggggtcccatcgctgccccccaagtgcccttggatggagcggacacatcagtcttccccaacaatgttgtcttcgtcacgggtaattatgtgctggatcgagatgacctggtggaggcccaaacacctgagtatgatgtggtgctctgcctcagcctcaccaagtgggtgcatctgaactggggagacgagggcctgaagcgcatgtttcgccggatctaccggcacctacgccctgggggcatcctggtcctagagccccaaccctggtcgtcgtatggcaagagaaagactcttacagaaacgatctacaagaactactaccgaatccaattgaagccagagcagttcagttcctacctgacatccccagacgtgggcttctccagctatgagcttgtggccacaccccacaacacctctaaaggcttccagcgtcctgtgtacctgttccacaaggcccgatcccccagccactaagtggccccctaaacagaaagtgtgaagaggctgccctcgctgctcataaggacctgggggaagaggaaagtgtcccaaggtctttcctttctgactccaaaaatagtttcctttcttggatctgcaaagaaagcttttcttccgtcgctgcctcagcctcctccctatgcctctggcacctgcgcagcaaggctggctgtgctggagtcaccatcatcttcctctcccccagcctcccaggctggatggcatggactgtttgctgacctctgttctcttagggcatgggaggtgggaggatatcaaattctctagccctttcctcctattctcccaaggagagagattcccatttctcctcggccattgtacctagctcttgtccctagctgcatttcagtggaccatggatagagggactgagggttagacggggaagactggcagggaggcacgcaggtactgtgaaaatccttccctttgccctcccccagtgggagagggggttgggttttcaatgtgagaacagcacaataaacttgatgtctagggcagtggcccccaaaaaaaa

SEQ ID NO: 70771 - DNA, 528 bp, Homo Sapiens
gaagaggaaagtgtcccaaggtctttcctttctgactccaaaaatagtttcctttcttggatctgcaaagaaagcttttcttccgtcgctgcctcagcctcctccgctatgcctctggcacctgcgcagcataggctggctgtgctggagtcaccatcatcttcctctcccccagcctcccaggctggatggcatggactgtttgctgacctctgttctcttagggcatgggaggtgggaggatatcaaattctctagccctttcctcctattctctagcccttctattctcccaaggagagagattcccatttctcctcggccattgtacctagctcttgtccctagctgcatttcagtggaccatggatagagggactgagggttagacggagaagactggcagggaggcacgcaggtactgtgaaaatccttccctttgccctcccccagtgggagagggggttgggttttcaatgtgagaacagcacaataaacttgatgtctagggcagtggcccccaaaaaa

SEQ ID NO: 70772 - DNA, 876 bp, Homo Sapiens
  misc_feature (803)..(803): n is a, c, g, or t
aacggcagtactctaacggttctaaggtagcgaggcctgggtggcgaattcggcacgaggggcggaagtggcggcgagcccggtccccgccggcaccatgcttcccttgtcactgctgaagacggctcagaatcaccccatgttggtggagctgaaaaatggggagacgtacaatggacacctggtgagctgcgacaactggatgaacattaacctgcgagaagtcatctgcacgtccagggacggggacaagttctggcggatgcccgagtgctacatccgcggcagcaccatcaagtacctgcgcatccccgacgagatcatcgacatggtcaaggaggaggtggtggccaagggccgcggccgcggaggcctgcagcagcagaagcagcagaaaggccgcggcatgggcggcgctggccgaggtgtgtttggtggccggggccgaggtgggatcccgggcacaggcagaggccagccagagaagaagcctggcagacaggcgggcaaacagtgagcgcccacccagaccggctgctgcgccccctcctgccaggtggcgattccgctccacagtctcggacggatctgctcagaaaggaagaggcaggcgccagggggaacccccttcgtgtttggtgaccctcccttttaggtgaagcccctttttcttgctaaaaccggcaattctccggttagaaatgttacttggtgtttttggttttgtgaaacggcgtcccaaagctggctggattcctagaaggagtctgtgttcgaaagcatctttcaaagccctcgctctnggttctcagggcagcatttccaggcggtttgttttgcattcttggagctctccgagcagcacagacggagatc

SEQ ID NO: 70773 - DNA, 1848 bp, Homo Sapiens
  misc_feature (1084)..(1100): n is a, c, g, or t
  misc_feature (1118)..(1693): n is a, c, g, or t
  misc_feature (1797)..(1797): n is a, c, g, or t
gagcgaggcctgggtggcgaattcggcacgagggcgcggcgacgaccgccgggagcgtgtgcagcggcggcggcggaagtggccggcgagcccggtccccgccggcaccatgcttcccttgtcactgctgaagacggctcagaatcaccccatgttggtggagctgaaaaatggggagacgtacaatggacacctggtgagctgcgacaactggatgaacattaacctgcgagaagtcatctgcacgtccagggacggggacaagttctggcggatgcccgagtgctacatccgcggcagcaccatcaagtacctgcgcatccccgacgagatcatcgacatggtcaaggaggaggtggtggccaagggccgcggccgcggaggcctgcagcagcagaagcagcagaaaggccgcggcatgggcggcgctggccgaggtgtgtttggtggccggggccgaggtgggatcccgggcacaggcagaggccagccagagaagaagcctggcagacaggcgggcaaacagtgagcgcccacccagaccggctgctgcgccccctcctgccagggtggcgattccgctccacagtctcggacggatctgctcagaaaggaagaggcaggcgccagggggaacccccttcgtgttttgtgaccctcccttttaggtgaagcccctttttcttgctaaaaccggcaattctccggttagaaatgttacttggtgttttttggttttgtgaaacggccgtcccaaagctggctggattcctagaagagtctgtgttgaaggcatctttcaagccctcgctctggttctcagggcagcattttccaggcgggtttgttttgcatttcttggagcctctccgagcagcaaccagacgggagatttttattttaagctgttcatgctgggactgacagcctgcagggtttccttgggcgcggccccaaaattgccttcaaaacaaacccgggacggttgaaagccttcgaaccgtgcaggggatgcctcgggccctggcccttcgcttcctctcttgtgttatggaaataaaaacaaataaaactacacactgcnnnnnnnnnnnnnnnnncctcgtgccgaattcttnnnnnnnnnnnnnnnnnnnnnnnnnnnnnnnnnnnnnnnnnnnnnnnnnnnnnnnnnnnnnnnnnnnnnnnnnnnnnnnnnnnnnnnnnnnnnnnnnnnnnnnnnnnnnnnnnnnnnnnnnnnnnnnnnnnnnnnnnnnnnnnnnnnnnnnnnnnnnnnnnnnnnnnnnnnnnnnnnnnnnnnnnnnnnnnnnnnnnnnnnnnnnnnnnnnnnnnnnnnnnnnnnnnnnnnnnnnnnnnnnnnnnnnnnnnnnnnnnnnnnnnnnnnnnnnnnnnnnnnnnnnnnnnnnnnnnnnnnnnnnnnnnnnnnnnnnnnnnnnnnnnnnnnnnnnnnnnnnnnnnnnnnnnnnnnnnnnnnnnnnnnnnnnnnnnnnnnnnnnnnnnnnnnnnnnnnnnnnnnnnnnnnnnnnnnnnnnnnnnnnnnnnnnnnnnnnnnnnnnnnnnnnnnnnnnnnnnnnnnnnnnnnnnnnnnnnnnnnnnnnnnnnnnnnnnnnnnnnnnnnnnnnnnnnnnnnnnnnnnnnnnnnnnnnnnnnnnnnnnnnnnnnnnnnnnnnnnnnnnnnnnnnnnnnnnnnnnngacctgcggttaccggtactgtccgctttctccttcggaacgggggcttctctacctcagctgtagtactagttggtgaggtctcctcaggtgggtggtgacanccccgtcatcgacgggggctatggtactacgctgatcagcggtaaaagata

SEQ ID NO: 70774 - DNA, 930 bp, Homo Sapiens
  misc_feature (916)..(916): n is a, c, g, or t
ggtcctaggtagcgaggcctgggtggcgatccggacgagggaacattaacctgcgagaagtcatctgcacgtccagggacggggacaagttctggcggatgcccgagtgctacatccgcggcagcaccatcaagtacctgcgcatccccgacgagatcatcgacatggtcaaggaggaggtggtggccaagggccgcggccgcggaggcctgcagcagcagaagcagcagaaaggccgcggcatgggcggcgctggccgaggtgtgtttggtggccggggccgaggtgggatcccgggcacaggcagaggccagccagagaagaagcctggcagacaggcgggcaaacagtgagcgcccacccagaccggctgctgcgccccctcctgccagggtggcgattccgctccacagtctcggacggatctgctcagaaaggaagaggcaggcgccagggggaacccccttcgtgttttgtgaccctcccttttaggtgaagcccctttttcttgctaaaaccggcaattctccggttagaaatgttacttggtgttttttggttttgtgaaacggccgtcccaaagctggctggattcctagaagagtctgtgttgaaggcatctttcaagccctcgctctggttctcagggcagcattttccaggcgggtttgttttgcatttcttggagcctctccgagcagcaaccagacgggagatttttattttaagctgttcatgctgggactgacagcctgcagggtttccttgggcgcggccccaaaattgccttcaaaacaacccgggacggttgaaagccttccgaaccgtgcagggggatgcctcggggcccttgggccttcccttccttctctttggggtaatggaaaacaaaagaccgtctcagcgccagacgcgnaacaagaaacaagt

SEQ ID NO: 70775 - DNA, 662 bp, Homo Sapiens
  misc_feature (45)..(45): n is a, c, g, or t
agcatacttgcattatttataataaaattgcattcagtggctttntaaaaaaatgtttgattcaaaactttaacatactgataagtaagaaacaattataatttctttacatactcaaaaccaagatagaaaaaggtgctatcgttcaacttcaaaacatgtttcctagtattaaggactttaatatagcaacagacaaaattattgttaacatggatgttacagctcaaaagatttataaaagattttaacctattttctcccttattatccactgctaatgtggatgtatgttcaaacaccttttagtattgatagcttacatatggccaaaggaatacagtttatagcaaaacatgggtatgctgtagctaactttataaaagtgtaatataacaatgtaaaaaattatatatctgggaggattttttggttgcctaaagtggctatagttactgattttttattatgtaagcaaaaccaataaaaatttaagtttttttaacaactaccttatttttcactgtacagacactaattcattaaatactaattgattgtttaaaagaaatataaatgtgacaagtggacattatttatgttaaatatacaattatcaagcaagtatgaagttattcaattaaaatgccacatttctggtc

SEQ ID NO: 70776 - DNA, 692 bp, Homo Sapiens
  misc_feature (65)..(65): n is a, c, g, or t
  misc_feature (176)..(176): n is a, c, g, or t
taaagtcctcggaaagtttcctcgcgtaccagacagcggcgggggctgatagcaattttagtttntggcctccctatcctctcacatgagaacactgcctggatgcatctcatgatctctggagaatttccccatctttctcttctttccatcgtgtggattcaatagtgtggatntgaaggctgccctgcccccgactctcctgccgcacccctggccattgtaccttttgatgtttagaagttcgtggaagtagacgctgaggtgtgcagaggagctggtggataacagagaatgccagggaagatgagtgctgggtcagggtacttggatgaaacggtgcaggccaggcgggccctaataaaaccctctgccaggtctgggagtcccaggccatctgctcaacgctctgtggtttgtcagacctgcaagcaagccccctgctggggaagcctaggtgtccttgagctgaaccgcactgaagaactcttgtcctcactggctgatgcagcagaactcttgggaaatgtcttagtcctgcagaatcaggagtcaccagatgatgcagagttgagatcatcattgcaaagttctctgttcctgaggaactaaatttaaggaaaaaatgggattttgttttagagttggaaaaaaagcctgattaaagagtttctgcctgttcatggaaaaaa

SEQ ID NO: 70777 - DNA, 1232 bp, Homo Sapiens
tacggctaggtagaggactgggtgtttaatcggcacgagggcagcgagtggcttcccggttggcgcgcgcccggggcggtggcgctggaggagctcgagacggagcctagttatgtctgggaggcgaacgcggtccggaggagtccgctcagcgctccgggccaagggccccatctcctactaagcctctgcggaggtcccagcggaaatcaggctctgaactcccgagcatcctccctgaaatctggccgaagacacccagtgcggctgcagtcagaaagcccatcgtcttaaagaggatcgtggcccatgctgtagaggtcccagctgtccaatcacctcgcaggagccctaggatttcctttttcttggagaaagaaaacgagccccctggcagggagcttactaaggaggaccttttcaagacacacagcgtccctgccacccccaccagcactcctgtgccgaaccctgaggccgagtccagctccaaggaaggagagctggacgccagagacttggaaatgtctaagaaagtcaggcgttcctacagccggctggagaccctgggctctgcctctacctccaccccaggccgccggtcctgctttggcttcgaggggctgctgggggcagaagacttgtccggagtctcgccagtggtgtgctccaaactcaccgaggtccccagggtttgtgcaaagccctgggccccagacatgactctccctggaatctccccaccacccgagaaacagaaacgtaagaagaagaaaatgccagagatcttgaaaacggagctggatgagtgggctgcggccatgaatgccgagtttgaagctgctgagcagtttgatctcctggttgaatgagatgcagtggggggtgcacctggccagactctccctcctgtcctgtacatagccacctccctgtggagaggacacttagggtcccctcccctggtcttgttacctgtgtgtgtgctggtgctgcgcatgaggactgtctgccttttgaggcttgggcagcagcggcagccatcttggttttaggaaaaggggcccgctggcccagccactcactggtggcctggtctcttggcggcctggcccttctatcccccccaaggaccatagccagtttccagatggggccccaaaatggggaagaaaattcactggccccgcccaaaattaacagggcttgaggtttgagggggaaagggcccc

SEQ ID NO: 70778 - DNA, 1568 bp, Homo Sapiens
cggagagacctgggctggcgcgggcgggatgctgcggctggatacccttgcgtgctgtggagacgcctactctcttcgctgagaactggccgctagcggtggactgaatggccgtgtgagcccactcccgaccccgtgggctagcgtgcgtccctagagtcgagctggggcaatggtgagccatgtggccgccgacggtgggaccgggaaacttttctggtgctcctgtggcgctgccctgtatgccgctgctccatgctccggcagcgggccctgaaacccagccccgccgctgactggcgcccgccgctccgggcagggcccatgccctgcgcgctccgggggtcgtaggctgccgccgagccggggctccggaagccggcgggggcgccgctggcccgtgctggggcgccaatggatcgccactccagctacatcttcatctggctgcagctggagctctgcgccatggccgtgctgctcaccaaaggtgaaattcgatgctactgtgatgctgcccactgtgtagccactggttatatgtgtaaatctgagctcagcgcctgcttctctagacttcttgatcctcagaactcaaattccccactcacccatggctgcctggactctcttgcaagcacgacagacatctgccaagccaaacaggcccgaaaccactctggcaccaccatacccacattggaatgctgtcatgaagacatgtgcaattacagagggctgcacgatgttctctctcctcccaggggtgaggcctcaggacaaggaaacaggtatcagcatgatggtagcagaaaccttatcaccaaggtgcaggagctgacttcttccaaagagttgtggttccgggcagcggtcattgccgtgcccattgctggagggctgattttagtgttgcttattatgttggccctgaggatgcttcgaagtgaaaataagaggctgcaggatcagcggcaacagatgctctcccgtttgcactacagctttcacggacaccattccaaaaaggggcaggttgcaaagttagacttggaatgcatggtgccggtcagtgggcacgagaactgctgtctgacctgtgataaaatgagacaagcagacctcagcaacgataagatcctctcgcttgttcactggggcatgtacagtgggcacgggaagctggaattcgtatgacggagtcttatctgaactacacttactgaacagcttgaaggccttttgagttctgctggacaggagcactttatctgaagacaaactcatttaatcatctttgagagacaaaatgacctctgcaaacagaatcttggatatttcttctgaaggattatttgcacagacttaaatacagttaaatgtgttatttgctttaaaattataaaaagcaaagagaagactttgtacacactgtcaccagggttatttgcatccaagggagctggaattgagtacctaaataaacaaaaatgtgccctatgtaagcttctacatcttgatttattgtaaagatttaaaagaaatatatatattttgtctgaaattta

SEQ ID NO: 70779 - DNA, 501 bp, Homo Sapiens
gaagatgccgaccgcaaatatgaagaggtggcccgtaagctggtcatcattgagagcgacctggaacgtgcagaggagcgggctgagctctcagaaggcaaatgtgccgagcttgaagaagaattgaaaactgtgacgaacaacttgaagtcactggaggctcaggctgagaagtactcgcagaaggaagacagatatgaggaagagatcaaggtcctttccgacaagctgaaggaggctgagactcgggctgagtttgcggagaggtcagtaactaaattggagaaaagcattgatgacttagaagagaaagtggctcatgccaaagaagaaaaccttagtatgcatcagatgctggatcagactttactggagttaaacaacatgtgaaaacctccttagctgcggccacattcatccattttgatgtggattgctgtgtttttatgcaacagcccggccagtgaatgcgttttaatggcctttgccgcgttccgatca

SEQ ID NO: 70780 - DNA, 1327 bp, Homo Sapiens
  misc_feature (91)..(120): n is a, c, g, or t
  misc_feature (811)..(848): n is a, c, g, or t
  misc_feature (882)..(890): n is a, c, g, or t
  misc_feature (1105)..(1114): n is a, c, g, or t
gcggccgctccaacatcagatgctggatcagacttttactggagttaaacaacatgtgaaaacctccttagctgcgaccacattctttcannnnnnnnnnnnnnnnnnnnnnnnnnnnnnaaacacctgcttaccccttaaatgcaatttatttacttttaccactgtcacagaaacatccacaagataccagctaggtcagggggtggggaaaacacatacaaaaaggcaagcccatgtcagggcgatcctggttcaaatgtgccatttcccgggttgatgctgccacactttgtagagagtttagcaacacagtgtgcttagtcagcgtaggaatcctcactaaagcaggagaagttccattcaaagtgccaatgatagagtcaacaggaaggttaatgttggaaacacaatcaggtgtggattggtgctactttgaacaaaaggtccccctgtggtcttttgttcaacattgtacaatgtagaactctgtccaacactaatttattttgtcttgagttttactacaagatgagactatggatcccgcatgcctgaattcactaaagccaagggtctgtaagccacgctgctcttctgagacttccattcctttctgattggcacacgtgcagctcatgacaatctgtaggataacaatcagtgtggatttccactcttttcagtccttcatgttaaagatttagacaccacatacaactggtaaaggacgttttcttgagagttttaactatatgtaaacattgtataatgatatggaataaaatgcacattgtaggacattattctnnnnnnnnnnnnnnnnnnnnnnnnnnnnnnnnnnnnnncagggggcgcgcggcgcctccaaagaagatatannnnnnnnnggagagggcccacaactcttaagccgcatacccccaggtttttctggttaacaagagggggccccccaatgaggggagagcgccgtctatataaaaaagactaagagcaagagggagccgcggcggtttaaaagagcgctcgggaacggggaaaacgtggggatacacagtgggaagacctcttgtagggaagaggaaccccttataccattgcnnnnnnnnnncgaccacttattgtgggcaacacaacacttcccttctaaagaagattttttaaaacgcctcgaagggagacaaattactaacattaaaaggggctatctagcgtcgtgtttcacacaaaggctgcaaattttagatgcgagttgaagaattttggtctgccgagagcgttactgtttggaaaacattttttcccgaggctaggagagaaaata

SEQ ID NO: 70781 - DNA, 1212 bp, Homo Sapiens
  misc_feature (43)..(77): n is a, c, g, or t
aagctgacgagcgcagcgagatcattgagcgaggaagcggcgnnnnnnnnnnnnnnnnnnnnnnnnnnnnnnnnnnncagtcgacggtaccggacatatgcccgggaattcggccattacggccggggggcgccgccgtcgcacagagaggcctgggcggggcggaccggcgctgggcagccaggacagccgcggcagccgggtccgcagggcagcagccggcctctcccactgcagccctcccgcccgcctaccgtccggcgcgatggcggggagtagctcgctggaggcggtgcgcaggaagatccggagcctgcaggagcaggcggacgccgctgaggagcgcgcgggcaccctgcagcgcgagctggaccacgagaggaagctgagggagaccgctgaagccgacgtagcttctctgaacagacgcatccagctggttgaggaagagttggatcgtgcccaggagcgtctggcaacagctttgcagaagctggaggaagctgagaaggcagcagatgagagtgagagaggcatgaaagtcattgagagtcgagcccaaaaagatgaagaaaaaatggaaattcaggagatccaactgaaagaggcaaagcacattgctgaagatgccgaccgcaaatatgaagaggtggcccgtaagctggtcatcattgagagcgacctggaacgtgcagaggagcgggctgagctctcagaaggcaaatgtgccgagcttgaagaagaattgaaaactgtgacgacaacttgaagtcactgaaggctcaggctgagaagtactcgcagaaggaagacagatatgaggaagagatcaaggtcctttccgacaagctgaaggaggctgagactcgggctgagtttgcggagaggtcagtaactaaattggagaaaagcattgatgacttagaagacgagctgtacgctcagaaactgaagtacaaagccatcagcgaggagctggaccacgctctcaacgatatgacttccatataagtttctttgcttcacttctcccaagactccctcgtcgagctggatgtcccacctctctgagctctgcatttgtctattctccagctgaccctggttctctctcttagcatcctgccttagagccaggcacacactgtgctttctattgtacagaagctcttcgtttcagtgtcaaataaacactgtgtaagctaaaaaaaa

SEQ ID NO: 70782 - DNA, 572 bp, Homo Sapiens
gggacgagctgtacgctcagaaactgaagtacaaagccatcagcgaggagctggaccacgctctcaacgatatgacttccatgtaaacgttcatccactctgcctgcttacaccatgccctcatgctaatgtaataaactcaccaccatgccttccttgctccctaatctccatctttgcactcttgtgttcacccttttagtcataacctagaatagtcattgttttgtcactttctgctaatataaaggccaattagattaagtctgtctatacataccattttcttttcagaatccgcttattttgtaaacgctgaactagagcagtgaactagaatgagtgaccttgagcactgtccttttgggaaattaagctaaactgcaagtaaaactagaaggccatgccgtttgttgtacaggaacttctcataaaatatcaaaatttgtttcctgaaattcaactaagtacaacataagtcattttcgttaaatataatttgaaggaacccttaaagtgtcaggttattgagaatctgaggataaggaaagtgcatgatccaacacagcttt

SEQ ID NO: 70783 - DNA, 1583 bp, Homo Sapiens
  misc_feature (980)..(1009): n is a, c, g, or t
  misc_feature (1420)..(1420): n is a, c, g, or t
  misc_feature (1459)..(1459): n is a, c, g, or t
taggacgcgaggcctgggtggcgaattccgcacgagggctcgccccgccgctcctgctgcagccccagggcccctcgccgccgccaccatggacgccatcaagaagaagatgcagatgctgaagctcgacaaggagaacgccttggatcgagctgagcaggcggaggccgacaagaaggcggcggaagacaggagcaagcagctggaagatgagctggtgtcactgcaaaagaaactcaagggcaccgaagatgaactggacaaatactctgaggctctcaaagatgcccaggagaagctggagctggcagagaaaaaggccaccgatgctgaagccgacgtagcttctctgaacagacgcatccagctggttgaggaagagttggatcgtgcccaggagcgtctggcaacagctttgcagaagctggaggaagctgagaaggcagcagatgagagtgagagaggcatgaaagtcattgagagtcgagcccaaaaagatgaagaaaaaattggaaattcaggagatccaactgaaagaggccaagcacattgctgaagatgccgaccgcaaatacgaagaggtggcccgtaagctggtcatcattgagagcgacctggaacgtgcagaggagcgggctgagctctcagaaggccaagtccgacagctggaagaacaattaagaataatggatcagaccttgaaagcattaatggctgcagaggataagtactcgcagaaggaagacagatatgaggaagagatcaaggtcctttccgacaagctgaaggaggctgagactcgggctgagtttgcggagaggtcagtaactaaattggagaaaagcattgatgacttagaagagaaagtggctcatgccaaagaagaaaaccttagtatgcatcagatgctggatccagactttacttggagttaaacaaccatgtgaaaacctcctttagctgcgaccacattctttcannnnnnnnnnnnnnnnnnnnnnnnnnnnnnaaacacctgcttaccccttaaatgcaatttatttacttttaccactgtcacagaaacatccacaagataccagctaggtcagggggtggggaaaacacatacaaaaaggcaagcccatgtcagggcgatcctggttcaaatgtgccatttcccgggttgatgctgccacactttgtagagagtttagcaacacagtgtgcttagtcagcgtaggaatcctcactaaagcaggagaagttccattcaaagtgccaatgatagagtcaacaggaaggttaatgttggaaacacaatcaggtggtggattggtgctactttgaaacaaaggtcccccctgtggtcttttgttcaacattgtacaatgtagaactctgtccaacactaatttatttttgtcttgagttttactancagatgagactatggatcccgcatgccctgaatcactanagccaagggtctgtaagccacgctgctcttctgagactccattccctttctgatgcacacgtgcagctcagggacatctgtaggataacaatcaggggtggatttcaactccttttcggtcctt

SEQ ID NO: 70784 - DNA, 868 bp, Homo Sapiens
aaggtagcgaggcctgggtggcgtattcggcacgagggctcgccccgccgctcctgctgcagccccagggcccctcgccgccgccaccatggacgccatcaagaagaagatgcagatgctgaagctcgacaaggagaacgccttggatcgagctgagcaggcggaggccgacaagaaggcggcggaagacaggagcaagcagctggaagatgagctggtgtcactgcaaaagaaactcaagggcaccgaagatgaactggacaaatactctgaggctctcaaagatgcccaggagaagctggagctggcagagaaaaaggccaccgatgctgaagccgacgtagcttctctgaacagacgcatccagctggttgaggaagagttggatcgtgcccaggagcgtctggcaacagctttgcagaagctggaggaagctgagaaggcagcagatgagagtgagagaggcatgaaagtcattgagagtcgagcccaaaaagatgaagaaaaaatggaaattcaggagatccaactgaaagaggccaagcacattgctgaagatgccgaccgcaaatacgaagaggtggcccgtaagctggtcatcattgagagcgacctggaacgtgcagaggagcgggctgagctctcagaaggccaagtccgacagctggaagaacaattaagaataatggatcagaccttgaaagcattaatgggctgcagaagataagtacctcgcagaaggaagacagatatgaaggaagagatcaagggccctttcccgacaagcttgaaggaaggttgaaactccgggctgagtttgccgaccaggtccgtaactaaattgggagacaagcattgaatgacctag

SEQ ID NO: 70785 - DNA, 532 bp, Homo Sapiens
  misc_feature (330)..(330): n is a, c, g, or t
  misc_feature (496)..(496): n is a, c, g, or t
ggggctcgcactcccgctcctccgcccgaccgcgcgctcgccccgccgctcctgctgcagccccagggcccctcgccgccgccaccatggacgccatcaagaagaagatgcagatgctgaagctcgacaaggagaacgccttggatcgagctgagcaggcggaggccgacaagaaggcggcggaagacaggagcaagcagctggaagatgagctggtgtcactgcaaaagaaactcaagggcaccgaagatgaactggacaaatactctgaggctctcaaagatgcccaggagaagctggagctggcagagaaaaaggccaccgatgctngaagccgacgtagcttctctgaacagacgcatccagctggttgaggaagagttggatcgtgcccaggagcgtctggcaacagctttgcagaagctggaggaagctgagaaggcagcagatgacagtgagagaggcatgaaagtcattgagagccgagccccccctnttcaccccgttaccaaaccaaaaccctgtcgggcgc

SEQ ID NO: 70786 - DNA, 1330 bp, Homo Sapiens
  misc_feature (1263)..(1271): n is a, c, g, or t
gtcaaggagcgaggctgggtggcgatctcagacgagggccgctgcagccgctttccgcggcctgggcctctcgccgtcagcatgccacacgccttcaagcccggggacttggtgttcgctaagatgaagggctaccctcactggcctgcgggagcaggagaaggaggagaaggagcggaggcgcgagcgggccgaccgcggggaggctgagcggggcagcggcggcagcagcggggacgagctcagggaggacgatgagcccgtcaagaagcggggacgcaagggccggggccggggtcccccgtcctcctctgactccgagcccgaggccgagctggagagagaggccaagaaatcagcgaagaagccgcagtcctcaagcacagagcccgccaggaaacctggccagaaggagaagagagtgcggcccgaggagaagcaacaagccaagcccgtgaaggtggagcggacccggaagcggtccgagggcttctcgatggacaggaaggtagagaagaagaaagagccctccgtggaggagaagctgcagaagctgcacagtgagatcaagtttgccctaaaggtcgacagcccggacgtgaagaggtgcctgaatgccctagaggagctgggaaccctgcaggtgacctctcagatcctccagaagaacacagacgtggtggccaccttgaagaagattcgccgttacaaagcgaacaaggacgtaatggagaaggcagcagaagtctatacccggctcaagtcgcgggtcctcggcccaaagatcgaggcggtgcagaaagtgaacaaggctgggatggagaaggagaaggccgaggagaagctggccggggaggagctggccggggaggaggccccccaggagaaggcggagggacaagcccagcaccgatctctcagccccagtgaatggcgaggccacatcacagaagggggagagcgcagaggacaaggagcacgaggagggtcgggactcggaggaggggccaaggtgtggctcctctgaagacctgcacgacagcgtacgggagggtcccgacctggacaggcctgggagcgaccggcaggagcgcgagagggcacggggggactcggaggccctggacgaggagagctgagccgcgggcagccaggcccagcccccgcccgagctcaggctgcccctctccttccccggctcgcaggagagcagagcagagaactgtggggaacgctgtgctgtttgtatttgttcccttgggnnnnnnnnncctgcctaatttctgtgatttccaaccaacatgaaatgactataaacggttttttaatg

SEQ ID NO: 70787 - DNA, 609 bp, Homo Sapiens
  misc_feature (37)..(37): n is a, c, g, or t
  misc_feature (93)..(103): n is a, c, g, or t
  misc_feature (391)..(408): n is a, c, g, or t
atattcatcctgcttcaagtcagcttcagaaatgttntaaaaggactttagctctggaactcaaaatcaatttattaagagccatattctttnnnnnnnnnnngctggataatattctctgtaatatttcagtcctttacaagccaaatacatgtgtcaatgtttctagtatttcaaagaagcaattatgtaaagttgttcaatgtgacataatagtattataattggttaagtagcttaatgattaggcaaactagatgaaaagattaggggcttccacactgcatagattacacgcacatagccacgcatacacacacagacacacagatgtggggtacactgaacttcaaagcccaaatgaatagaaacacattttctggctagcagnnnnnnnnnnnnnnnnnntgttgtttctctttcttgctttgagagtgtaccagtaaaagggattttttcgaattatttttatattattttagctttaattgtgctgtcgttcatgaaacagagctgctctgcttttctgtcagagatggcaagggctttttcagcatctcgtttatgtgtggaatttaaaaagaataaagttttattccattctgtgtg

SEQ ID NO: 70788 - DNA, 693 bp, Homo Sapiens
  misc_feature (175)..(185): n is a, c, g, or t
  misc_feature (228)..(249): n is a, c, g, or t
  misc_feature (456)..(506): n is a, c, g, or t
gacagctgtctgcattccctgtagaaacccagcaatgattatgcacgttgagacatgtgctttttatttcttagcaagatattttatctctgtacataaagtagaaaccaaaagctagggaaacagatactctgtacaccatcatgccacgcattgtttttaaagcattgcggtnnnnnnnnnnnttaactaaaccaagatgctgtgattttttaagttgcaatatgnnnnnnnnnnnnnnnnnnnnnnaatcattgcagttaagagaaatggaaattagttgtgttaatcttgcagaatgtttgcaggactgactatcaaactggatgatttccatttataccctactgtgtcagttcaagcatcaaaataccttgcatctgagacagacttcctacatcagggacaggtatctgtgtgtcattatacaaaacagttctagggggttgaactacnnnnnnnnnnnnnnnnnnnnnnnnnnnnnnnnnnnnnnnnnnnnnnnnnnngatcttttgtactttaggacattaaattgtacaacttttgtatatataaaagcttaggaactttctgtttagcaggaaggcaacacattcctacacttttaatgtatatgtttgttataatgtccatgtaaacatgccctatgtttgtgccttttaattagtttgtctcaataaacaaaatgtagag

SEQ ID NO: 70789 - DNA, 1128 bp, Homo Sapiens
  misc_feature (834)..(855): n is a, c, g, or t
  misc_feature (898)..(907): n is a, c, g, or t
  misc_feature (1022)..(1056): n is a, c, g, or t
tttagaactaatactttcagggttctgacaaccacattctagcttaggggtagggcccacacctgcccccactgaggactgctccttggaccactgtggaggaagcctgggctgtctgaattgtgaattatgactgccagcccaccagagataacagatcccagcaggcagagccagaacccagttttgggtctgcatgccaggaaatgtgaacttcctccaaatgtggccactgtgcctcccaatccaggcctcagcaaggtcattcttgggctttccctacacgagtccttccagtagtccacacataatgctctacatattaaaaacaaaccatttttgtactgtggataagaacagttgtaacaaagtcatagctacatatttttctctacattttgtttattgagacaaactaattaaaaggcacaaacatagggcatgtttacatggacattataacaaacatatacattaaaagtgtaggaatgtgttgccttcctgctaaacagaaagttcctaagcttttatatatacaaaagttgtacaatttaatgtcctaaagtacaaaagatcatttataaaattattttacactaagtactatttattttatttttttactatgtagttcaaccccctagaactgttttgtataatgacacacagatacctgtccctgatgtaggaagtctgtctcagatgcaaggtattttgatgcttgaactgacacagtagggtataaatggaaatcatccagtttgatagtcagtcctgcaaacattctgcaagattaacacaactaatttccatttctcttaactgcaatgattnnnnnnnnnnnnnnnnnnnnnncatattgcaacttaaaaaatcacagcatcttggtttagttaannnnnnnnnnaacgcatgctttaaaaacatgcgtggcatgatggtgtaaagagtatctgtttccctagcttttgcccggccgtaatggccgaattcccgggcatatgtccggtaccgtcgactgnnnnnnnnnnnnnnnnnnnnnnnnnnnnnnnnnnncggccgcttcctcgctcatctactcgctgcgctcgtcgttcggctagaagcgcgtagcgccctagagtctgt

SEQ ID NO: 70790 - DNA, 1601 bp, Homo Sapiens
  misc_feature (82)..(116): n is a, c, g, or t
  misc_feature (273)..(514): n is a, c, g, or t
gaaaacgtatagaccacatatggcgcagtgcggcagtttcgaacgaccgagcgcagcgagctgagagcgaggaagcggccgnnnnnnnnnnnnnnnnnnnnnnnnnnnnnnnnnnncagtcgacggtaccggacatatgcccgggaattcggccattacggccggggtgttttatggtttcatgtaacatacatattcctgggtgtagcacttaactccttttccactttaaatttgtttttgttttttgagacggagtttcactcttgtcannnnnnnnnnnnnnnnnnnnnnnnnnnnnnnnnnnnnnnnnnnnnnnnnnnnnnnnnnnnnnnnnnnnnnnnnnnnnnnnnnnnnnnnnnnnnnnnnnnnnnnnnnnnnnnnnnnnnnnnnnnnnnnnnnnnnnnnnnnnnnnnnnnnnnnnnnnnnnnnnnnnnnnnnnnnnnnnnnnnnnnnnnnnnnnnnnnnnnnnnnnnnnnnnnnnnnnnnnnnnnnnnnnnnnnnnnnnnnnnnnatgagccattgcgcccggccttaaatgttttttttaatcatcaaaaaagaacaacatatctcaggttgtctaagtgtttttatgtaaaaccaacaaaaagaacaaatcagcttatattttttatcttgatgactcctgctccagaatcgctagactaagaattaggtggctacagatggtagaactaaacaataagcaagagacaataataatggcccttaattattaacaaagtgccagagtctaggctaagcactttatctatatctcatttcattctcacaacttataggtgaatgagtaaactgagacttaagggaactgaatcacttaaatgtcacctggctaactgatggcagagccagagcttgaattcatgttggtctgacatcaaggtctttggtcttctccctacaccaagttacctacaagaacaatgacaccacactctgcctgaaggctcacacctcataccagcatacgctcaccttacagggaaatgggtttatccaggatcatgagacattagggtagatgaaaggagagctttgcagataacaaaatagcctatccttaataaatcctccactctctggaaggagactgaggggctttgtaaaacattagtcagttgctcatttttatgggattgcttagctgggctgtaaagatgaaggcatcaaataaactcaaagtatttttaaatttttttgataatagagaaacttcgctaaccaactgttctttcttgagtgtatagccccatcttgtggtaacttgctgcttctgcacttcatatccatatttcctattgttcactttattctgtagagcagcctgccaagaattttatttctgctgttttttttgctgctaaagaaaggaactaagtcaggatgttaacagaaaagtccacataaccctagaattcttagtcaaggaataattcaagtcagcctagagaccatgttgactttcctcatgtgtttccttatgactcagtaagttggcaaggtcctgactttagtcttaataaaacattgaattgtagtaaaggtttttgtaataaaaacttactttggaaaaa

SEQ ID NO: 70791 - DNA, 617 bp, Homo Sapiens
gaataagagcaaaagttaaaattgacaaataaagcatgaaaaacatctgctgttcagaagtaattaaagcacctgatacttattccttaaggaggatattttgctattaccaataaaaatggttagtcataaatgtgtagaacttgctgaccttttgccaaactttcgttagcacaaatcctttgatgatcccaagagactccttagctcttggttctgtagataaaattgatcaaagttttcattgcttgacatttgccaaatgttaccctaagaacatacaggaatccctttcgtttgataggagagctgggtgacgagaccctttatgagatccttacaaataacattcctgaatgtgcaccatactgggggaaatggacaaaaacactcgattaatagtgaccaagtgacacagcatcagaaagatgggcagtgacctctcacgaaggctatgggagtcattttatgttttttaggttacccagtcctcaccaaatagagtgacaatccacatatttggtttacttagcatgagtggaagcaaattttgtattgagagaaacttattaaaatgaaataaatctcatagttctataatcttgaattcaaaaaaa

SEQ ID NO: 70792 - DNA, 1847 bp, Homo Sapiens
cagtcgacggtaccggacatatgcccgggaattcggccattacggccggggaagggctgatgactttcagaagatgaaggtaagtagaaaccgttgatgggactgagaaaccagagttaaaacctctttggagcttctgaggactcagctggaaccaacgggcacagttggcaacaccatcatgacatcacaacctgttcccaatgagaccatcatagtgctcccatcaaatgtcatcaacttctcccaagcagagaaacccgaacccaccaaccaggggcaggatagcctgaagaaacatctacacgcagaaatcaaagttattgggactatccagatcttgtgtggcatgatggtattgagcttggggatcattttggcatctgcttccttctctccaaattttacccaagtgacttctacactgttgaactctgcttacccattcataggaccctttttgtttatcatctctggctctctatcaatcgccacagagaaaaggttaaccaagcttttggtgcatagcagcctggttggaagcattctgagtgctctgtctgccctggtgggtttcattatcctgtctgtcaaacaggccaccttaaatcctgcctcactgcagtgtgagttggacaaaaataatataccaacaagaagttatgtttcttacttttatcatgattcactttataccacggactgctatacagccaaagccagtctggctggaactctcttctctgattgcggattggcactctgctggaattctgcctagctgtgctcactgctgtgcctgcggtggaaacaggcttactctgacttccctggggtgagtgtgctggccggcttcacttaaccttgcctagtgtatcttatccctgcactgtgttgagtatgtcaccaagagtggtagaaggaacaaccagccaatcacgagatacacatgggagggcatttgcattgtgatggaagacagagaagaaaagcagatggcaattgagtagctgataagctgaaaattcactggatatgaaaatagttaatcatgagaaatcaactgattcaatcttcctattttgtcagcgaagggaatgagactctgggaagttaaatgactggcctggcattatgctatgagtttgtgcctttgctgaggacactagaacctggcttgcctcccttataagcagaaacaatttctgccacaaccactagtctctttaatagtattgacttggtaaagggcatttacacacgtaactggatccagtgaatgtcttatgctctgcatttgcccctggtgatcttaaaattcgtttgcctttttaaagctatattaaaaatgtattgttgaatcaaacccctatggacttattgctttatttaactgaattaaaaagccttgatttatccaaaattgtattatagagtgtagaatgaatactagggtgataaattgcaattatttgaagaacctggtgatatgctctacttatcttggattagctaagaattctatgtatacagttggaaaaatggcatatatacatctatcttgaacctgattgaagtctgaagacctaacatattttgtttcttctagagtgtacttttcctgcctcacagttacattggtaattctggcatgtcctcaaaaatgactcatgactgtggatatgaagaactattgacttcttaagaaaaaagggagaaatattaatcagaaagttgattcttatgataatatggaaaagttaaccattatagaaaagcaaagcttgagtttcctaaatgtaagcttttaaagtaatgaacattaaaaaaaaccattatttcactgt

SEQ ID NO: 70793 - DNA, 549 bp, Homo Sapiens
aagaattcggcacgaggcgtctacaggcaaaagtcaaagttattggggtgcatagcagcctggctggaagcattctgagtgctctgtctgccctggtgggtttcattctcctgtctgtcaacccggctgcattaaatcctgcctcattgcagtgtaagttggacgaaaaggatataccaaccagacttcttctttcttatgattatcattcaccttacaccatggactgccatagagccaaagccagtctggctggaactctgtctctgatgctggtttctactgtgttggagttctgcctagctgtgctcactgctgtgctgcagtggaaacagactgtctgacttccctggttactcatgtcctcaaagacgactcatgatgctggatatgaagaactattgacttcttgggaaaaaacggagaaatattaattggaaagttgatttttatgataatatggaaaacctaaccattataaaaaagcaaacttgagtttcctaaatgtaagcatttaaagtaatgcatatttgttttaaaaaattaaaa

SEQ ID NO: 70794 - DNA, 990 bp, Homo Sapiens
  misc_feature (376)..(384): n is a, c, g, or t
agtagaaaccgttgatgggactgagaaaccagagttaaaacctctttggagcttctgaggactcagctggaaccaacgggcacagttggcaacaccatcatgacatcacaacctgttcccaatgagaccatcatagtgctcccatcaaatgtcatcaacttctcccaagcagagaaacccgaacccaccaaccaggggcaggatagcctgaagaaacatctacacgcagaaatcaaagttattgggactatccagatcttgtgtggcatgatggtattgagcttggggatcattttggcatctgcttccttctctccaaattttacccaagtgacttctacactgttgaactctgcttacccattcataggacccnnnnnnnnnatcatctctggctctctatcaatcgccacagagaaaaggttaaccaagcttttggtgcatagcagcctggttggaagcattctgagtgctctgtctgccctggtgggtttcattatcctgtctgtcaaacaggccaccttaaatcctgcctcactgcagtgtgagttggacaaaaataatataccaacaagaagttatgtttcttacttttatcatgattcactttataccacggactgctatacagccaaagccagtctggctggaactctctctctgatgctgatttgcactctgctggaattctgcctagctgtgctcactgctgtgctgcggtggaaacaggcttactctgacttccctgggagtgtacttttcctgcctcacagttacattggtaattctggcatgtcctcaaaaatgactcatgactgtggatatgaagaactattgacttcttaagaaaaaagggagaaatattaatcagaaagttgattcttatgataatatggaaaagttaaccattatagaaaagcaaagcttgagtttcctaaatgtaagcttttaaagtaatgaacattaaaaaaaaccattatttcactgtca

SEQ ID NO: 70795 - DNA, 617 bp, Homo Sapiens
  misc_feature (529)..(538): n is a, c, g, or t
ccactaggcaggtgggaaatgtgaccaaaccaacggtaattatcagtcaagaaggagacaaagtggtcatcaggactctcagcacattcaagaacacggagattagtttccagctgggagaagagtttgatgaaaccactgcagatgatagaaactgtaagtctgttgttagcctggatggagacaaacttgttcacatacagaaatgggatggcaaagaaacaaattttgtaagagaaattaaggatggcaaaatggttatgacccttacttttggtgatgtggttgctgttcgccactatgagaaggcataaaaatgttcctggtcggggcttggaagagctcttcagtttttctgtttcctcaagtctcagtgctatcctattacaacatggctgatcattaattagaaggttatccttggtgtggaggtggaaaatggtgatttaaaaacttgttactccaagcaacttgcccaattttaatctgaaaatttatcatgttttataatttgaattaaagttttgtnnnnnnnnnnttttttttataaacaagtgaatacattttataatttcttttggaatgtaaatcaaatttgaataaaaatcttacacgtg

SEQ ID NO: 70796 - DNA, 771 bp, Homo Sapiens
tgtccaggccgaaatagagaagagtccagccccacgtagacgcgtggaagtccccagcagtaggagcgccctactccgctggtcactcagccgccggaacaaggaaaggaggagccagggtcttcactctggcccttcacagtcatgttggcacttacagccctgggatgtcagggaagctggactcatcccacagcatgactggagcctccataggctgtccaggaagggcagctgcatccaggccaatctcatccccgtagctgaaaacaggggtccctggcagggtgaagagcatcagctggtagagtcggagaagttgagccggcaagaaggaagtcaggagccttgcctgagacaaactccagctgcaccagcgattgccagtggcattcaaatcactgtgtgactagggattttgtatgctccccagtagaaccagaatcagacaggctatgagctagtcaacagcaacgtctttgttggattcgagtaggctcaggactctgctgaaggtcggaggagttagtccccgcaatcaagagcctgtcttcactgaagcccttggctgatattttgccactcagccaagaatgaggatgcatcctctcagattctctatgtcccgaacctggaacccactccacgccacgcttgcagccaaaactccagagcatccttcaccttggtggccacagtgtcaacctgagtggagaaccacgagtcctcgtgccgattcaaccacccagcctcgctacctagccgtaatgt

SEQ ID NO: 70797 - DNA, 1164 bp, Homo Sapiens
  misc_feature (922)..(930): n is a, c, g, or t
ttaggctaggtgcgaggctggtgttgaatcggcacgaggggaagaggccggggtagagcgttctgggtccgagggtccaggtaggggttgagccaccatctgaccgcaagctgcgtcgtgtcgccggttctgcaggcaccatgagccaggacaccgaggtggatatgaaggaggtggagctgaatgagttagagcccgagaagcagccgatgaacgcggcgtctggggcggccatgtccctggcgggagccgagaagaatggtctggtgaagatcaaggtggcggaagacgaggcggaggcggcagccgcggctaagttcacgggcctgtccaaggaggagctgctgaaggtggcaggcagccccggctgggtacgcacccgctgggcactgctgctgctcttctggctcggctggctcggcatgcttgctggtgccgtggtcataatcgtgcgagcgccgcgttgtcgcgagctaccggcgcagaagtggtggcacacgggcgccctctaccgcatcggcgaccttcaggccttccagggccacggcgcgggcaacctggcgggtctgaaggggcgtctcgattacctgagctctctgaaggtgaagggccttgtgctgggtccaattcacaagaaccagaaggatgatgtcgctcagactgacttgctgcagatcgaccccaattttggctccaaggaagattttgacagtctcttgcaatcggctaaaaaaaagaacatccgtgtcattctggaccttacttccaacctaccggggtgaaaacttcctggttcttccccctcaggttgacactgtggccccccaaaggtggaaggagcccttggaggcttggcgctcccaccctggctctggcattggttctccagtttccggacatatccgaaatcccgctcgcaggnnnnnnnnntttctttggccttcttgtggcgaaatattcaccaatggcgctatttcctgcagcatcttgctttcttctttttcgcggacacaattcacccctgtcccttcttgaatgaccctccaataatccacctccatgtgcccccctcatatattgttccttctacctatcaccctcatcctctgcatgagaccccagcgtcccacaccctgtgtaagccatgctcgctctcagtaagtg

SEQ ID NO: 70798 - DNA, 932 bp, Homo Sapiens
aaaataggctagtacgaggctggggttaaatcggcacgaggctgcgcggaggcacagaggccggggagagcgttctgggtccgagggtccaggtaggggttgagccaccatctgaccgcaagctgcgtcgtgtcgccggttctgcaggcaccatgagccaggacaccgaggtggatatgaaggaggtggagctgaatgagttagagcccgagaagcagccgatgaacgcggcgtctggggcggccatgtccctggcgggagccgagaagaatggtctggtgaagatcaaggtggcggaagacgaggcggaggcggcagccgcggctaagttcacgggcctgtccaaggaggagctgctgaaggtggcaggcagccccggctgggtacgcacccgctgggcactgctgctgctcttctggctcggctggctcggcatgcttgctggtgccgtggtcataatcgtgcgagcgccgcgttgtcgcgagctaccggcgcagaagtggtggcacacgggcgccctctaccgcatcggcgaccttcaggccttccagggccacggcgcgggcaacctggcgggtctgaaggggcgtctcgattacctgagctctctgaaggtgaagggccttgtgctgggtccaattcacaagaaccagaaggatgatgtcgctcagactgacttgctgcagatcgaccccaattttggctccaaggaagattttgacagtctcttgcaatcggctaacaaaaagagcatccgggtcattctggaccttactcccaagtaccggggtgagaactcgtggttctccagctcaggtttgacactgtgggccaccaaggtgaaaggatgctcctgggcgttttgcgctgcaagctggcgttgactgggttccaaggttcgggaccttagcagatcctaaaggatgatctca

SEQ ID NO: 70799 - DNA, 1523 bp, Homo Sapiens
gaattcccgggattccttactcagctcctctgagtctcgtgattcagccttgcctccctctctccccctttgccccctccccgtcccacccttaggcgctgggagaagggagggtggggaggtcaggagcctctcagaggggcctcacttgttaacccagcccccatttcaggtctgaaggggcgtctcgattacctgagctctctgaaggtgaagggccttgtgctgggtccaattcacaagaaccagaaggatgatgtcgctcagactgacttgctgcagatcgaccccaattttggctccaaggaagattttgacagtctcttgcaatcggctaaacaaaaagagcatccgtgtcattctggaccttactcccaactaccggggtgagaactcgtggttctccactcaggttgacactgtggccaccaaggtgaaggatgctctggagttttggctgcaagctggcgtggatgggttccaggttcgggacatagagaatctgaaggatgcatcctcattcttggctgagtggcaaaatatcaccaagggcttcagtgaagacaggctcttgattgcggggactaactcctccgaccttcagcagatcctgagcctactcgaatccaacaaagacttgctgttgactagctcatacctgtctgattctggttctactggggagcatacaaaatccttagtcacacagtatttgaatgccactggcaatcgctggtgcagctggagtttgtctcaggcaaggctcctgacttccttcttgccggctcaacttctccgactctaccagctgatgctcttcaccctgccagggacccctgttttcagctacggggatgagattggcctggatgcagctgcccttcctggacagcctatggaggctccagtcatgctgtgggatgagtccagcttccctgacatcccaggggctgtaagtgccaacatgactgtgaagggccagagtgaagaccctggctccctcctttccttgttccggcggctgagtgaccagcggagtaaggagcgctccctactgcatggggacttccacgcgttctccgctgggcctggactcttctcctatatccgccactgggaccagaatgagcgttttctggtagtgcttaactttggggatgtgggcctctcggctggactgcaggcctccgacctgcctgccagcgccagcctgccagccaaggctgacctcctgctcagcacccagccaggccgtgaggagggctcccctcttgagctggaacgcctgaaactggagcctcacgaagggctgctgctccgcttcccctacgcggcctgacttcagcctgacatggacccactacccttctcctttccttcccaggccctttggcttctgatttttctcttttttaaaaacaaacaaacaaactgttgcagattatgagtgaacccccaaatagggtgttttctgccttcaaataaaagtcacccctgcatggtgaagtcttccctctgcttct

SEQ ID NO: 70800 - DNA, 588 bp, Homo Sapiens
  misc_feature (506)..(516): n is a, c, g, or t
catggccccctgcaatcccagtgacccccatcagttgtgctctttgtctaggacccagatcatccccagagagagcccccacaagctcctcaggaaacaggattgctgatgtctgggaacctgatcaccagcttctctggaggccgtaaagatggatttctaaacccactgggtggcaaggcaggaccttcctaatccttgcaacaacattgggcccattttctttccttcacaccgatggaagagaccattaggacatatatttagcctagcgttttcctgttctagaaatagaggctcccaaagtagggaaggcagctgggggagggttcagggcagcaatgctgagttcaagaaaagtacttcaggctgggcacagtggctcatgcctgaaatcctagcactttgggaagacaatgtgggagaatggcttgagcccaggagttcaagaccggcctgagcaacatagtgaggatcccatctctacgcccaccctccccccggcnnnnnnnnnnngctgggtatggtggcttatgcctgtagtcgcagctactcagaaggctgaggtgggaggattgcttgttcccc

SEQ ID NO: 70801 - DNA, 569 bp, Homo Sapiens
atatgggaccagagcatcaagtgaggatgcgaagcagctggtgacatagcctgaggtctctgatagagccagcgccttggcctgagccatggtgcttgagccaccaaccctcaaccatggtatgtcatcagggtccactagagaaggatagaaagatggtgtcacagaagccagactgacccttccttttgtctacccccagactttccagagtgatctcccccgcgccccgagtccctgccctgtcccacattactggggcaccagcaaagccaatcagcggcacacgttccagccagtcgttgtcgggtaagggtgatggcttggaacacatagcctagctcagaggctaccacttctggatcccgtaggcgttctaggtcctgctcttctcttaatggctctgggaagctgggtcctttgccaggtaccatggtcacctccatgcccagtgcctggagggggagaaaacatctgggttcccaaaatggaatccaggaggaaaggttctgttcagctcattccaggaggaaggaaaaggagaataaaactctgccaaactccaaaaa

SEQ ID NO: 70802 - DNA, 1065 bp, Homo Sapiens
gtcccgggatccccaaaaaaggaggcggccgaaacccggcccaacaccggcttttgggcccagcccagacaacccacccacctaatacaactgggccagccccccaggcaaaggcccaccctagcaagatgatcatggcaccgggcccaggcatgcctcccgcaacctgccgtcactgctggcccacatcacgggatgttaaagcagtgccaaaactttgttgaagagctgtgggcccaagatgccctgcatgggactcaaacagctgcaaatgccttgggcaaccaagccaccacttgtcctaccagatatgggaccagagcatcagtgaggatgcgaagcagctggtgactagcctgaggtctctgatagagccagcgcttggcctgagccatggtgcttgagccaccaccctcaaccatgtatgtcatcagggtccatggggcaccagcaaagccaatcagcggcacacgtccagccagtcgttgtcgggtaagggtgatggcttggaacacatagcctagctcagaggctaccacttctggatcccgtaggcgttctaggtcctgctcttctcttaatggctctgggaagctgggtcctttgccaggtaccatggtcacctccatgcccagtgcctggggtacaacaaggatgtcggagaaaatgatggcagcatccagagggaagcgacgcagtggctgcagagtcagttcacagcaggcctcaggagagcgacacgtgctgaaaaagtcctgggcagcccgggtttccctaaactctggtaagtaacggcctgcctggcgcatgcaccaaacgggagtgtagtctgtttcctctccccaggctgctcgcaggaatgtgtcattcttcagctccggaaaaccctgaggtctggcgatcaggtgggggtgggggtaggtgtcagtatgctacgctggaggcccaacccattcgcttccatggtcagctgtctgtaactgcgagctcatccacatttaacctgatctgagcctgccccccagtccaggctccgcccctttctgtagggaaccaagagcgtcg

SEQ ID NO: 70803 - DNA, 849 bp, Homo Sapiens
  misc_feature (355)..(392): n is a, c, g, or t
  misc_feature (612)..(671): n is a, c, g, or t
  misc_feature (758)..(768): n is a, c, g, or t
ggatgactgaataacactgagtagaagcatgcctacatatgcgtttgtcactagtatatatagggaggacaaaggcttgctggtcctcctgtagccagtgccctgttggtcccccaggaggagatcgggcagttggtgaagcagatgctggatgactttggaccacatcgctacattgccaacctgggccatgggctttatcctgacatggacccagaacatgtgggcgcctttgtggatgctgtgcataaacactcacgtctgcttcgacagaactgagtgtatacctttaccctcaagtaccactaacacagatgattgatcgtttccaggacaataaaagtttcggagttgnnnnnnnnnnnnnnnnnnnnnnnnnnnnnnnnnnnnnntcgccgatttacgacacgtctacctctcttttataaaccccatgtaatacctacacacttcctttgtcgcccgcccctccgccctcgaaaaagttttccaaaccccttctttttgggcgcccgcggccccccccaacgtaaacggaaccctgggccccataaccctgtctctcctaagacaaatcccctggcccatagaaataagcggtttgggatcttnnnnnnnnnnnnnnnnnnnnnnnnnnnnnnnnnnnnnnnnnnnnnnnnnnnnnnnnnnnnacaggcgcttcttccgggggccttcccgtgggttcttacaacccggggaactcccccggggggtctcctcatatccacattttaggnnnnnnnnnnngttgcaactcttattcccaaataatccgggtacattctcctcatacgtcatttcttgccccacaccctgggaaaccccccc

SEQ ID NO: 70804 - DNA, 1209 bp, Homo Sapiens
ggggcagttacagacagctgaccatggaagcgaatgggttgggacctcagggttttccggagctgaagaatgacacattcctgcgagcagcctggggagaggaaacagactacactcccgtttggtgcatgcgccaggcaggccgttacttaccagagtttagggaaacccgggctgcccaggactttttcagcacgtgtcgctctcctgaggcctgctgtgaactgactctgcagccactgcgtcgcttccctctggatgctgccatcattttctccgacatccttgttgtaccccaggcactgggcatggaggtgaccatggtacctggcaaaggacccagcttcccagagccattaagagaagagcaggacctagaacgcctacgggatccagaagtggtagcctctgagctaggctatgtgttccaagccatcacccttacccgacaacgactggctggacgtgtgccgctgattggctttgctggtgccccatggaccctgatgacatacatggttgagggtggtggctcaagcaccatggctcaggccaagcgctggctctatcagagacctcaggctagtcaccagctgcttcgcatcctcactgatgctctggtcccatatctggtaggacaagtggtggctggtgcccaggcattgcagctgtttgagtcccatgcagggcatcttggcccacagctcttcaacaagtttgcactgccttacatccgtgatgtggccaagcaagtgaaggccaggttgcgggaggcaggcctggcaccagtgcccatgatcatctttgctaaggatgggcattttgccctggaggagctggcccaagctggctatgaggtggttgggcttgactggacagtggccccaaagaaagcccgggagtgtgtggggaagacggtgacattgcagggcaacctggacccctgtgccttgtatgcatctgaggaggagatcgggcagttggtgaagcagatgctggatgactttggaccacatcgctacattgccaacctgggccatgggctttatcctgacatggacccagaacatgtgggcgcctttgtggatgctgtgcataaacactcacgtctgcttcgacagaactgagtgtatacctttaccctcaagtaccactaacacagatgattgatcgtttccaggacaataaaagtttcggagttgaaaaaaa

SEQ ID NO: 70805 - DNA, 939 bp, Homo Sapiens
  misc_feature (549)..(550): n is a, c, g, or t
  misc_feature (653)..(653): n is a, c, g, or t
aaggtagcgaggcctgggtggcgaattcggcacgaggggacctcagggttttccggagctgaagaatgacacattcctgcgagcagcctggggagaggaaacagactacactcccgtttggtgcatgcgccaggcaggccgttacttaccagagtttagggaaacccgggctgcccaggactttttcagcacgtgtcgctctcctgaggcctgctgtgaactgactctgcagccactgcgtcgcttccctctggatgctgccatcattttctccgacatccttgttgtaccccaggcactgggcatggaggtgaccatggtacctggcaaaggacccagcttcccagagccattaagagaagagcaggacctagaacgcctacgggatccagaagtggtagcctctgagctaggctatgtgttccaagccatcacccttacccgacaacgactggctggacgtgtgccgctgattggctttgctggtgccccatggaccctgatgacatacatggttgagggtgggtgggctcaagcaccatggctcanngccaagcgctggctctatcagagacctcaggctagtcaccagctgcttcgcatcctcactgatgctctggtcccatatctggaagggacaagtggtggctggntgcccaggcattgcagctgtttgagtcccatgcagggcatcttggcccacagctcttcaacaagtttgcactgccttacatccggggatgtggccaagcaaggggagggcaggttggggggaaggaaggcctgggcaccaatggcccaggatcatccttgggcaaaggaagggggaatttttggcccctggagggagaccgggccccacagccggggtttatggagggggggttttagacccctggacctgggaaacacggggagccccccaaaagggagaagagc

SEQ ID NO: 70806 - DNA, 795 bp, Homo Sapiens
ccacctcattagccagcttggccagctcctccagggcaaaatgcccatccttagcaaagatgatcatgggcactggtgccaggcctgcctcccgcaacctggccttcacttgcttgccacatcacggatgtaaggcagtgcaaacttgttgaagaactgtgggccaagatggccctgcatgggactcaaacagctgcaatgcctgggcaccagccaccacctgtcctaccagatatgggaccagagcatcagtgaggatgcgaagcagctggtgactagcctgaggtctctgatagagccagcgcttggcctgagccatggtgcttgagccaccaccctcaaccatgtatgtcatcagggtccatggggcaccagcaaagccaatcagcggcacacgtccagccagtcgttgtcgggtaagggtgatggcttggaacacatagcctagctcagaggctaccacttctggatcccgtaggcgttctaggtcctgctcttctcttaatggctctgggaagctgggtcctttgccaggtaccatggtcacctccatgcccagtgcctgcagagtcagttcacagcaggcctcaggagagcgacacgtgctgaaaaagtcctgggcagcccgggtttccctaaactctggtaagtaacggcctgcctggcgcatgcaccaaacgggagtgtagtctgtttcctctccccaggctgctcgcaggaatgtgtcattcttcagctccggaaaaccctgaggtcccaacccattcgcttgccatggtcagctgtctgtaactg

SEQ ID NO: 70807 - DNA, 580 bp, Homo Sapiens
gcagcacagccttttgtacctctcccactccaggtcatttcacatcaactctttctgcctccctcttgtaagtgtgataccctaccttgttttaacctgaattgactgtcccttagctgagagagccagacacactccattttggctccttcacttgcagccccttacccaccccccttcctcaaggacttaacttgtgcaagctgactcccagcacatcaaagaatgcaattaatggataagatactgtggcaagctatatccgcagttcccaggaatttgcccagttgatagtaccctaagcccccacatttgtgtccggttgatggtacccaaagcccccgcatctatcgccttgtgatggatttaaaacccctgcacctggaactgtttgttttcctgtaaccatttgtcttttaactttttgcctgttttgcttctgtaagagtgcttcagctaggctcctcctcccctttctaaaccaaagtataaaagaaaatctagccctttcttcagggccgagagaattttgagcactagccatctctcggttgccggctaataaaggacttctgaattc

SEQ ID NO: 70808 - DNA, 1099 bp, Homo Sapiens
  misc_feature (48)..(48): n is a, c, g, or t
  misc_feature (79)..(79): n is a, c, g, or t
  misc_feature (131)..(131): n is a, c, g, or t
acatgttcattgactgcggatgtcatgagatgtacaaggtcagacatnatcagatacaggcatgtttgtatcttgttanaatgtaatgcccaaccttgttttttactaaccctgttcttagactctccctntcctttaatcacctagccttgtttccacctgaattgactctcccttagctaagaaagccagacagactccatcttggctctttcactggcagccccgttcctcaacgacttaacttgtgcaagctgactcccagcacatccaagaatgcaattaactgataagatactgtggcgagcaatatccgcagttcccaggaattcgtccgattgataatgcccaaagcccagcgtctatcaccttgtaatagtcttaaagcccctgcacctggaactgtttactttcctgtgaccatttatccttttaacttttttgcctactttacttctgtaaaattgttttaactagaccccccctcccctttctaaaccaaagtataaaagaaaatctagccccttcttcagggccgagagaacttcgagcgttagccgtctcttggccaccagctaaataaacggactctttaattcatctcaaagtgtggcattttctctgacttgatcaggtacaacattaaggtcaggcttttactgatgcttatttattcataaaagccacaagctacagggagttcccaaggagacaactctccttagcattatctcttcacttggcagtcacagccaagaacacacaggctcaagctgatctacaagttagtcaatatggcaaaccatacatagtagtataattaatacatgcatatggtagattaaaatttccacatcacagtaacatttaacattgagagaaaactgtgtagtatagggaaagatgttaatgaaccagtccaaggatagcaacatggacaaggagactgtcttggactaatccaggcgcttgtcaaagtcttgcaagggagagttcttgatttgggcagagcctttagcagcagatgctaggcgctgcccaagagtgacagcaggacaatgtctaatgagcctcgtgccgattcgacacccagcccgac

SEQ ID NO: 70809 - DNA, 623 bp, Homo Sapiens
  misc_feature (71)..(83): n is a, c, g, or t
atggagagaatacgcagtgcctgtgctcaggacaaagaagaagttctcgagtggatgcaaaaccctgaggnnnnnnnnnnnnnagagcccacgtgggaagagcagcagacaagcgtgttgcacctggtgggggacaacttccgggagaccctgaagaagaagaaacacaccttggtcatgttctacgccccttggtgcccacactgtaagaaggtcattccgcactttactgctactgctgatgccttcaaagatgaccgaaagattgcctgtgccgctgttgactgtgtcaaagacaagaaccaagacctgtgccagcaggaggcggtcaagggctaccccactttccactactaccactatgggaagttcgcagaaaagtatgacagcgaccgcacagaattgggatttaccaattatattcgagccctccgggagggagaccatgaaagactagggaaaaagaaggaagagttataattcctgcctcagaaaaagcttttccattacactgtgaatgatacctgttttgttgtttctgaatttccacatgttctgaagacaaattttttatagccgcttatggccattttgtacaattttgaaataaaattaacccattt

SEQ ID NO: 70810 - DNA, 680 bp, Homo Sapiens
  misc_feature (121)..(133): n is a, c, g, or t
cagaaagattccacatctcagagtttcctacgttgaagtattttaagaatggagagaaatacgcagtgcctgtgctcaggacaaagaagaagtttctcgagtggatgcaaaaccctgaggnnnnnnnnnnnnnagagcccacgtgggaagagcagcagacaagcgtgttgcacctggtggggacaacttccgggagaccctgaagaagaagaaacacaccttggtcatgttctacgccccttggtgcccacactgtaagaaggtcattccgcactttactgctactgctgatgccttcaaagatgaccgaaagattgcctgtgccgctgttgactgtgtcaaagacaagaaccaagacctgtgccagcaggaggcggtcaagggctaccccactttccactactaccactatgggaagttcgcagaaaagtatgacagcgaccgcacagaattgggatttaccaattatattcgagccctccgggagggagaccatgaaagactagggaaaaagaaggaagagttataattcctgcctcagaaaaagcttttccattacactgtgaatgatacctgttttgttgtttctgaatttccacatgttctgaagacaaattttttatagccgcttatggccattttgtacaattttgaaataaaattaaaccatttaaatacaa

SEQ ID NO: 70811 - DNA, 920 bp, Homo Sapiens
aaaccttacggctaggtagcgaggcctgggtagttaattcggcacgagggcggcggctggagaggtggtcggagaagtaggaacctcctgccgggctcgtggcggcttctgtccgctccgcggcgggaagcgccttccccacaggacatcaatgcaagcttgaataagaaaaacaaattcttcctcctaagccatggcatatcagttatacagaaatactactttgggaaacagtcttcaggagagcctagatgagctcatacagtctcaacagatcaccccccaacttgcccttcaagttctacttcagtttgataaggctataaatgcagcactggctcagagggtcaggaacagagtcaatttcaggggctctctaaatacgtacagattctgcgataatgtgtggacttttgtactgaatgatgttgaattcagagaggtgacagaacttattaaagtggataaagtgaaaattgtagcctgtgatggtaaaaatactggctccaatactacagaatgaatagaaaaaatatgacttttttacaccatcttctgttattcattgcttttgaagagaagcatagaagagactttttatttattctagaattgcagaaatgactacactgtgctataccagagaattccagtagaaagaaacttgtaactctgtagcctcttacatcacctttattatacagcatgaaaaaccataacttctttttaaggacaaaagttgttgccttcctaagaaccttctttaataaactcattttaaaactctgagtaataactggtgaagctattaaggtagcaatatgaagatattagataatgcattttcccatttcctttgcaaggaacatgatgccctttcagaatgcttatttcaataaagtcatgttttgtcagttgta

SEQ ID NO: 70812 - DNA, 567 bp, Homo Sapiens
ggctcttacctggtctggaaaagctggaggtttacagcgaaggctatgttcccctggcctctacattggcagctgccctagaacgtgtcatggcccacaatcttctttggtgcccgacaaatgggtgggccttggtggatctcctgctggtcagtggggcggcgaagccaataccgtggcctggtaccaggtgagcccgctggccgcccgcatgctctacccctacctggcctggctggccttcacgaccacactcaactactgcgtatggcgggacaaccatggctggcgtgggggacgcggctgccagagtgagtgcccggcccaccagggactgcagctacaccagcaggtgccatcacgcttgtgatgtggtggccgtcacgctttcatgaccactgggcctgctagtctgtcagggccttggcccaggggtcagcagagcttcagaggtggccccacctgagcccccacccgggagcagtgtcctgtgctttctgcatgcttagagcatgttcttggaacatggaattttataagctgaataaagtttttgacttcctttaa

SEQ ID NO: 70813 - DNA, 1116 bp, Homo Sapiens
  misc_feature (912)..(927): n is a, c, g, or t
  misc_feature (930)..(939): n is a, c, g, or t
  misc_feature (960)..(960): n is a, c, g, or t
ggctgctatgtgactataagacagtgcttaaaaaagcaggctggtaccggtccggtattcccgggatatcgtcgacccacgcgtcgggcagtgcccttcccggagcgtgccctcgccgctgagctcccctgaacagcagctgcagcagccatggccccgccctgggtgcccgccatgggcttcacgctggcgcccagcctggggtgcttcgtgggctcccgctttgtccacggcgagggtctccgctggtacgccggcctgcagaagccctcgtggcacccgccccactgggtgctgggccctgtctggggcacgctctactcagccatggggtacggctcctacctggtctggaaagagctgggaggcttcacagagaaggctgtggttcccctgggcctctacactgggcagctggccctgaactgggcatggccccccatcttctttggtgcccgacaaatgggctgggccttggtggatctcctgctggtcagtggggcggcggcagccactaccgtggcctggtaccaggtgagcccgctggccgcccgcctgctctacccctacctggcctggctggccttcgcgaccacactcaactactgcgtatggcgggacaaccatggctggcgtgggggacggcggctgccagagtgagtgcccggcccaccagggactgcagctgcaccagcaggtgccatcacgcttgtgatgtggtggccgtcacgctttcatgaccactgggcctgctagtctgtcagggccttggcccaggggtcagcagagcttcagaggtggccccacctgagcccccacccgggagcagtgtcctgtgctttctgcatgcttagagcatgttcttggaacatggaattttataagctgaataaagtttttgacttcctttannnnnnnnnnnnnnnnaannnnnnnnnnaaagggcggccgctctagagntattccctcgagggggcccaggcttacgcgtacccagctttcctttgtacaaagtgggtcccctataagtgaggtcggtattataagctagggcacttgggccgctcgtttttacaaccgtccgtggactggggaaaacctggcctaacctttggg

SEQ ID NO: 70814 - DNA, 1572 bp, Homo Sapiens
gcgttggtgacatatagacccgtgtgtcaaaaagcaggctggtaccggtccggaattcccgggatatcgtcgacccacgcgtccgccgcaaccttgagcggcatccgtggagtgcgcctgcgcagctacgaccgcagcaggaaagcgccgccggccaggcccagctgtggccggacagggactggaagagaggacgcggtcgagtaggttttaaaacatgaatcctacactcatccttgctgccttttgcctgggaattgcctcagctactctaacatttgatcacagtttagaggcacagtggaccaagtggaaggcgatgcacaacagattatacggcatgaatgaagaaggatggaggagagcagtgtgggagaagaacatgaagatgattgaactgcacaatcaggaatacagggaagggaaacacagcttcacaatggccatgaacgcctttggagacatgaccagtgaagaattcaggcaggtgatgaatggctttcaaaaccgtaagcccaggaaggggaaagtgttccaggaacctctgttttatgaggcccccagatctgtggattggagagagaaaggctacgtgactcctgtgaagaatcagggtcagtgtggttcttgttgggcttttagtgctactggtgctcttgaaggacagatgttccggaaaactgggaggcttatctcactgagtgagcagaatctggtagactgctctgggcctcaaggcaatgaaggctgcaatggtggcctaatggattatgctttccagtatgttcaggataatggaggcctggactctgaggaatcctatccatatgaggcaacagaagaatcctgtaagtacaatcccaagtattctgttgctaatgacaccggctttgtggacatccctaagcaggagaaggccctgatgaaggcagttgcaactgtggggcccatttctgttgctattgatgcaggtcatgagtccttcctgttctataaagaaggcatttattttgagccagactgtagcagtgaagacatggatcatggtgtgctggtggttggctacggatttgaaagcacagaatcagataacaataaatattggctggtgaagaacagctggggtgaagaatggggcatgggtggctacgtaaagatggccaaagaccggagaaaccattgtggaattgcctcagcagccagctaccccactgtgtgagctggtggacggtgatgaggaaggacttgactggggatggcgcatgcatgggaggaattcatcttcagtctaccagcccccgctgtgtcggatacacactcgaatcattgaagatccgagtgtgatttgaattctgtgatattttcacactggtaaatgttacctctattttaattactgctataaataggtttatattattgattcacttactgactttgcattttcgtttttaaaaggatgtataaatttttacctgtttaaataaaatttaatttcaaatgtagtggtggggcttctttctatttttgatgcactgaatttttgtgtaataaagaacataattgggctct

SEQ ID NO: 70815 - DNA, 659 bp, Homo Sapiens
  misc_feature (19)..(19): n is a, c, g, or t
  misc_feature (104)..(104): n is a, c, g, or t
gaagcacaaaaacctggcncaggacctgtacaaaatctgtccattcaaaattccttatgaagcttctgcagatattatgaggatcccaccaacaagacaaaggngaatccccattcccctcatgaatccaagagcaattgtaattcagttgttattgttaagcacctaatgtaaaacctagtcctgttgctaggtgtttgccagcattgtctcttagtttaatctctgtaactgagctttatcatcctgctttttagaaactgagaaaaccaagactcaaagtgttgggattctcatgccaccactttgtaggtgtgtgccagcagctcaattactttgcctttattcacttttcttatctataaaaagagagtaataccccctaacacctaaaattgttttgaggaaaaaaatgagttaatagagacaaacactcttaagatagtgtctcacacatcctaaactctcaatagatattaactattattatttgtcatataacacttcgtgatgatctgattaatatctgctcaccccctcactaagataccagctccatgaagaaagaggccttctcaggttttgcttactatcaccaagcacacacctataacataataagatcttggaatgaataaaataatgagatcaagatgaat

SEQ ID NO: 70816 - DNA, 936 bp, Homo Sapiens
ctggtacggtccggatttcccgggatatcgtcgacccacgcgtcggcgactccgcaaccttgagcggcatccgtggagtgcgcctgcgcagctacgaccgcagcaggaaagcgccgccggccaggcccagctgtggccggacagggactggaagagaggacgcggtcgagtaggtgtgcaccagccctggcaacgagagcgtctaccccgaactctgctggccttgaggtggggaagccggggagggcagttgaggaccccgcggaggcgcgtgactggttgagcgggcaggccagcctccgagccgggtggacacaggttttaaaacatgaatcctacactcatccttgctgccttttgcctgggaattgcctcagctactctaacatttgatcacagtttagaggcacagtggaccaagtggaaggcgatgcacaacagattatacggcatgaatgaagaaggatggaggagagcagtgtgggagaagaacatgaagatgattgaactgcacaatcaggaatacagggaagggaaacacagcttcacaatggccatgaacgcctttggagacatgaccagtgaagaattcaggcaggtgatgaatggctttcaaaaccgtaagcccaggaaggggaaagtgttccaggaacctctgttttatgaggcccccagatctgtggattggagagagaaaggctacgtgactcctgtgaagaatcagggtcagtgtggttcttgtagggcttttagtgctactggtgctcttgaaggacagatgttccggaaaactgggaggttatctcactgagtgagcagaatctggtagactgctctgggcctcaaggcaatgaagctgccatggtggcctaatggattatgctttccagtatgttccggaataatggaggcctggactccgaaggattcttttca

SEQ ID NO: 70817 - DNA, 1795 bp, Homo Sapiens
  misc_feature (297)..(297): n is a, c, g, or t
  misc_feature (1515)..(1524): n is a, c, g, or t
aacaatcatattcacgtaattttccccctttggtggcagaactgtagcaatagggggagaagacaagcagcggatgaagcgttttctcagcttttggaattgcttcgacctgacatccgttgtaaccgtttgccacttcttcagatatttttataaaaaagtaccactgagtcagtgagggccacagattggtattaatgagatacgagggttgttgctgggtgtttgtttcctgagctaagtgatcaagactgtagtggagttgcagctaacatgggttaggtttaaaccatgggnggatgcaacccctttgcgtttcatatgtaggcctactggctttgtgtagctggagtagttgggttgctttgtgttaggaggatccagatcatgttggctacagggagatgctctctttgagaggctcctgggcattgattccatttcaatctcattctggatatgtgttcattgagtaaaggaggagagaccctcatacgctatttaaatgtcacttttttgcctatcccccgttttttggtcatgtttcaattaattgtgaggaaggcgcagctcctctctgcacgtagatcattttttaaagctaatgtaagcacatctaagggaataacatgatttaaggttgaaatggctttagaatcatttgggtttgagggtgtgttattttgagtcatgaatgtacaagctctgtgaatcagaccagcttaaatacccacacctttttttcgtaggtgggcttttcctatcagagcttggctcataaccaaataaagttttttgaaggccatggcttttcacacagttattttattttatgacgttatctgaaagcagactgttaggagcagtattgagtggctgtcacactttgaggcaactaaaaaaggcttcaaaccgttttgatcagtttcttttcaggaaacattgtgctctaacagtatgactattctttcccccactcttaaacagtgtgatgtgtgttatcctaggaaatgagagttggcaaacaacttctcattttgaatagagtttgtgtgtacctctccatatttaatttatatgataaaataggtggggagagtctgaaccttaactgtcatgttttgttgttcatctgtggccacaataaagtttacttgtaaaattttagaggccattactccaattatgttgcacgtacactcattgtacaggcgtggagactcattgtatgtataagaatattctgacagtgagtgacccggagtctctggtgtaccctcttaccagtcagctgcctgcgagcagtcattttttcctaaaggtttacaagtatttagaactcttcagttcagggcaaaatgttcatgaagttattcctcttaaacatggttaggaagctgatgacgttattgattttgtctggattatgtttctggaataattttaccaaaacaagctatttgagttttgacttgacaaggcaaaacatgacagtggattctctttacaaatggnnnnnnnnnntccttattttgtataaaggacttccctttttgtaaactaatcctttttattggtaaaaattgtaaattaaaatgtgcaacttgaaggttgtctgtgttaagtttccatgtccctgctctgctgtctcttagatatcacataatttgtgtaaccaattatctcttgaagagcatttaggaagtacccagtattttttgctggattaattcctggatgcagaattcctgggttttcattttaatgaaggaggatgcttgctaactttgaaaaa

SEQ ID NO: 70818 - DNA, 649 bp, Homo Sapiens
aaagcaattattgagggtgcggacgcgtcatcactgcagaaacgtgcaggcagagccgatcagaactacaattacaaccagcatgcgtatcccactgcctatggtgggaagtactcagtcaagacccctgcaaagggggagtctcaccttcttcctcggcttcccgggtgcaacctggcctgctgcagtgggtgaagttttggtaggtgagtgtcagagtgagccgacccaggccacatcctggcagtggaggcacagtcacccggggcagggccaggatcttggtatatcctcagatctcagtgggcagcgacatgaagtcaggcaatttcttgcaaccaccaccgaggccccgaaaagcactggtcgtcagggagctcctccccttggcccccagcctgtgccagccctggcccggctgccacacctctgtttcctaggctggggacccagcttgtctctccttgtttcttcccactgcactgtggtgcttcagtggccaccagcctcgtcacatacaccagcatctttctgtacctcctccctttggtgacctgaagtcactgtgacagttctccaggaaggaggagcttcctacttttgagtttctctgtggaaataaaacatgaatcttgtttccctaaaaaaa

SEQ ID NO: 70819 - DNA, 674 bp, Homo Sapiens
tagaccctcggaaagcaccttagggtggaccacataggcacagctctgagaagatggtgttctagatggagcacagggaccgggatagagatgttacaggggaactgtggagaaaagagcctcctggtggaagggttcagaggtgggacgcagcgaggctgcatgggcgagaggtgatagcttggctcggcagaaccacaaactctgttttaggcggagcaaaagtgaggggcaccacaggcgaacaggtaggacagcaaaagaatggtgggtgcccagacgctgggtgaaaagatgccccgtttccgcaggcttaggagtggccacgtgctaccatttgattttctttcttctaggcaatttcttgcaaccaccaccgaggccccgaaaagcactggtcgtcagggagctcctccccttggcccccagcctgtgccagccctggcccggctgccacacctctgtttcctaggctggggacccagcttgtctctccttgtttcttcccactgcactgtggtgcttcagtggccaccagcctcgtcacatacaccagcatctttctgtacctcctccctttggtgacctgaagtcactgtgacagttctccaggaaggaggagcttcctacttttgagtttctctgtggaaataaaacatgaatcttgtttccct

SEQ ID NO: 70820 - DNA, 778 bp, Homo Sapiens
ggattcagggcaaggtcgagctgggcagtgaggaggtgacgctgttgtggagtcaatactgtgaactctgagacgtctcctgggatgtttaactttgacactttctggaagaattttaaatccaagctgggtttcatcaactgggatgccataaacaagaaccaggtcccgccccccagcacccgagccctcctctacttcagccgactctgggaggatttcaaacagaacactcctttcctcaactggaaagcaattattgagggtgcggacgcgtcatcactgcagaaacgtgcaggcagagccgatcagaactacaattacaaccagcatgcgtatcccactgcctatggtgggaagtactcagtcaagacccctgcaaaggggggagtctcaccttcttcctcggcttcccgggtgcaacctggcctgctgcagtgggtgaagttttggtaggcaatttcttgcaaccaccaccgaggccccgaaaagcactggtcgtcagggagctcctccccttggcccccagcctgtgccagccctggcccggctgccacacctctgtttcctaggctggggacccagcttgtctctccttgtttcttcccactgcactgtggtgcttcagtggccaccagcctcgtcacatacaccagcatctttctgtacctcctccctttggtgacctgaagtcactgtgacagttctccaggaaggaggagcttcctacttttgagtttctctgtggaaataaaacatgaatcttgtttccctaaaa

SEQ ID NO: 70821 - DNA, 1781 bp, Homo Sapiens
  misc_feature (59)..(87): n is a, c, g, or t
  misc_feature (1671)..(1715): n is a, c, g, or t
gtgccaagctaaaattaccctcactaaagggaataagcttgcggccgcatacgcggtcnnnnnnnnnnnnnnnnnnnnnnnnnnnnnatatagaatctgaggctgttggggcttggacttaaatttccatcaggcctctctccagcaggtaatccctctccttccgctgggtcccctggggaggtgtgaactcaagggcctagccccaagaacactttttacggcttttcttaatccttttccagtcccctcttatgttataaacgtgggcagttggatgttactggtttcggcataacgtaatccatttcactgtagcctaaactccagtccgaggtgggatatggttcaaatgagcagggcccgagctggaagcgcaaggcagccgccgccgtgccgctcctcccttgccctcaggccaggtccctgctggaagcggctgcatcttcctgtcagccctggtttccatggtgactggcgtgacgcagccacctgagtatggctgaccttcctgcagagagaggagccgcagtcttttgcttgtggaaggagacgctgggctgtgcggtgcggagggtgatgaggatgtctggtgacagccgtgcggacaccactcctctctgcagcactgcctcccagcgccagggtcgcgggcacatcccactgagagcgggggtcctgccccatcttagagtcaaaggcagaggggcttccaggccctggatggggtattttggtgtcacctgaagtccctctgacatcaccttgtttcatcattttttatgacagaattagaaacccatccttcaagcacaataatcatcacagacttgagtttgcttcctaaagcaaaggctccgggtttgtttggaaaatttttttgatttctgaaatgaattgatttttatatttggggcatctctatagaaagtgaccaccaaggccagtaagtacgggaaaaaatgtttactaacttcctcagagattcgtgatacgcgtttctccactgacagacatttaaaaacaaccttcagctccgtttcaatcaatcacctcgacttgttttttagcatggacactgccagcaggacagacagggatggagtaaaccgaagtcaatttcagggctcttggcgtgttggacacagaagaaatcctagtgcagcctttggtagctaacagtcactgattttataattggagaatgcgtaaagattcatttttcaaggagaagagcctgcaaatggccaatgaaggaggtaaataaactaagatattccgagggaagggacccaggccacctcccttccgcaggtctgcagatgaagggttttttgaatgaaatgccactgtgcattttcagaaaaaaaaatctctgataaacagactttgaatggatgtttgttcctcctgattctcttttctcttcgtggcgacttagagttggcggatattcggaactgtgaatgtacatagcgttgagttaaaccccttgtgtgtgagacaggacgcagcgggcccctggtggcctgggggccagacccgtgggcaggtggggcatgggccctggcctgcggggacctgctggggtgtgagggcagagggagggttgccatgaaggaacttgggattttcaatggaataaataaaacataaagtctatacttgggnnnnnnnnnnnnnnnnnnnnnnnnnnnnnnnnnnnnnnnnnnnnngaccgcgtatgcggccgcaagcttattcccgtttagtgagggttaattttagcttggcactgcccg

SEQ ID NO: 70822 - DNA, 598 bp, Homo Sapiens
cataaatttatcaatttataaagggcaacattgtgagggcaaataaagcactacttaagattcagagtaatgagttatttgtgcaaaatacatcacaaaatttggcatttagacatgcgaaaaatatgggcaataagatactacttaacattgccaaaaattcatgactcccctcgccaactccccactcccaagagaaagtacataggtactaaactttatggaaatacattgcattgaatagttcctttaaaacctttataattggctggaaagaacggaggaattctaattgaactagaaaatacacaagaaatgtgcatgtaatgtactctctaaagggacaacagagtggacagtcaaggaactccacatattcatagtgttatttgcaagtttctaagcagcatccacaaataaaaagtaggtggctgaagttacaggctgatgttacacattagtaacacaatgtgatcacacaaatttggcaaaacataagtattcaagtttgagttgaatcaatttgacaaagcatatgtcaaacagatgtcagatagcaaaaggctacattagggactacagatttgcacgttagttg

SEQ ID NO: 70823 - DNA, 1111 bp, Homo Sapiens
  misc_feature (79)..(79): n is a, c, g, or t
  misc_feature (81)..(81): n is a, c, g, or t
  misc_feature (207)..(207): n is a, c, g, or t
cgacctcagctcacgagactcagtgcgagaaccagagtctggagactgagacgttgtacagcgacagccccctgcgacntntgtgacgaggagagtctgtcgtcctcacccgacacacccgggatgctcagtcatgtgaaggaatcgtccggacctgaccaggacgtgacagcagctctctgtgcccgagtcatctccctgcccgtnggcaccgtggagacccagcagggccaggacatgacgacaaactggtgaaagacagaaaaaagagttgaggagctcattgactccaaccacgacggcatcgtgaccgccgaggagctggagagctacatggaccccatgaacgagtacaacgcgctgaacgagcccaagcagatgatcgccgtcgccgacgagaaccagaaccaccacctggagcccgaggaggtgctcaagtacagcgagtcttcacgggcagcaagctggtggactacgcgcgcagcgtgcacgaggagttttgagcgcccggccgcgccccgcgccgccccccacgcaccaccggggcggcctcgcgggtgactccgggctccgtggctgtcccggaccccacctcttccctgccgcccgccaccggccgaccgaccgcggctgccccagttgatgagcggcgtgtcccctctgcagcgcgcaccccggcggggctttggctgtgacgcggtcggggcgcggggctgggctgtggccccgcggcgccgcctcctccctggtccctcgaaatcgtggcatctcacttctgagaacgaaatctcgcttcagtcactctgccgaaggcgctgacggcatcgcggccggaacctctgggcccggcccctcccagggccgccgctccgtgggaaaaaacagctcctccatttccttgaaaactgaacgattattaaaaatagattaaacttcgctggaaatgagtagccaggaagttcaggggagggtgccgggtccttcccgggcctggcgtgtcggagccacccaggtcccgcagctgccgctgagaaaatgcaaatatttgttgtgacaagaatcacatacatttactttaaatatagttgccttttttggtcagcttcaaaaa

SEQ ID NO: 70824 - DNA, 1940 bp, Homo Sapiens
ggcctgggtggcgaattcggcacgaggcccggaggagagatggtggcgccggcgtcccctccgtgaggtcgcgcccgttcgcaccgcccccgcccgcaagaaagatggcagtggcctgatccgggcccgttggcggcgtcactgacgcttcgctccggtcctcggatcccgagcgcggggaggcagaccgactgtgagctgcttgtccccatcctgcggccgtcctggggacacagagccctccgtggtgcccggggattggattggagccaggacctcacttcctcctctgcccctgcccctgcccctcccagcacctggcccacaccctgcagcccgccccatggtctggccctgggtggcgatggcgtccaggtggggtcccctcattggcctggctccgtgctgcctctggctcctgggggcagtccttctgatggacgcgtctgcacggcctgccaaccactcgtccactcgagagagagtagccaacagggaggagaatgagatcctgcccccagaccacctgaacggggtgaagctggagatggacgggcacctcaatcgcggcttccaccaggaggtcttcctaggcaaggacctgggtggctttgatgaggacgcggagccgcggcggagccggaggaagctgatggtcatcttttccaaggtggatgtgaacactgaccggaagatcagtgccaaggagatgcagcgctggatcatggagaagacggccgagcacttccaggaggccatggaggagagcaagacacacttccgcgccgtggaccctgacggggacggtcacgtgtcttgggacgagtataaggtgaagtttttggcgagtaaaggccatagcgagaaggaggttgccgacgccatcaggctcaacgaggaactcaaagtggacgaggaaacacaggaagtcctggagaacctgaaggaccgctggtaccaggcggacagcccccctgcagacctgctgctgacggaggaggagttcctgtcgttcctccaccccgagcacagccggggaatgctcaggttcatggtgaaggagatcgtccgggacctggaccaggacggtgacaagcaactctctgtgcccgagttcatctccctgcccgtgggcaccgtggagaaccagcagggccaggacattgacgacaactgggtgaaagacagaaaaaaggagtttgaggagctcattgactccaaccacgacggcatcgtgaccgccgaggagctggagagctacatggaccccatgaacgagtacaacgcgctgaacgaggccaagcagatgatcgccgtcgccgacgagaaccagaaccaccacctggagcccgaggaggtgctcaagtacagcgagttcttcacgggcagcaagctggtggactacgcgcgcagcgtgcacgaggagttttgagcgcccggccgcgccccgcgccgccccccacgcaccacccggggcgggcctcgcgggtgactccgggctccgtggctgtcccggaccccacctcttccctgccgcccgccaccggccgaccgaccgcggctgccccagttgatgagcggcgtgtcccctctgcagcgcgcaccccggcggggctttggctgtgacgcggtcggggcgcggggctgggctgtggccccgcggggacaactcctccctgggtcctccaaatcgggaagatcccccttgtggaaaccgaatcttgcttcggtcccttctgccctagagggctgaacggcatacttggccgaaacctctgggcccggggcccatcccagggccgccgcatcccttggcgaaaaaccagcttcccccagtttcccttggcaaacttgaacggcttcttcaagaaattagatttgtccttcggccgggacagtgaggagacccagcgaagttccgggggcaaacggctccctcg

SEQ ID NO: 70825 - DNA, 1152 bp, Homo Sapiens
cagtcgacggtaccggacatatgcccgggaattcggccattacggccggggggcgcggagaactctgcaaaacaagaggctgaggattgcgttagagataaaccagttcacgccggagccccgtgagggaagcgtctccgttgggtccggccgctctgcgggactctgaggaaaagctcgcaccaggtggacgcggatctgtcaacatgggtaaaggagaccccaacaagccgcggggcaaaatgtcctcgtacgccttcttcgtgcagacctgccgggaagagcacaagaagaaacacccggactcttccgtcaatttcgcggaattctccaagaagtgttcggagagatggaagaccatgtctgcaaaggagaagtcgaagtttgaagatatggcaaaaagtgacaaagctcgctatgacagggagatgaaaaattacgttcctcccaaaggtgataagaaggggaagaaaaaggaccccaatgctcctaaaaggccaccatctgccttcttcctgttttgctctgaacatcgcccaaagatcaaaagtgaacaccctggcctatccattggggatactgcaaagaaattgggtgaaatgtggtctgagcagtcagccaaagataaacaaccatatgaacagaaagcagctaagctaaaggagaaatatgaaaaggatatggctgcatatcgtgccaagggcaaaagtgaagccaggaaaaaaggggcccgggcaggcccacaggctcaaagaagaagaaacgaacccacaaaattgagaaggagggacgaggaacaaccaacatgtcgccatggacgcgaaacccattctgcactacttgcgaaaacatgcaccttgtcgggccggccctcggccccttcaaaaaagcttttctaaaaccatttcccttggccgccgcggggcccccgtcaggaaaatggaaaacctgggccccaaacgttgttttcccctaaggaaaaaccttggctcacatgcatacagaggcttggggatctcccaccccagataaaataactctcccgggcgtgcaaaccgacatcgcttttattaaacaaaatctccatagtggcaatttctggagaggctcttttctcgtggatcgtctttccaggaggagaattgcgctggg

SEQ ID NO: 70826 - DNA, 1190 bp, Homo Sapiens
gggaaaccagttcacgccggagccccgtgagggaagcgtctccgttgggtccggccgctctgcgggactctgaggaaaagctcgcaccaggtggacgcggatctgtcaacatgggtaaaggagaccccaacaagccgcggggcaaaatgtcctcgtacgccttcttcgtgcagacctgccgggaagagcacaagaagaaacacccggactcttccgtcaatttcgcggaattctccaagaagtgttcggagagatggaagaccatgtctgcaaaggagaagtcgaagtttgaagatatggcaaaaagtgacaaagctcgctatgacagggagatgaaaaattacgttcctcccaaaggtgataagaaggggaagaaaaaggaccccaatgctcctaaaaggccaccatctgccttcttcctgttttgctctgaacatcgcccaaagatcaaaagtgaacaccctggcctatccattggggatactgcaaagaaattgggtgaaatgtggtctgagcagtcagccaaagataaacaaccatatgaacagaaagcagctaagctaaaggagaaatatgaaaaggatattgctgcatatcgtgccaagggcaaaagtgaagcaggaaagaagggccctgggcaggccaacaggctcaaagaagaagaacgaaccagaaaatgagggagaggaagaggaaaaagaaaaatgaagatgaggaggaagaggatgaagatgaagaataaatggctatcctttaatgatgcgtgtggaatgtgtgtgtgtgctcaggcaattattttgctaagaatgtgaattcaagtgcagctcaatactagcttcagtataaaaactgtacagatttttgtatagctgataagattctctgtagagaaaatacttttaaaaaatgcaggttgtagctttttgatgggctactcatacagttagattttacagcttctgatgttgaatgttcctaaatatttaatggtttttttaatttcttgtgtatggtagcacagcaaacttgtaggaattagtatcaatagtaaattttgggttttttaggatgttgcatttcgtttttttaaaaaaaattttgtaataaaattatgtatattatttctattgtctttgtcttaatatgctaagttaattttcactttaaaaaagccatttgaagaacaaaaa

SEQ ID NO: 70827 - DNA, 905 bp, Homo Sapiens
  misc_feature (748)..(748): n is a, c, g, or t
gggggcgcggagaactctgcaaaacaagaggctgaggattgcgttagagataaaccagttcacgccggagccccgtgagggaagcgtctccgttgggtccggccgctctgcgggactctgaggaaaagctcgcaccaggtggacgcggatctgtcaacatgggtaaaggagaccccaacaagccgcggggcaaaatgtcctcgtacgccttcttcgtgcagacctgccgggaagagcacaagaagaaacacccggactcttccgtcaatttcgcggaattctccaagaagtgttcggagagatggaagaccatgtctgcaaaggagaagtcgaagtttgaagatatggcaaaaagtgacaaagctcgctatgacagggagatgaaaaattacgttcctcccaaaggtgataagaaggggaagaaaaaggaccccaatgctcctaaaaggccaccatctgccttcttcctgttttgctctgaacatcgcccaaagatcaaaagtgaacaccctggcctatccattggggatactgcaaagaaattgggtgaaatgtggtctgagcagtcagccaaagataaacaaccatatgaacagaaagcagctaagctaaaggagaaatatgaaaaggatattgctgcatatcgtgccaagggcaaaagtgaagcaggaaagaagggccctggcaggccaacaggctcaaagaagaagaacgaaccagaagatgaggaggaggaggaggaaaaaanaagatgaagatgaggaggaagaggatgaagatgaagaaataaatggctatccttttaatgatgcgttgtggaaatgtggtgtgttgtggctcaaggcaaatttattttttgcctaaagaaatggtggaaattccaagttggccagcttccaaataca

SEQ ID NO: 70828 - DNA, 962 bp, Homo Sapiens
  misc_feature (645)..(645): n is a, c, g, or t
  misc_feature (741)..(741): n is a, c, g, or t
  misc_feature (749)..(749): n is a, c, g, or t
  misc_feature (765)..(765): n is a, c, g, or t
  misc_feature (768)..(768): n is a, c, g, or t
  misc_feature (771)..(771): n is a, c, g, or t
  misc_feature (777)..(777): n is a, c, g, or t
  misc_feature (795)..(795): n is a, c, g, or t
  misc_feature (798)..(798): n is a, c, g, or t
cagtcgacggtaccggacatatgcccgggaattcggccattacggccggggagttcacgccggagccccgtgagggaagcgtctccgttgggtccggccgctctgcgggactctgaggaaaagctcgcaccaggcaagaataccctccaataccctcgggtggacgcggatctgtcaacatgggtaaaggagaccccaacaagccgcggggcaaaatgtcctcgtacgccttcttcgtgcagacctgccgggaagagcacaagaagaaacacccggactcttccgtcaatttcgcggaattctccaagaagtgttcggagagatggaagaccatgtctgcaaaggagaagtcgaagtttgaagatatggcaaaaagtgacaaagctcgctatgacagggagatgaaaaattacgttcctcccaaaggtgataagaaggggaagaaaaaggaccccaatgctcctaaaaggccaccatctgccttcttcctgttttgctctgaacatcgcccaaagatcaaaagtgaacaccctggcctatccattggggatactgcaaagaaattgggtgaaatgtggtctgagcagtcagccaaagataaacaaccatatgaacagaaagcagctaagctaaaggagaaatatngaaaaggatattgctgcatatcgtgcccagggcaaaagtgaagcaggaaagaagggccctggcaggccaacaggcttcaagaagaagaacgaccanaaaatgangaggagggaggagaanaanaanatgaanatgagggaggaaaagatnaanatgaagaataaatggctatcctttaatgatgccctgtggaatgggtgtgttgtgctcaagcaattaatttttgctaagaattgtgaatttcaggtgccagccccaatacttaaccttcaggaattaaaaactggtaccgaaattttttgatataaccggaaaaa

SEQ ID NO: 70829 - DNA, 1086 bp, Homo Sapiens
  misc_feature (43)..(82): n is a, c, g, or t
  misc_feature (86)..(120): n is a, c, g, or t
  misc_feature (971)..(979): n is a, c, g, or t
aaggatgtatacgactcactatagggcgctagcgcgtatttgnnnnnnnnnnnnnnnnnnnnnnnnnnnnnnnnnnnnnnnnccgnnnnnnnnnnnnnnnnnnnnnnnnnnnnnnnnnnncagtcgacggtaccggacatatgcccgggaattcggccattacggccgggcgagtcaagctggacgaggcctttgagtttgtgaagcagaggcgaagcatcatctctcccaacttcagcttcatgggccagctgctgcagtttgagtcccaggtgctggctccgcactgttcggcagaggctgggagccccgccatggctgtgctcgaccgaggcacctccaccaccaccgtgttcaacttccccgtctccatccctgtccactccacgaacagtgcgctgagctaccttcagagccccattacgacctctcccagctgctgaaaggccacgggaggtgaggctcttcacatcccattgggactccatgctccttgagaggagaaatgcaataactctgggaggggctcgagagggctggtccttatttatttaacttcacccgagttcctcatgggtttctaagcagttatggtgatgacttagcgtcaagacatttgctgaactcagcacattcgggaccaatatatagtgggtacatcaagtccatctgacaaaatggggcaagaagagaaaggactcagtgtgtgatccggtttctttttgctcgcccctgtattttgtagaatctcttcatgcttgacatacctaccagtattattcccgacgacacatatacatatgagaatataccttatttatttttgtgtaggtgtctgccttcacaaatgtcattgtctactcctagaagaaccaaatacctcaatttttgtttttgagtactgtactatcctgtaaatatatcttaagcaggtttgttttcagcactgatggaaaataccagtgttgggnnnnnnnnnagttgccacagttgtatgtttgctgattatttatgacctgaaataatatatttcttcttctaagaagacactttgtacataagatacacgtcgcaggaccgctacta

SEQ ID NO: 70830 - DNA, 1475 bp, Homo Sapiens
  misc_feature (76)..(110): n is a, c, g, or t
  misc_feature (1248)..(1256): n is a, c, g, or t
aatgaatcatcctatgggggctaagcgtatttcgaacgacgagcgcagcgaagtagatgagcgaggaagccggcgnnnnnnnnnnnnnnnnnnnnnnnnnnnnnnnnnnncagtcgacggtacccggacatatgcccgggaattcggccattacggccgggtacctgggcagtgcgtatcacgcttcccgcaaggacatgctggatgccttgggcataactgccttgatcaacgtctcagccaattgtcccaaccattttgagggtcactaccagtacaagagcatccctgtggaggacaaccacaaggcagacatcagctcctggttcaacgaggccattgacttcatagactccatcaagaatgctggaggaagggtgtttgtccactgccaggcaggcatttcccggtcagccaccatctgccttgcttaccttatgaggactaatcgagtcaagctggacgaggcctttgagtttgtgaagcagaggcgaagcatcatctctcccaacttcagcttcatgggccagctgctgcagtttgagtcccaggtgctggctccgcactgttcggcagaggctgggagccccgccatggctgtgctcgaccgaggcacctccaccaccaccgtgttcaacttccccgtctccatccctgtccactccacgaacagtgcgctgagctaccttcagagccccattacgacctctcccagctgctgaaaggccacgggaggtgaggctcttcacatcccattgggactccatgctccttgagaggagaaatgcaataactctgggaggggctcgagagggctggtccttatttatttaacttcacccgagttcctctgggtttctaagcagttatggtgatgacttagcgtcaagacatttgctgaactcagcacattcgggaccaatatatagtgggtacatcaagtccatctgacaaaatggggcagaagagaaaggactcagtgtgtgatccggtttctttttgctcgcccctgttttttgtagaatctcttcatgcttgacatacctaccagtattattcccgacgacacatatacatatgagaatataccttatttatttttgtgtaggtgtctgccttcacaaatgtcattgtctactcctagaagaaccaaatacctcaatttttgtttttgagtactgtactatcctgtaaatatatcttaagcaggtttgttttcagcactgatggaaaataccagtgttgggnnnnnnnnnagttgccaacagttgtatgtttgctgattatttatgacctgaaataatatatttcttcttctaagaagacattttgttacataaggatgacttttttatacaatggaataaattatggcatttctattgaaacggacgcgtgggtcgacgattcccagaaaattccgatccttgccagcagctgtggcgccggcagcgcgcccgttgatggtaaaattg

SEQ ID NO: 70831 - DNA, 1124 bp, Homo Sapiens
gagacatatgcttcgcctctgcttcacaaactcaaaggcctcgtccagcttgactcgattagtcctcataaggtaagcaaggcagatggtggctgaccgggacaatgcctgcctggcagtggacaaacacccttcctccagcattcttgatggagtctatgaagtcaatggcctcgttgaaccaggagctgatgtctgccttgtggttgtcctccacagggatgctcttgtactggtagtgaccctcaaaatggttgggacaattggctgagacgttgatcaaggcagttatgcccaaggcatccagcatgtccttgcgggaagcgtgatacgcactgcccaggtacagaaagggcaggatttccaccgggccaccctgatcgtagagtggggtactgcaggaactgcacccagattccgcgctgtcagggacgctagtactcaggggaaggctgagccccatgggggtcgactgtttgctgcacagctccgggcaggaagccgaaaacgcttcgtatcctcctttgaggaagaagacttgcgcggcgcgcgcctcgcggcagagcgcgccggccgccagggccagggtgccgtcgcgcttggcgccgtccagggcggcgctgcgctcgtccagcaacaccacggcgtggtaggcgccggccagcaggcggccgcggagctcggcgttgggcacgatgtgctccaggcccatggcgcccttggcccggcgccgcacgatggtgctgaagcgcacgttgacagagccggcgatgtggccggcgttgaaagcgaagaaggagcggcagtccagcagcaggcattgcgccgctcgctcccccagcagcgcccgcaggcctccagcgtccagggtgcccacttccatgaccatggccggcctcagcgcccccagcgtgatcggccctgcggtgctctttgtctgttctcggggccaagggcagggcggcgcttttcgaggaaaagctagacccccgggtctctctgcgccgaaccaaaagccgcttttggactgagagaggagcgtcacgcggggctccgggctcctcggcttcttcgcggttcccccgactgcccctccgacccgcgtcgcacacacagcccaaatg

SEQ ID NO: 70832 - DNA, 1497 bp, Homo Sapiens
  misc_feature (775)..(827): n is a, c, g, or t
  misc_feature (1280)..(1280): n is a, c, g, or t
gggccgcaaaacggctcctaaggtagcgaggcctgggtggcgaattcggcacgagggtctctcatgtctaccacccagagccgcccaccctggatgaattctggcccttcagagagtcggccctaccacggcatgcatggaggtggtcctggtgggcccggaggtggcccccacagcttcccacacccattacccagcctgacaggtgggcatggtggacatcccatgcagcacaaccccaatggacccccacccccttggatgcagccaccaccaccaccgatgaaccagggcccccaccctcctgggcaccatggccctcctccaatggtccctgctctttccttccatcaagatcagtacctgggaagtacgcctgtgggctctggggtctatcgcctgcatcaaggaaaaggtatgatgccgccaccacctatgggcatgatgccgccgccgccgccgcctcccagtgggcagcccccaccccctccctctggtcctcttcccccatggcaacaacagcagcagcagcctccgccaccccctccgcccagcagcagtatggcttccagtacccccttgccatggcagcaaagatccctccccgcggcggcgatggcccgagccatgagagtgaggactttccgcgcccattggtgacccttccaggcagacagcctcagcaacgcccctggtggacaggatggttcggcaaagcagcctgagttatttttgtggacggaatcggaacacgctggctccatatcgtgaaatnnnnnnnnnnnnnnnnnnnnnnnnnnnnnnnnnnnnnnnnnnnnnnnnnnnnncagactccgtccaaggagatgctctccccggtcttctgctgcaatttagattcctttcccttctctccagttctccttcccttaccaaggagaggggagcaaatggttttgggcaagggctttggccattcatgtcaagctggttgtgggtttttcaaggtgccatagccacccccaaagatgtttgtttaaagcgtggggttttttaatctctgccacccttgtcaagggagtcttgtaaagttgccgagggtaggttcatctccaggtttcgggattcccatccgtcctggcgatcctgccagcagtgggtgggcagcctgagctccctcggggctcgcctgccagcctggagttcttcctgtggctccttgatcacctgagcctgcctcagattccatttgggtcctctccctcctggaaaggcttccctttaaagttttgcgtttaaancccaaaaggtctgaaatgttttgcaagtgtggaaggggtttagagcccccttggtcattcctccttgccttttttcctaccggctttccctctccatgaagggggattcggttggacattaatggtatactggcggggttctctttcctggggtttatctgccgaaaatttccccggggactttttttccggggtaaaaattcaccagtggcccttt

SEQ ID NO: 70833 - DNA, 859 bp, Homo Sapiens
  misc_feature (173)..(205): n is a, c, g, or t
agtaacaaatgaagtgcgctgtctgcgacacctcccagcccaccgaactccgccgccatttcctcgcttggcctaacggttcggccaatcccagcgcgcatcaagaaggactgaggctccgccaatcggaggccgccgatttcgacccttcgcctcggcccggcccaatccannnnnnnnnnnnnnnnnnnnnnnnnnnnnnnnncggtgccctctctcctccctctttgtgcgtctcgcgccgccgccgcccgccgcgtgagaggacgggctccgcgcgctccggcagcgcattcgggtcccctccccccgggaggcttgcgaaggagaagccgccgcagaggaaaagcaggtgccggtgcctgtccccgggggcgccatggcgaccggagcgaacgccacgccgttggacttcccaagtaagaagcggaagaggagccgctggaaccaagacacaatggaacagaagacagtgattccaggaatgcctacagttattccccctggacttactcgagaacaagaaagagcttatatagggcaactgcagatagaagacctgactcgtaaactgcgcacaggagacctgggcatcccccctaaccctgagggacaggtccccttcccctgagcccatctacaatagcgaggggaagcggcttaacacccgagagttcgcacccgcaaaagctggaagagagcgcacaactcatcaagagaggttgcactcatcggattcagccactgcaattaaaactcagcacactgtgagtgaaagtcagatcacagaatataccaaatcacttggggcgccacggccaaagaaactgagaataaaaggtgatgcaaattacgggaa

SEQ ID NO: 70834 - DNA, 1643 bp, Homo Sapiens
gaaacatatagggctaggtagcgaggcctggggtgttaaatcggcacgagggccgcgtgagaggacgggctccgcgcgctccggcagcgcattcgggtcccctccccccgggaggcttgcgaaggagaagccgccgcagaggaaaagcaggtgccggtgcctgtccccgggggcgccatggcgaccggagcgaacgccacgccgttggacttcccaagtaagaagcggaagaggagccgctggaaccaagacacaatggaacagaagacagtgattccaggaatgcctacagttattccccctggacttactcgagaacaagaaagagcttatatagtgcaactgcagatagaagacctgactcgtaaactgcgcacaggagacctgggcatcccccctaaccctgaggacaggtccccttcccctgagcccatctacaatagcgaggggaagcggcttaacacccgagagttccgcacccgcaaaaagctggaagaggagcggcacaacctcatcacagagatggttgcactcaatccggatttcaagccacctgcagattacaaacctccagcaacacgtgtgagtgataaagtcatgattccacaagatgagtacccagaaatcaactttgtggggctgctcatcgggcccagagggaacaccctgaagaacatagagaaggagtgcaatgccaagattatgatccgggggaaagggtctgtgaaagaagggaaggttgggcgcaaagatggccagatgttgccaggagaagatgagccacttcatgccctggttactgccaatacaatggagaacgtcaaaaaggcagtggaacagataagaaacatcctgaagcagggtatcgagactccagaggaccagaatgatctacggaagatgcagcttcgggagttggctcgcttaaatgggacccttcgggaagacgataacaggatcttaagaccctggcagagctcagagacccgcagcattaccaacaccacagtgtgtaccaagtgtggaggggctggccacattgcttcagactgtaaattccaaaggcctggtgatcctcagtcagctcaggataaagcacggatggataaagaatatttgtccctcatggctgaactgggtgaagcacctgtcccagcatctgtgggctccacctctgggcctgccaccacaacccctggccagcgcacctcgtcctgctgctcccgccaacaaacccacctccaccgtctctcatgtctaccacccagagccgcccaccctggatgaattctggcccttcagagagtcggacctaccacggcatgcatggaggtggtcctggtgggcccggaggtggcccccacagattacacacacccattacccagcctgacaggtgggcatggtggacatcccatgcagcacaaccccaatggacccccaccctcttggatgcagccaccaccaccaccgatgaaccagggccccaccctcctgggcaccatggcctcctccaatggatcagtacctgggaagtacgcctgtgggctctggggtctatcgcctgcatcaaggacaaaggtatgagtgccgccaccacctaatggtgcatgatgccgccgccgcctgcgctcaggggagcg

SEQ ID NO: 70835 - DNA, 1545 bp, Homo Sapiens
  misc_feature (403)..(450): n is a, c, g, or t
  misc_feature (1135)..(1267): n is a, c, g, or t
  misc_feature (1278)..(1324): n is a, c, g, or t
  misc_feature (1349)..(1484): n is a, c, g, or t
ggcgcctgtgggctctggggtctatcgcctgcatcaaggaaaaggtatgatgccgccaccacctatgggcatgatgccgccgccgccgccgcctcccagtgggcagcccccaccccctccctctggtcctcttcccccatggcaacaacagcagcagcagcctccgccaccccctccgcccagcagcagtatggcttccagtacccccttgccatggcagcaaagatccctccccgcggcggcgatggcccgagccatgagagtgagggactttccgcgcccattggtgacccctccaggcagacagcctcagcaacgcccctggtggacaggatggttcgggcaaagcagcctgagttatttttggggacggaatcggaacacgctggctccatatcgtgannnnnnnnnnnnnnnnnnnnnnnnnnnnnnnnnnnnnnnnnnnnnnnncctttcttcagactccgtccaaggagatgctctccccggtcttctgctgcaatttagattcctttcccttctctccagttctccttcccttaccaaggagaggggagcaaatggttttgggcaagggctttggccattcatgtcaagctggttgtgggtttttcaaggtgccatagccacccccaaatatgtttgtttaaagcgtggggttttttaatctctgccacccttgtcaagggagtcttgtaaagttgccgagggtaggttcatctccaggtttcgggattcccatccgtcctggcgatcctgccagcagtgggtgggcagcctgagctccctcgggctcgcctgccagcctggagttcttcctgtgctccttgatcacctgagctgcctcagattccatttggtcctctccttcctggaaggcttccttttatgttttgttttaatcccaaatgtctgaatgttttgcagtgtgtaggggtttgagccccttgttcattctccttcctttttcctcccgcttccctctccatgaagtgattctgttgacaataatgtatactgcgcgttctcttcactggtttatctgcagaaatttctctgggcttttttcggtgttagattcaacactgcgctaaagcggggatgttccattgaataaaagagcagtgtggttttnnnnnnnnnnnnnnnnnnnnnnnnnnnnnnnnnnnnnnnnnnnnnnnnnnnnnnnnnnnnnnnnnnnnnnnnnnnnnnnnnnnnnnnnnnnnnnnnnnnnnnnnnnnnnnnnnnnnnnnnnnnnnnnnnnnnnttgggggggcnnnnnnnnnnnnnnnnnnnnnnnnnnnnnnnnnnnnnnnnnnnnnnnccccaaggggaaaggaaaaggggcnnnnnnnnnnnnnnnnnnnnnnnnnnnnnnnnnnnnnnnnnnnnnnnnnnnnnnnnnnnnnnnnnnnnnnnnnnnnnnnnnnnnnnnnnnnnnnnnnnnnnnnnnnnnnnnnnnnnnnnnnnnnnnnnnnnnnnnnccagcgggttcaaatttaaaattccccccgcccggggaattatgggaagagggggggaaat

SEQ ID NO: 70836 - DNA, 972 bp, Homo Sapiens
taggtagcgaggcctgggtggcgaattcggcacgaggaagagccggcgccatggtggagaaggaggaggctggcggcggcattagcgaggaggaggcggcacagtatgaccggcagatccgcctgtggggactggaggcccagaaacggctgcgggcctctcgggtgcttcttgtcggcttgaaaggacttggggctgaaattgccaagaatctcatcttggcaggagtgaaaggactgaccatgctggatcacgaacaggtaactccagaagatcccggagctcagttcttgattcgtactgggtctgttggccgaaatagggctgaagcctctttggagcgagctcagaatctcaaccccatggtggatgtgaaggtggacactgaggatatagagaagaaaccagagtcatttttcactcaattcgatgctgtgtgtctgacttgctgctccagggatgtcatagttaaagttgaccagatctgtcacaaaaatagcatcaagttctttacaggagatgtttttggctaccatggatacacatttgccaatctaggagagcatgagtttgtagaggagaaaactaaagttgccaaagttagccaaggagtagaagatgggcccgacaccaagagagcaaaacttgattcttctgagacaacgatggtcaaaaagaaggtggtcttctgccctgttaaagaagccctggaggtggactggagcagtgagaaagcaaaggctgctctgaagcgcacgacctccgactactttctccttcaagtgctcttaaagttccgtacagataaaggaagagatcccagtttctgatacatatggagggaagattcctgagttggttggatccaggattacgaaattgatgtggttggctccacttgggtattaagtcctggaacggcttccggagaacttcgccggtcatggttctccgaaatggcccagtgtgtgg

SEQ ID NO: 70837 - DNA, 815 bp, Homo Sapiens
ataggctaggtacgaggcctggggtgtgtaaattcggcacgaggggcacgaagagccggcgccatggtgcagaaggaggaggctggcggcggcattagcgaggaggaggcggcacagtatgaccggcagatccgcctgtggtggactggaggcccagaaacggtcagggccggcgcggcttgaggccgcgagggtctggagggggcgtctattctgaggcgtttgccgcccggaaggagcgggaaggctgcgggcctctcgggtgcttcttgtcggcgttgaaaggacttggggctgaaattgccaagaatctcatcttggcaggagtgaaaggactgaccatgctggatcacgaacaggtaactccagaagatcccggagctcagttcttgattcgatactgggtctgttggccgaaatagggctgaagcctctttggagcgagctcagaatctcaaccccagtggtggatgtgaaggtggacactgaggatatagagaagaaagccagaggtcatttttcactcaattcgagtgctgtgtgtctgacttgctgctccagggatgtcatagttaaagttgaccaggatctgtcacaaaaatagcatcaagttctttacaggagatgtattaggctaccatggagttacacatttgccaatctaggagagcatgagttggtaagaggagaaaactaaaggttgccaaagttagccaacggagtaggaagatgggcccgacaacaaagagagcaaaactggattcttctgagacaacgatggtcaacaaaggtggtcttctgccctggtacgggaa

SEQ ID NO: 70838 - DNA, 2450 bp, Homo Sapiens
taggctagtacggaggctgggtgttgaattcggcacgaggggagctgaggcaggaagagccggcgccatggtggagaaggaggaggctggcggcggcattagcgaggaggaggcggcacagtatgaccggcagatccgcctgtggggactggaggcccagaaacggctgcgggcctctcgggtgcttcttgtcggcttgaaaggacttggggctgaaattgccaagaatctcatcttggcaggagtgaaaggactgaccatgctggatcacgaacaggtaactccagaagatcccggagctcagttcttgattcgtactgggtctgttggccgaaatagggctgaagcctctttggagcgagctcagaatctcaaccccatggtggatgtgaaggtggacactgaggatatagagaagaaaccagagtcatttttcactcaattcgatgctgtgtgtctgacttgctgctccagggatgtcatagttaaagttgaccagatctgtcacaaaaatagcatcaagttctttacaggagatgtttttggctaccatggatacacatttgccaatctaggagagcatgagtttgtagaggagaaaactaaagttgccaaagttagccaaggagtagaagatgggcccgacaccaagagagcaaaacttgattcttctgagacaacgatggtcaaaaagaaggtggtcttctgccctgttaaagaagccctggaggtggactggagcagtgagaaagcaaaggctgctctgaagcgcacgacctccgactactttctccttcaagtgctcttaaagttccgtacagataaaggaagagatcccagttctgatacatatgaggaagattctgagttgttgctccagatacgaaatgatgtgcttgactcactgggtattagtcctgacctgcttcctgaggactttgtcaggtactgcttctccgagatggccccagtgtgtgcggtggttggagggattttggcacaggaaattgtgaaggccctgtctcagcgggaccctcctcacaacaacttcttcttcttcgatggcatgaaggggaatgggattgtggagtgccttggccccaagtgaactcaagatttggcagccccagagatgccaactgcagcatgcccacctgtattccctgtccccttccttcatgaaggcatctccaggcaaggaaaactgaagtcattggcccgatacaaaacatttcctgcaacgaaggaggtggtgccgacgtgctgcttcccatcaccagcagctgctcgacaaggggcgcagggtggctgtctttgttccagcactgttcaggctgcctgtcatcccgggcctgccagctcccctgagtgatgagcacttccaagcacccctctgccctttctctgtccttatgctgtcccggcctcgccagccctctggggcattgtgggagatgcctgccaggaatgagcaagctctgttgctcgggagcctcttgtcaccttcttggacttattccccacctgataccttatagagaaaagtgtgaattcaggtggagagtaggcccaggccccatgaggcaccagtggaagcacagctccaagttcagacaggtgcccttagagaggaaaaccatgacaggcaaatgcatttcctctggagtttgagaccctgacaaacaacaggtggcatctggtgtgctgttcttgagttttcgtttaggattagttgagttccagctgggttttgggagaaaggagatgctaccaagtcttggatgttagggcgagaccctgcaagttgagtattagagagcttgtctttcaaggcaggttcctggggcttcagggctaggagggaggagcctgcccttttaacagaaccccagtcacatgcggctcaagtcactcagaggctgttgcatttcagggctatgttggtcctttgtttacctcctaaaccacagctgtttgtgtttcacatatgttgtgaattttccttggttctttttaaaggaatgataataaagttacttgctttaggatttgcttgtttttcttccacttcagaagcttctgagagggaatgggatgatcctaccagttgccttttcagacctgaggctctaactcaagagattcctcctctccctcaccattcctgccaccattttttctgggtgatgcagcaagagttaaattgttcacattctagaatgtgtagaagcttctggctccagttgtctaatggataattcagctaaatagtggctattttcagtggcaagaattataataataaagggaagtcaaaagtgatgcttcatatgccccaagtgccacagccgctacgggtcagagcttttattggaagaccaggtttgccttgatgcagccaaagtgcgttccagttcaccccactcttgcttgtgtttcttctttatgta

SEQ ID NO: 70839 - DNA, 913 bp, Homo Sapiens
aacatacggctaggtacgaggccgggtggttgaatcggcacgagggcgggtccggcgggcggttggcttgagcgggaccggagctgaggcaggaagagccggcgccatggtggagaaggaggaggctggcggcggcattagcgaggaggaggcggcacagtatgaccggcagatccgcctgtggggactggaggcccagaaacggctgcgggcctctcgggtgcttcttgtcggcttgaaaggacttggggctgaaattgccaagaatctcatcttggcaggagtgaaaggactgaccatgctggatcacgaacaggtaactccagaagatcccggagctcagttcttgattcgtactgggtctgttggccgaaatagggctgaagcctctttggagcgagctcagaatctcaaccccatggtggatgtgaaggtggacactgaggatatagagaagaaaccagagtcatttttcactcaattcgatgctgtgtgtctgacttgctgctccagggatgtcatagttaaagttgaccagatctgtcacaaaaatagcatcaagttctttacaggagatgtttttggctaccatggatacacatttgccaatctaggagagcatgagtttgtagaggagaaaactaaagttgccaaagttagccaaggagtacaaagatgggcccgacaccaagagagcataacttgattcttctgagacaacgatggtcaaaaagaaggtggtcttctgccctgttcgagaagcgctggaggtggactggagcaagtgcagaacagcaaaggctggctctgaaggcgcacgaactccggactactttctccttcaaggtacctgcttctccgagaatggccccaggtgtgcacggatggtggacgggatttgggcaccacgaaa

SEQ ID NO: 70840 - DNA, 725 bp, Homo Sapiens
aggcagtaactctaacggtcttaaggtagcgaggcctgggtggcgaattcggcacgaggacgcggcacagtatgaccggcagatccgccatgtggggactggaggcccagaaacggctgcgggcctctcgggtgcttcttgtcggcttgaaaggacttgtgggctgaaattgccaagaatctcatcttgagcaggagtgaaaggactgaccatgctggatcacagaacaggtaactccagaagatcccggagctcagttcttgattcgtactgggtctgtaggccgaaatagggctgaagcctctttggagcgagctcagaatctcaaccccatggtggatgtgaacggtggacactgaggaatatagagaagaaaccagagatcattatttcagcatcaattctgactgctgtgatgtctgacattgaatgcatccaagggatgtcatagttaaagttgaacagatctgtcacaaaaataggcatcaagttctttacaggagatgtgtgggctaccatggatacaacatttggcaatctaggagagcatgagttagtagaggagacacactaacgtcgccaaagtgaggcaaggcagtagaagatgggcccgacagcaagagagcacaactcgatactactgagacaaacgatggtcaccaacgacggtggtctactgccgctgtgaagaaagccctggaggtggacctggcgcaaggagacac

SEQ ID NO: 70841 - DNA, 1198 bp, Homo Sapiens
gaatccccggcctctgtcacctgagacccaacccctagctgggccaactccagtgaattcacccatttttcttcttcagaaggcctttcctgtgtgagacccacatattttaaccttttgctcctatcccatttttaaagaattagagaataaaccaggcctgtttcttttcccctgaaatccctgcctctggcttcctaaacccatcatctaaggtgacagagcagtgctggaatagcatctcctttcactttcccaaaactgccacagatagctgccactggcatgctctttgattcctggaagcaaacgtgggactgtcggaggaaagggattgttctggtcttactcataactgggtggtttgagggtgactgaagtcgtgcttttcctgtgtgtgctgccagcacaggggctgtaaaatgcagatattgcgcctgtgtgcgtgtgtataagtcaagctccaagaggctcctgaatgtgactggcgtgctgagaatgtgtttacgctgtttaatgtctgccaggtgagggttacactgaagatgcacaatccctaaaataaagatcaccacttccccaaagaagcagccctcgggtccatgtgttgttcagacatgtgaagagaagcaagacagagggtctcagatggacgagggctctccaagggaatgcctggggattcacccagtggtccccagaggtgctccatggaggcaacaagtcattccatgaagccccagaggtagaagggacctcaagcaccacgccctccagggcagccgtgcagacgaccttggttcacttttcaggggtcgtcccaactctgtatctccagccactccaactgtggaggctgtaaatccagattttcactgttccagtctcctttgcagcttaggatggctatgtgatcaggtgtggccaatgaaattgaagaggaagtctacctgggcttctgggaaagcttttccaataaaagacacaggcatggctaacacctccctgggcctcttcttcctaccttgattgagggtgtgatgcctggagccacagcagccactttgctaccatgacaaaaaggccaagagaatcacagagtcattgaccctatcattatttcaccaagccaataccagccgccatccttctccagaattcttgtaaataaaataaatccctctttgtttaaaccatt

SEQ ID NO: 70842 - DNA, 1221 bp, Homo Sapiens
tgacgagacagagtaccatgcagatggggccaaggtgcccatcaagtggatggcgctggagtccattctccgccggcggttcacccaccagagtgatgtgtggagttatggtgtgactgtgtgggagctgatgacttttggggccaaaccttacgatgggatcccagcccgggagatccctgacctgctggaaaagggggagcggctgccccagccccccatctgcaccattgatgtctacatgatcatggtcaaatgttggatgattgactctgaatgtcggccaagattccgggagttggtgtctgaattctcccgcatggccagggacccccagcgctttgtggtcatccagaatgaggacttgggcccagccagtcccttggacagcaccttctaccgctcactgctggaggacgatgacatgggggacctggtggatgctgaggagtatctggtaccccagcagggcttcttctgtccagaccctgccccgggcgctgggggcatggtccaccacaggcaccgcagctcatctaccaggagtggcggtggggacctgacactagggctggagccctctgaagaggaggcccccaggtctccactggcaccctccgaaggggctggctccgatgtatttgatggtgacctgggaatgggggcagccaaggggctgcaaagcctccccacacatgaccccagccctctacagcggtacagtgaggaccccacagtacccctgccctctgagactgatggctacgttgcccccctgacctgcagcccccagcctgaatatgtgaaccagccagatgttcggccccagcccccttcgccccgagagggccctctgcctgctgcccgacctgctggtgccactctggaaaggcccaagactctctccccagggaagaatggggtcgtcaaagacgtttttgcctttgggggtgccgtggagaaccccgagtacttgacaccccagggaagaagctgcccctcagccccaccctcctcctgccttcagcccagccttcgacaacctctattactgggaccaggacccaccagaagcggggggctccacccagcaccttcaaagggacacctacggcagagaacccagagtacctggggtctggacgtgcccagtgttgaacccagaaggcccaagtccgcaaaaacccctgaaggggtcctcagggaaacagggaaagcctt

SEQ ID NO: 70843 - DNA, 114 bp, Homo Sapiens
aaagatgaaataaagacccagggggagaatgggtgttgtatggggaggcaagtgtggggggtccttctccacacccactttgtccatttgcaaatatattttggaaaacaaaaa

SEQ ID NO: 70844 - DNA, 1066 bp, Homo Sapiens
  misc_feature (218)..(218): n is a, c, g, or t
ggtaaccccaggattctggaaagggaaaggggccccaagttggggcctgtggccatcccaactggacccctaggagttctccattggggccaggggccctcaagaatcccaacaaaagacttcccccaggtgcctgtttcctcttcccaaacgagggctggaaccccttcccagcccatctgggaacctcaagcaggaaggaaggttcctttaggacnaggttccctggcatggcaggttccccctggaagtggtcggagggccctcccaccctcttgatgccagcagaagtcaggccttccctgctccctgaggacacatcagggcttctgcggacttggccttctggttcacactggcacgtccagacccaggtactctgggttctctgccgtaggtgtccctttgaaggtgctgggtggagccccccgctctggtgggtcctggtcccagtaatagaggttgtcgaaggctgggctgaaggcaggaggagggtggggctgaggggcagctcctccctggggtgtcaagtactcggggttctccacggcacccccaaaggcaaaaacgtctttgacgaccccattcttccctggggagagagtcttgggcctttccagagtggcaccagcaggtcgggcagcaggcagagggccctctcggggcgaagggggctggggccgaacatctggctggttcacatattcaggctgggggctgcaggtcaggggggcaacgtagccatcagtctcagagggcaggggtactgtggggtcctcactgtaccgctgtagagggctggggtcatgtgtggggaggctttgcagccccttggctgcccccattcccaggtcaccatcaaatacatcggagccagccccttcggagggtgccagtggagacctgggggcctcctcttcagagggctccagccctagtgtcaggtccccaccgccactcctggtagatgagctgcggtgcctgtggtggaccatgcccccagcgcccggggcagggtctggacagaagaagccctgctggggtaccagatactcctcagcatcca

SEQ ID NO: 70845 - DNA, 1290 bp, Homo Sapiens
  misc_feature (61)..(71): n is a, c, g, or t
  misc_feature (154)..(154): n is a, c, g, or t
  misc_feature (163)..(165): n is a, c, g, or t
  misc_feature (249)..(249): n is a, c, g, or t
  misc_feature (263)..(263): n is a, c, g, or t
  misc_feature (289)..(327): n is a, c, g, or t
ggggggttaccgcgtaaaaactttgggcgcccccctcggggggattatttttgagggccgnnnnnnnnnnngaaaaaatatgggacgggcgtgtgatgtatgcgctacttggattgttaaggtgggggtagtaaaacgaggaagaattggtgtncgtaaatannngggttttcccaaaatattatttgcaaaatggaccaaaagtgggttgtggagaaaggacccccccaacaatttgcctccccatancaacacccattctnccccctgggtctttatttcatctttnnnnnnnnnnnnnnnnnnnnnnnnnnnnnnnnnnnnnnngcactctgtacaaagcctggatactgacaccattgctgttccttcctcatggggggcagtactaggtttcagggacagtctctgaatgggtcgcttttgttcttagacactcccttagggccgcttcccctctcaggccagcttccctaaggctttcagtacccaggatctggaaggaaagggccaagctgggctgtggcatccactggaccctagagtctcattgggcagggcctcagaatccacaaagactccccagtgctgttcctcttccaacgaggctggaccccttccagccatctgggaactcaagcaggaaggaaggttccttaggacaggttcctggcatggcaggttcccctggaagtggtcggagggccctcccacctcttgatgccagcagaagtcaggccttccctgctccctgaggacacatcagggcttctgcggacttggccttctggttcacactggcacgtccagacccaggtactctgggttctctgccgtaggtgtccctttgaaggtgctgggtggagccccccgctctggtgggtcctggtcccagtaatagaggttgtcgaaggctgggctgaaggcaggaggagggtggggctgaggggcagctcctccctggggtgtcaagtactcggggttctccacggcacccccaaaggcaaaaacgtctttgacgaccccattcttccctggggagagagtcttgggcctttccagagtggcaccagcaggtcgggcagcaggcagagggccctctcggggcgaagggggctggggccgaacatctggctggttcacatattcaggctgggggctgcaggtcaggggggcaacgtagccatcagtctcagagggcaggggtactgtggggtcctcactgtaccgctgtagagggctggggtcatgtgtggggaggctttgcagccccttggctgcccccattcc

SEQ ID NO: 70846 - DNA, 1915 bp, Homo Sapiens
  misc_feature (1769)..(1769): n is a, c, g, or t
gcaagaatgaaattaaacagggcttggcacagtgaagcacgggaaaggctttctacagagcagtgactgttgttactcgctgttacaccttaggtaatgcgttttcctctctgggtgcctcccattttctggctcaagtccctgcccaggatcaagcttggaggagggccccgagggaggggccacagagactgggtgaagagcaagggtgtttgtcccaggagcatggcgaaaattgctgctgggtggccttgggaagcacaaaggggacccaactaagggcctgatcctactgccctgggggtgtcagtgccagccccccacaaatcttttctgccccccccaggaggctgaccagtgtgtggcctgtgcccactataaggaccctcccttctgcgtggcccgctgccccagcggtgtgaaacctgacctctcctacatgcccatctggaagtttccagatgaggagggcgcatgccagccttgccccatcaactgcacccactcctgtgtggacctggatgacaagggctgccccgccgagcagagagccagccctctgacgtccatcatctctgcggtggttggcattctgctggtcgtggtcttgggggtggtctttgggatcctcatcaagcgacggcagcagaagatccggaagtacacgatgcggagactgctgcaggaaacggagctggtggagccgctgacacctagcggagcgatgcccaaccaggcgcagatgcggatcctgaaagagacggagctgaggaaggtgaaggtgcttggatctggcgcttttggcacagtctacaagggcatctggatccctgatggggagaatgtgaaaattccagtggccatcaaagtgttgagggaaaacacatcccccaaagccaacaaagaaatcttagacgaagcatacgtgatggctggtgtgggctccccatatgtctcccgccttctgggcatctgcctgacatccacggtgcagctggtgacacagcttatgccctatggctgcctcttagaccatgtccgggaaaaccgcggacgcctgggctcccaggacctgctgaactggtgtatgcagattgccaaggggatgagctacctggaggatgtgcggctcgtacacagggacttggccgctcggaacgtgctggtcaagagtcccaaccatgtcaaaattacagacttcgggctggctcggctgctggacattgacgagacagagtaccatgcagatgggggcaaggtgcccatcaagtggatggcgctggagtccattctccgccggcggttcacccaccagagtgatgtgtggagttatggtgtgactgtgtgggagctgatgacttttggggccaaaccttacgatgggatcccagcccgggagatccctgacctgctggaaaagggggagcggctgccccagccccccatctgcaccattgatgtctacatgatcatggtcaaatgttggatgattgactctgaatgtcggccaagattccgggagttggtgtctgaattctcccgcatggccagggacccccagcgctttgtggtcatccagaatgaggacttgggcccagccagtcccttggacagcaccttctaccgctcactgctggaggacgatgacatgggggacctggtggatgctgaggagtatctggtaccccagcagggcttcttctgtccagaccctgccccgggcgcctgggggcatggtccaccacaggcaccgcagctcaccctaccangaagtggcggtgggggaccctgacactaagggctggagccctcctgaaagaggaggccccccaggtcctccactgggaacccccccgaaaggggctgggctccgaatggcatctgcacgcgtgaaccctgggaattgggggccaat

SEQ ID NO: 70847 - DNA, 1245 bp, Homo Sapiens
gaagacgaggctgctgagatggaggatgaggcagtgaggagccgtgtgcagcacaagcccaaggaggacaagctcaggctagcacaggagctctctgacatggtcatttactgcaagagtgtccactttgggggcttctccagtcctggcacccctggacaggccttctacgagatggcgtccttctctgagaaccgtgcccttcgactgctccaagaatcaggaaacggctttgtccgccacaacgtggggcacctgagcagaatctacccggctggatggagaacagactcctccaactacagccccgtggagatgtggaatgggggctgccagatcgtggccctgaatttccagacacctgggccagagatggacgtgtaccagggccgcttccaggacaacggggcctgtgggtacgtgctgaagcccgccttcctgcgagaccccaacggcacctttaacccccgcgccctggctcaggggccctggtgggcacggaagcggctcaacatcagggtcatttcggggcagcagctgccaaaagtcaacaagaataagaattcaattgtggaccccaaagtgacagtggagatccatggcgtgagccgggacgtggccagccgccagactgctgtcatcaccaacaatggattggaaccccacatgggacagggagattatggttgaggtacgtgctgcgtgacctggtgccgtcatcaccactaggtgtcaacccatggtgggacacggagtttgcgtttgaggtagttgtgcctgaccttgccctcatccgcttcttggtggaagattatgatgcctcctccaagaatgacttcattggccagagtaccatccccttgaacagcctcaagcaaggataccgccatgtccacctcatgtctaagaacggggaccagcatccatcagccaccctctttgtgaagatctccctccaggactaggctggaggaagccagtggggtcccccctgagtgggctgggccctctgtccacatgtggggacagggctggtgtggctgctcccagcctcttgctcagagctaggcccccaaattgccttcagccctaacatagtgtctgctgctgcctccctggggaccaggagctagcccagtccctggagctgtccttcattccgttaggaataacactgcagccctctccaccctccggccagcgagtggtcaaggatttttataaaaatcacgataagattaaaaa

SEQ ID NO: 70848 - DNA, 1223 bp, Homo Sapiens
  misc_feature (58)..(58): n is a, c, g, or t
  misc_feature (73)..(73): n is a, c, g, or t
  misc_feature (92)..(92): n is a, c, g, or t
  misc_feature (808)..(820): n is a, c, g, or t
tgtgtcctgtcagagttggatgatgttcccagtgttggccctcgaagtgaatgcagcngggcctccttccccntgaatgtgaagtagacganggagacaggcagaaggggcagagataaaaacaagtgacaaagccaacaacaaccgggccctcagcagtagcagtggcagtggtggcagcagtaagagccaaagcagcacctcccctgagggccaggccttggagaaccggatgaagcagctctccctacagtgctcaaagggaagagatggaattattgctgacataaaaatggtgcagattggctgattcatcctgggccctggccgatgtgcatatcaacatttatacatggaactggagaacattgtgccaataatcatttaatatatgccaaatcttacacgtctactctaaactgctctaatgaagtttcagtgaccttgagggctaaagattgttcttctgggtaagagctcttgggctggtttttcagagcagagttcttgttgtgggtagactgtgactaggttcacagcctttgtggaacattccgtataacggcattgtggaagcaataactagttcctatgaaagaaccagagctgggaagatggctgggaagccaggccaaagtgggggcaacagcttgcttctctttctcttctcaccctcagtttgtatgggaaaatggagatgtcctctccactttatcccacgatatctaaatgaaaaagaaagaaaacccacacacaaagcaaaaactcaagtattaagagcacatatttttgacccagtggaggcttnnnnnnnnnnnnntccaagaacacaattcattttcaccacctctggtgttcagagggggcttttaaaaaagcgtgtatgctgggatacccattaaaaccattttctagaaggctaccatgagctgcacttttgggggtgggaaaggtgaatgccagtggggatgcggggggatgagggtaggagggacttatagaaggggattgtggctgtgggggacaaggttctacagcataaagccttatcctgccagccaaggcggattatcctaagagaagtgcttgttgaccaactggttgccactgttatcagattggccagatgttcaattctctgaaggtggtaactttaacactactgacatattaagggtatgctgcacagtattcctaaaggaaacacgttctttacagtcgga

SEQ ID NO: 70849 - DNA, 818 bp, Homo Sapiens
caggaggcaactgattgtttcgatatgtacatattactcacgtataccccatttccttccagtcagcccaacattttccaccagtctgtccccatctctgaaatccttccttctctttccccctaagtcttttgagtgtcatcatgtactggtggtttctcggttccatctcatccatttccttttcaatggagactacagcgtcagccagctcagccttggcttttaactcaatattccagtccataggggtggttaaaagttgctgcaaggctgcaggcactggcagtgggaagaggcagacgactagatgacttctgcacttttagctggttgaaaagtaccactcccactctgaacatctggccgtccctgcaaagagtgtactgtgcttgaagcagagcactcacacataaatggctgtgtgtggaattgcttgccaaagaagtttctagcctttccctttcccctaactgcatcagggaagaattcttatctctagcttggtttccacatgaggtttttctgagaagggcttgggacaagaagtctgtcatgttagttaagcaggcaagaaatcctactaatccagttttgtttgaaagttgtttgtccgtatgattttttaaaagtcaagtttaatttcaaaaaaccttttttttctgagattacttttggggtaatatttaaaatgagagacattttgtaaccctgtaaaatacatagggaatataacattccagtgtatacaaagaaggcaaattctttaatcaaataaagcgcaaaaaacccaaacaaaacctaacccactatcatgt

SEQ ID NO: 70850 - DNA, 653 bp, Homo Sapiens
  misc_feature (547)..(567): n is a, c, g, or t
caggacccaggaccctcagcaatgagtctgagtgttcaaagcccactttagaacctaaagcattttgggttaataaagcaaaattttgcttatgttatttggtggtgtcaccgcagcttataccaagacaccatggctcagacatgggatcaggacacacctttgagatcccactgttagcaagaaaaggctgtccaaggcaggcagtgtggtagttgtctgattttgtttaccacacgccaggtcccagggaagtcttgcacagactcttagcagacaagcagggaaaagagagggtcctggtgggtggaaggattgggaaggggattctgggcctggaagcctgctccttcccctctcagcagtctcaggactactgttggattgcaaacagcatctctgacccagtcttcggactcattctgtaaatggaggagctgaggtcagaggggggctgtgaactactcaagaccacatgcttgcagtcctacaggcttcccgacccacaggccagctacggattttgcacttttgctccaggccactnnnnnnnnnnnnnnnnnnnnnaccactgccatctgaacaaactatgcaataccacctgctcccttccaggagcattttaataaaagattttttttaataacaaaaaa

SEQ ID NO: 70851 - DNA, 2645 bp, Homo Sapiens
  misc_feature (1647)..(1660): n is a, c, g, or t
  misc_feature (1737)..(1737): n is a, c, g, or t
  misc_feature (1954)..(1954): n is a, c, g, or t
  misc_feature (2001)..(2001): n is a, c, g, or t
  misc_feature (2030)..(2030): n is a, c, g, or t
  misc_feature (2170)..(2170): n is a, c, g, or t
  misc_feature (2195)..(2196): n is a, c, g, or t
  misc_feature (2257)..(2257): n is a, c, g, or t
  misc_feature (2261)..(2261): n is a, c, g, or t
  misc_feature (2263)..(2263): n is a, c, g, or t
  misc_feature (2315)..(2315): n is a, c, g, or t
  misc_feature (2623)..(2623): n is a, c, g, or t
gcagaactcagagctgctcttcctctgtggccagttggggaccagcatcatgaagtggatggtggtggtcttggtctgcctccagctcttggaggcagcagtggtcaaagtgcccctgaagaaatttaagtctatccgtgagaccatgaaggagaagggcttgctgggggagttcctgaggacccacaagtatgatcctgcttggaagtaccgctttggtgacctcagcgtgacctacgagcccatggcctacatggatgctgcctactttggtgagatcagcatcgggactccaccccagaacttcctggtcctttttgacaccggctcctccaacttgtgggtgccctctgtctactgccagagccaggcctgcaccagtcactcccgcttcaaccccagcgagtcgtccacctactccaccaatgggcagaccttctccctgcagtatggcagtggcagcctcaccggcttctttggctatgacaccctgactgtccagagcatccaggtccccaaccaggagttcggcttgagtgagaatgagcctggtaccaacttcgtctatgcgcagtttgatggcatcatgggcctggcctaccctgctctgtccgtggatgaggccaccacagctatgcagggcatggtgcaggagggcgccctcaccagccccgtcttcagcgtctacctcagcaaccagcagggctccagcgggggagcggttgtctttgggggtgtggatagcagcctgtacacggggcagatctactgggcgcctgtcacccaggaactctactggcagattggcattgaagagttcctcatcggcggccaggcctccggctggtgttctgagggttgccaggccatcgtggacacaggcacctctctgctcactgtgccccagcagtacatgagtgctcttctgcaggccacaggggcccaggaggatgagtatggacagtttctcgtgaactgtaacagcattcagaatctgcccagcttgaccttcatcatcaatggtgtggagttccctctgccaccttcctcctatatcctcagtaacaacggctactgcaccgtgggagtcgagcccacctacctgtcctcccagaacggccagcccctgtggatcctcggggatgtcttcctcaggtcctactattccgtctacgacttgggcaacaacagagtaggctttgccactgccgcctagacttgctgcctcgacacgtgggctcccctcttcctcttgaccctgcaccctcctagggcattgtatctgtctttccactctggattcagccttctttttctggactctggactttctctaataataaatagttcttctttaaaaaaccaggacccaggataacatccctcacgcagatcataaaattggccttcacaacgaggtactatagagtccttctcaacaagcgagggggcggtcttaacaaaacatcccggaagtgttttatacacatccaatagccttatttttttcgggcaagagggcccctcacagggtgcgcgcgaacaacctacccacataagcgggccaatctagtttcataaagggtttagtagtggagaaaaacagcctcttcatttgatagatacctgtggcggagcggacacccnnnnnnnnnnnnnnctccggtgtgcaagccaaccatatatttgcgcaactaaaacaataatccaccgacgaggaaaattattatctacggnctcgctaccacggggggcacagactcacagaacaatgctctttctcatatccacagtcgataataagtgaagcagcaagtatgctagacatgactctcctcgcctctataccaaccataacaatacatgtgttagccacggagttcgtctctgtgagccccagtccttagttgttttatgtctttccaccctccatactcatccctcctctacaccncccgccccctattttgtatcgcccgccccgctatctcgcccaaaacntagcctccttccccccttcttctttacanttcttctaaaaaaacaaaacccaatttcagcggatgacgcgccaaatttcctaaattatcccgcaaaccgttcaatattgagggttcatcagccgcagttccccgggactactattatagtcgtctgataacccgccgtnccacaccatatggccactcatttcnnagcccagttgacccccccctcaccatcaaacgcctatctacgccgaagagagaccgacccncatncncggggccctttaggcccctccgctatttctccccggcgtactacggcatttnaacgcctctttaaagggaggttaaacgcgactaccggcatttccataccggctcgttttcggttttcccactttttttcttctacattgccccgtataacccttcgaaccccaatttctaattacccctcgctccgtttcttctttctaaccacgcagcacccaccccccgtaaagcggagacgagtatatggccgatctcaaaggagtaacccgatgcacgcctttgcctgcctctcgtgtatagcgcctcgtgttaaccgcggcgggagaatggatctcgaacgcatgatgccggcgcgttggganagccctgttgagagagtaaaag

SEQ ID NO: 70852 - DNA, 1215 bp, Homo Sapiens
ggtaccggtccggaattcccgggatatcgtcgacccacgcgtccggttatttaaagaatgaattgggacggatgtcttagacttcactttcctaggctttttagcaaaacctaaagggtggtatccatattttgcgtgaattatgggtgtaagaccttgcccacttaggttttctatctctgtccttgatcttctttgccaaaatgtgagtatacagaaattttctgtatatttcaacttaagacatttttagcatctgtatagtttgtattcaatttgagaccttttctatgggaagctcagtaatttttattaaaagattgccattgctattcatgtaaaacatggaaaaaaattgtgtagtgaagccaacagtggacttaggatgggattgaatgttcagtatagtgatctcacttaggagaatttgcaggagaaagtgatagtttattgttttttcctcgcccatattcagttttgttctacttcctccccttccttccagatgataacatcacatctctacagtaagtgcctctgccagcccaacccaggagcgcaagttgtctttgccatctggtctatagtacagtgcgcggcgttaggccacaactcaaaagcattatcttttttagggttagtagaaattgttttatgttgatgggaggtttgtttgattgtcaaaatgtacagccacagccttttaatttgggagcccctgttgtcattcaaatgtgtacctctacagttgtaaaaagtattagattctactatctgtgggttgtgcttgccagacaggtcttaaattgtatattttttggaaaagtttatatactctcttaggaatcattgtgaaaagatcaagaaatcaggatggccatttatttaatatccattcatttcatgttagtgggactattaacttgtcaccaagcaggactctatttcaaacaaaatttaaaactgtttgtggcctatatgtgtttaatcctggttaaagataaagcttcataatgctgtttttattcaacacattaaccagctgtaaaacacagacctttatcaagagtaggcaaagattttcaggattcatatacagatagactataaagtcatgtaatttgaaaagcagtgtttcattatgaaagagctctcaagttgcttgtaaagctaatctaattaaaaagatgtataaatgttgttgaaacataaaaa

SEQ ID NO: 70853 - DNA, 1080 bp, Homo Sapiens
  misc_feature (63)..(63): n is a, c, g, or t
  misc_feature (70)..(70): n is a, c, g, or t
  misc_feature (74)..(74): n is a, c, g, or t
  misc_feature (95)..(95): n is a, c, g, or t
  misc_feature (148)..(148): n is a, c, g, or t
  misc_feature (170)..(170): n is a, c, g, or t
  misc_feature (194)..(194): n is a, c, g, or t
  misc_feature (219)..(219): n is a, c, g, or t
  misc_feature (234)..(234): n is a, c, g, or t
  misc_feature (293)..(293): n is a, c, g, or t
  misc_feature (1080)..(1080): n is a, c, g, or t
tcagatatcagttcaagtgtaatcatcagagctgttagtcaggcatcccagatagtgttcttntcagacncttntaaaaaggttggtaaataccntcagtagcagaggattgaactataccctgtctgtactgtacatagaaaatctntgtagataaaagcaaggcttgntaaatatgatatgagggtaagatnttaatataccaaaatgtaacattcntagttgcctttagtntcagaggcttgtaagactccctcatgaccatcataacaggccttgcttttgtcgtattntgtggctgaaaaagcagccttgcttcttcagatattgtagtattttggatgtataatagtttagcaagatgttacttttgtaagacatcagatgttcaaaaaagtgcatccgaacttgtactaaatactgcagtgtccctttataaaaagtcagactaaaactgacaattgtacagcgaagcctgacatttggatattttgaagttttttcataaatcatagaaattagtatatggctgtagtttagctttttaggtaaaaggtatgtttcattagtgcatttcttcctgctgatcactgtaaacatgtgaatcagctttccatttcttatgcaggtcatgataacttgtagagtagagtacaatcatttgtgctatgtttttaattttctaaagcaccttgatgacagtgagtgtccagtggtgaagcatcctctattgaaccaccctcaaaaatttttttgccaagtcctaagttgatagcttaaagtaaaaagtgaaaattatagtttcattaggacttggtgtaaagaaatcccctccccccttccccaaagggatactgcagttatatcacatacccaataggcaccacgatgaagatcagagcttatacttaattaaggttttatacacaccagttccccagtaaatgcaaatttaacaagaaaatcagacatgtcatatgttcaaaatgctcatggcaaacaatcattttgcattcctgcaaataaaattgttttatactgtaagctggaggcgagtgtaacttatttccgtaataaagn

SEQ ID NO: 70854 - DNA, 1312 bp, Homo Sapiens
gggctccagtttcagccacgtaggaccgggtagaacacagaaattctagtttcctctcgcgatgaaaggcttcctagcacaaacaccacccctggagttcccggtacatcaataccagcctggggatcacgttctcatcaagagttggaagagggaaagcttgaaccagcttaggaggacctcatctggtactcttgatgaatgaaacagcaatctgaatggctgaaaaaggatggacccagcactccagggagaaaacttggcattctttgggaatctaacaggatgcagtgaacccaagccttttgaagagctcaccaatcagactgcccttgtctatccatgagcagatgtttgatagtattgcggaggccctctagtgggtatgctgccaagcaactggagtggcacttgggctctaatccagttgtctatccctttcaccctggcatttcatcagccaaacaaaaaccaactaactcagaaaaaaaggaaagcccctcaagggtcctttgaccccgatatctacatagatgctatcggggtcccctgaggggtaccaaacgaattcaaagctcgaaatcaaatagctgctggattcaagtctgtccttttcttgtggtctactataaataaaaatgtagactggataaattacatatactataaccaacaacgatttgtcagttacaccagggatgccattaaaggaatagctgaacaattgggtttcaccagccaaatggcctggggaaaatagaatagctcttgacatgatattagtggaagtccaatgttgtacctgtatccccaataatacagcccctgatgtaactatcactaagggtctataaggcctcaccaatctaggaaatgaactagctgaaaaatcgggaatgaatgatccctttacaggtgtaatggaaaaaatggtttggtagatggaaaggactaatggcctctattctcacctcccttgtgatcataataggggtgctcattctcttagggtgctgtattataccctgtgtctgcggactagttcaaaagctcatagaaacagcccttaccaagacctcccacaactctcccccaccctattcagataaacgtttatttctaagcaaccaagaagagcagtgaagccagatcctgttagaaatatatgaagaggaaggactacaaaatcaaaaggggaaaattattagacaaaatgagttgctctacaaaggtccaacttcgttgtcctttgttctgtaacctttgttctgtaaactgcccttcccgcagaaactgtctttcccgccgacca

SEQ ID NO: 70855 - DNA, 1245 bp, Homo Sapiens
  misc_feature (100)..(216): n is a, c, g, or t
gctaacagactcttagtacctcagttccggagacccatccacctgtgcgccccatgaagacccggccgatcagcttcggcatctaccctaggcccgggannnnnnnnnnnnnnnnnnnnnnnnnnnnnnnnnnnnnnnnnnnnnnnnnnnnnnnnnnnnnnnnnnnnnnnnnnnnnnnnnnnnnnnnnnnnnnnnnnnnnnnnnnnnnnnnnnnnnccacgcgtcccgaacggctgccacattgtatctaactggatcctaatctttaatttacaaggaaggaacaatagctaggtaagatttttatcagctttctctgtctgaatccagtttttcctctgtcagtcctggaagcttgaatagaattatattgttgaagccttcaggtcacaaactgtcttttgtaacctcctgtccctcctaaaacacgccaacccctgcagtcaaatcacattagtaatctgatttgctgacagtcctgccctgcctgctcctcgttttcccacatgtcctgcatccctcccccactggagtgatttcagtgaatcagacaaggaaggatgtgtaggatcactactgcattgcaataccctgttatcctcagcaacaaaacccacatttcatacatcctttgtgtactcaggataaagactgatgtttactctctgggcactgttgtaagataggttttgtcagagcataatcattgtctgcaaagtgtttggtgcgaggaagattattgctaattttgtgaaataaagagtctagccctctccttttaatgaacttaactctcgctggcatctgtagtatcattgggagcttaggcgcacatggaaatgagagcccggcgcatggattttaatgtttttctaacaactgtggagatttgagggaatgtgtggtgaatgtaaaatacctagtttacttgccagtctcttgtgtaaattacagtaaaacaaagtaaatgaaatttaaacaaaaaataaatttgatcacaaaatgccacttgtgtgcttgagtggttgtttccctgagccatgtctggtttgaaacacctcagaccactactctgtttttcatgaattctgtaattcgcagcactaccagtctgggaaaattattttgttttaattgcaaattcttattcttgaaatgtacctgtgccacactaagtggttacgtttgatttcttaagtaattttctgtctttaaaagctaagcagtaaactaaaggattataaa

SEQ ID NO: 70856 - DNA, 1332 bp, Homo Sapiens
  misc_feature (457)..(465): n is a, c, g, or t
  misc_feature (657)..(716): n is a, c, g, or t
  misc_feature (1203)..(1231): n is a, c, g, or t
  misc_feature (1290)..(1290): n is a, c, g, or t
ccactctagtcagtgatgagtgaagaagaatctgaccagtatcttgcagtgttgacgtttcccagatgtgtgcttgtgatgatacacacacatgcacaggttctcaaccacgtgtgtatatatgtatgtgtgcatatgtctgtagctgtatataaagcgcatgtagagctacagatccagatacacacacttgtgtatatatgtacatacagacatactgaagggattagtacaatttctccaaagtactgtacctatcttcagcaagaatgcaaaagaaaatattttcaatatatatacctggaacagattttaataattatcagagtaataccattaatggacaaattgactgcaatgtaatactagctggtatgtttcataaatgtcaagctgtggaccaacatatatagccttttattatttttctcttcttttaagtcagtctgttataaannnnnnnnnagtcccataagcagtagactcccacagaaaatttcttcaaaattttttggtgttccaatgaatctgggatgtaaactctgaatgtatttataactatttatttctggatggtcattatcttgtagccaaatttgacaatataaagtaaggagcaaagttacaggccagtttttacttgtttgccctgagggnnnnnnnnnnnnnnnnnnnnnnnnnnnnnnnnnnnnnnnnnnnnnnnnnnnnnnnnnnnntatttttctacatcaaacctagcaaaaatggagatgacggtttctgatttataataaatactagacagttttcaggctcctgttagacaaacacattgatgaagaaattagtcttaataggattgtaggctgtgtagaaaagttggaaatatagcacttcatggagtcttgttttgaagatgacagttttctgtaactacagcttggaaactatgcaaatggtctatttcctcagagctcacatgataggatatagttagcgatgacattttgctcttcttgtgggaacacacacttcaaggaggagatagtgactttgagataagaacagtttaagatgcagtgtgagtctggcctgcgtgcggtgaggaggccccgccaagagactggtggacatctgactgtgggatgtgctctcaagtaggacgtcatcaggacagattctgaataggcatcatgagagtgctggtcagaaacggctgccacnnnnnnnnnnnnnnnnnnnnnnnnnnnnnaaaggaaggaacaatagctaggtaagatttttatcaggctttctctgtctgaatccagntttttcctctgtccagtcctggaaagcttgaataagaattat

SEQ ID NO: 70857 - DNA, 1344 bp, Homo Sapiens
  misc_feature (33)..(33): n is a, c, g, or t
  misc_feature (117)..(117): n is a, c, g, or t
  misc_feature (144)..(144): n is a, c, g, or t
  misc_feature (243)..(243): n is a, c, g, or t
  misc_feature (251)..(251): n is a, c, g, or t
  misc_feature (300)..(300): n is a, c, g, or t
  misc_feature (689)..(689): n is a, c, g, or t
  misc_feature (1099)..(1166): n is a, c, g, or t
ttgcgtcatccgggacttgcttcgataaggtcntagatgctggccagatgcgagttgcccggtccaatatagtgcttctcaagatgcatttatatccatcattctaacgggagtgtntgataccagagacagtatgcattgacntaggattgagttcaagcatacatcattacatagtagggttatggttagtcccaccaccttatgttttaggaaatacatcttgtagatcccaggagtgcntatatcangagaaagtgaggagtttgaagatcagacgagtattgatcccgcagcctntggaaggattcactttcaacttaaaaatcagagacattgatgcagcaactgaagcaaagcacaggcttgaagaaagacaaagagcagaagcccgagaaaggaaggagaaggaaattcagtgggagacaagggtaagcttgcctgccccaccctcctaagtgctgttcctcctaatttatttcagtgaatgttgaagaagtgatgtgccaaacactgtttataaacaagatgatcgctggtccctacttgaaactcatttcagtctaatggcggggtggggagcagatatgaaatagtaagtatattacagaagtacaaagcaaatatgtaactaaattcttcctctttgtcttacagttatttcatgaagatggagaatgctgggttantgatgaaccattactgaaacgtcttggtgctgccaagcattaggttggaagatgcaaagtttatacctgatgatcagggcagtaggcataattcagcaacaaacaatcttcctttgggagaaacctgttcattccaatcttctaattacagtggttcctatctcagggatactggactttctgacgcagatgaacaattaaggggaaaagcttcccttttccctctgtggcagttacgattttgacttcagtcctgagaaaaacttcaggttttgaaaatcagatgatgtcttctccttttccaaacaccacacgttgaaagcatttataaatccaagtctgaaactctgcgctctagtactgctgttaagatacacaacttgtttcttagttcatataatctcgggatnnnnnnnnnnnnnnnnnnnnnnnnnnnnnnnnnnnnnnnnnnnnnnnnnnnnnnnnnnnnnnnnnnnnctgatgccagatttttttcataaatattctgcctactgtaaatatgggttcctctgagttgttttagaaaattagcgcaatgtattaaaatcaagtgttaggaaatttcatggtcttacctacaataacttttattttggaattgaactattattaaattgtatctaatcctggaaaa

SEQ ID NO: 70858 - DNA, 919 bp, Homo Sapiens
aaactttctgagcatccggcaaggtacaggttttgatgttcaagttttattgggataagatcttttgatcccaaggtcaggtggatggaatttttggatttatatttgttccttgagtcttcagggcagtgtctccatgagggttttcctgttgaggggcaccacatacaatagtgtgaagtaggtatgaggggcagtcattgtattctatagtttttttatgtagtctacatttctcagatgtatccccattcggttttattctcagaactgttactagactcatgacttggaggccaaaccttaaatccagagatagcagcctcgatagggaccttaaaaggattcacaaaaacttttgccacacttggtgcctaggccctgttcctaataaccccttctagggccgtttatccaacatttagatgccttcttttccctccctaatttgtagccagtccaacctttcattccttggaggatttagttttgggataaaattttggtccttgggcacagagacattcactattaatgaagtaacccttgggcatgactccaatcccagaattgctcactgagcgctatgccaccgaagcgttgacctgaacatattagtgcaatccagtccagattggacctttgatcctatgtggaagggctgttttttaagaaaaaatttttggtaaacagtattgtgtaaaattgctttttgtataccaatatatgcatgttttgtgcatgagtagtacttgtgttgatactcctgttgatgttaaattactatataatataaacagtatgtgtttttatatatcattgtgtaaatttaatataacatatgcagtaataaaccatttgttttactgctgttaagtttgttatttgggtataaaaccagatgtttacacctgtaaaa

SEQ ID NO: 70859 - DNA, 1289 bp, Homo Sapiens
  misc_feature (1139)..(1153): n is a, c, g, or t
ggctaggtacgaggcctggcgtttaaatcggcacgaggctccttacgggaaacccagccccgtcaccgggctccgagcggctcgcaggcgagcgacagcggcctcagccccggcagcgcccagcggcggctgcggaaagcggagggagtccgacgcgggcgcgggcggggagcgtgcgtccgttcgcacaggcagcgggaggaggggcggcgcgaaccatggccggggacagcgagcagaccctgcagaaccaccagcagcccaacggcggcgagcccttccttataggcgtcagcgggggaacagctagcggcaagtcttccgtgtgtgctaagatcgtgcagctcctggggcagaatgaggtggactatcgccagaagcaggtggtcatcctgagccaggatagcttctaccgtgtccttacctcggagcagaaggccaaagccctgaagggccagttcaactttgaccacccggatgcctttgacaatgaactcattctcaaaacactcaaagaaatcactgaagggaaaacagtccagatccccgtgtatgactttgtctcccattcccggaaggaggagacagttactgtctatcccgcagacgtggtgctctttgaagggatcctggccttctactcccaggaggtacgagacctgttccagatgaagctttttgtggatacagatgcggacacccggctctcacgcagagtattaagggacatcagcgagagaggcagggatcttgagcagattttatctcagtacattacgttcgtcaagcctgcctttgaggaattctgcttgccaacaaagaagtatgctgatgtgatcatccctagaggtgcagataatctggtggccatcaacctcatcgtgcagcacatccaggacatcctgaatggagggccctccaaacggcagaccaatggctgtctcaacggctacaccccttcacgcaagaggcaggcatcggagtccagcagcaggccgcattgacccgtctccatcggaccccagcccctatctccaagagacagaggaggggtcaggaggcactgctcatctgtacatactgtttcctatgacattactgtatttaagaaaacaccatggagatgaaatgcctttgannnnnnnnnnnnnnnggtactttggaacgacaaaatgaaacagaacttgaccctgagcttaaataacaaaactgtgccaactactactggtgatgcctaattatgaatccaacgtgtaaccagttataaatacatatatatataaaaaagg

SEQ ID NO: 70860 - DNA, 1313 bp, Homo Sapiens
  misc_feature (956)..(1214): n is a, c, g, or t
  misc_feature (1227)..(1248): n is a, c, g, or t
cagtcgacggtaccggacatatgcccgggaattcggccattacggccggggacttccggtcggcgtgagcgtgaggtgtgggtgttcgtttctcaggtaaaacatggctaaaagcttacggagtaagtggaaaagaaagatgcgtgctgaaaagagaaaaaagaatgccccaaaggaggccagcaggcttaaaagtattctcaaactagacggtgatgttttaatgaaagatgttcaagagatagcaactgtggtggtacccaatacccaaacattgccaagagaaaatgcaatgtgaggtaaaagatgaaacaacgatgacatgaaaatggagactgatattaagagaaacaaaaagactcttctagaccaggcatgggacagtacccaataatggatgaacgcaataggcaacagaaaaaggctgaaggcaaaggcgagagaaaaagaacaggggaatatagcataagcaaaagtcagtgaaagtggcaaagggtttggcctgggtagactcttaaataccttggaaaaatgccacgatggagagtagagtgcacaggagttgatgaatgtatagcacatgtatacctttgcatttgcaacttgacaccaaaatgagaagaccatttggttgtccctcattttaacttggcccttttattcttcaattcaaacccagcataactcctcaagttggttattgggaacttgaataaaatattttctttgatacatccaagctctactgatactttaactggatgctacccaatatccagttataatcaggcctcaacgttctgtcaggtattaatatggttagaattgttcttacaactggtaattatagtcaatagagataaaacagatgatgtactgacaaatttttgtgaacttagattttaaagaaagttgttgtataatcatatcatttaaaaatactacattagggctgnnnnnnnnnnnnnnnnnnnnnnnnnnnnnnnnnnnnnnnnnnnnnnnnnnnnnnnnnnnnnnnnnnnnnnnnnnnnnnnnnnnnnnnnnnnnnnnnnnnnnnnnnnnnnnnnnnnnnnnnnnnnnnnnnnnnnnnnnnnnnnnnnnnnnnnnnnnnnnnnnnnnnnnnnnnnnnnnnnnnnnnnnnnnnnnnnnnnnnnnnnnnnnnnnnnnnnnnnnnnnnnnnnnnnnnnnnnnnnnnnnnnnnnnnnnnnnnnnnnggactctgtctcnnnnnnnnnnnnnnnnnnnnnntaatggatcttataaagtacttgtgtggagctttgattccacagaataaaagatattttgtgtgt

SEQ ID NO: 70861 - DNA, 1530 bp, Homo Sapiens
  misc_feature (1193)..(1225): n is a, c, g, or t
taacttacggctaggtgcgaggcctgggtgttgaattcggcacgaggggaggcagtggcgttggtgggaagcgcagctcgaaaagcgatgccgattctggtttcctggggctgcggcccacttcggtggacccagcgctgaggcggcggcggcgaggcccaagaaataagaagcggggctggcggcggcttgctcaggagccgctggggctggaggttgaccagttcctggaagacgtgcggctacaggagcgcacgagcggtggcttgttgtcagaggccccaaatgaaaaactcttcttcgtggacactggctccaaggaaaaagggctgacaaagaagagaaccaaagtccagaagaagtcactgcttctcaagaaaccccttcgggttgacctcatcctcgagaacacatccaaagtccctgcccccaaagacgtcctcgcccaccaggtccccaacgccaagaagctcaggcggaaggagcagctatgggagaagctggccaagcagggcgagctgccccgggaggtgcgcagggcccaggcccggctcctcaacccttctgcaacaagggccaagcccgggccccaggacaccgtagagcggcccttctacgacctctgggcctcagacaaccccctggacaggccgttggttggccaggatgagtttttcctggagcagaccaagaagaaaggagtgaagcggccagcacgcctgcacaccaagccgtcccaggcacccgccgtggaggtggcgcctgccggagcttcctacaatccatcctttgaagaccaccagaccctgctctcagcggcccacgaggtggagttgcagcggcagaaggaggcggagaagctggagcggcagctggccctgcccgccacggagcaggccgccacccaggagtccacattccaggagctgtgcgaggggctgctggaggagtcggatggtgagggggagccaggccagggcgaggggccggaggctggggatgccgaggtctgtcccacgcccgcccgcctggccaccacagagaagaagacggagcagcagcggcggcgggagaaggctgtgcacaggctgcgggtacagcaggccgcgttgcgggccgcccggctccggcaccaggagctgttccggctgcgcgggatcaaggcccaggtggccctgaggctggtggagctnnnnnnnnnnnnnnnnnnnnnnnnnnnnnnnnnggaggctgaggctgacaagccccgaaggctgggacggctcaagtaccaggcacctgacatcgacgtgcagctgagctcggagctgacagactcgctcaggaccctgaagcccgagggcaacatccttcgagaccggttcaagagcttccagaggaggaatatgatcgagcctcgagagagagccaagttcaaacgcaagtacaaggtgaagctggtggagaagcgggcgttccgtgagatccagttgtagctgccatcagatgccggagactcgcccttcaataaaaaatctcttctagctgatc

SEQ ID NO: 70862 - DNA, 446 bp, Homo Sapiens
  misc_feature (99)..(145): n is a, c, g, or t
gcacaggctgcgggtacagcaggccgcgttgcgggccgcccggctccggcaccaggagctgttccggctgcgcgggatcaaggcccaggtggccctgannnnnnnnnnnnnnnnnnnnnnnnnnnnnnnnnnnnnnnnnnnnnnngaggctgaggctgacaagccccgaaggctgggacggctcaagtaccaggcacctgacatcgacgtgcagctgagctcggagctgacagactcgctcaggaccctgaagcccgagggcaacatccttcgagaccggttcaagagcttccagaggaggaatatgatcgagcctcgagagagagccaagttcaaacgcaagtacaaggtgaagctggtggaaaagcgggcgttccgtgagatccagttgtagctgccatcagatgccggagactcgcccttcaataaaaaatctcttctagctg

SEQ ID NO: 70863 - DNA, 491 bp, Homo Sapiens
  misc_feature (138)..(183): n is a, c, g, or t
gaagaagacggagcagcagcggcggcgggagaaggctgtgcacaggctgcgggtacagcaggccgcgttgcgggccgcccggctccggcaccaggagctgttccggctgcgcgggatcaaggcccaggtggccctgannnnnnnnnnnnnnnnnnnnnnnnnnnnnnnnnnnnnnnnnnnnnnggaggctgaggctgacaagccccgaaggctggggcggctcaagtaccaggcacctgacatcgacgtgcagctgagctcggagctgacagactcgctcaggaccctgaagcccgagggcaacatccttcgagaccggttcaagagcttccagaggaggaatatgatcgagcctcgagagagagccaagttcaaacgcaagtacaaggtgaagctggtggagaagcgggcgttccgtgagatccagttgtagctgccatcagatgccggagactcgcccttcaataaaaaatctcttctagctgaaaaaa

SEQ ID NO: 70864 - DNA, 420 bp, Homo Sapiens
  misc_feature (70)..(125): n is a, c, g, or t
gggccgcccggctccggcaccaggagctgttccggctgcgcgggacaaggcccaggtggccctgaggctnnnnnnnnnnnnnnnnnnnnnnnnnnnnnnnnnnnnnnnnnnnnnnnnnnnnnnnnacaagccccgaaggctgggacggctcaagtaccaggcacctgacatcgacgtgcagctgagctcggagctgacagactcgctcaggaccctgaagcccgagggcaacatccttcgagaccggttcaagagcttccagaggaggaatatgatcgagcctcgagagagagccaagttcaaacgcaagtacaaggtgaagctggtggagaagcgggcgttccgtgagatccagttgtagctgccatcagatgccggagactcgcccttcaataaaaaaatctcttctagctgaaaaaa

SEQ ID NO: 70865 - DNA, 570 bp, Homo Sapiens
  misc_feature (64)..(64): n is a, c, g, or t
  misc_feature (69)..(69): n is a, c, g, or t
  misc_feature (80)..(91): n is a, c, g, or t
ttaagacgtatcgtagggataacagcccagcctaggccctatgctgggatccgtagttgtcccncgcgncgcgcaccccnnnnnnnnnnnncgggaacaccaacggcggcgggagaaggctgtcacaggctgcgggttcagcaggccgcgttacgggccgcccggctccggcaccagaaactgttccggctgcgcgggatcaaggcccagcgtggccctgaggctgacggagctggcgcggcggcagaggcggcggcaggcgcggcgggaggctaaggctgacaagccccgaaggctggggcggctcaagtaccaggcacctgacatcgacgtgcagctgagctcggagctgacagactcgctcaggaccctgaagcccgagggcaacatccttcgagaccggttcaagagcttccagaggaggaatatgatcgagcctcgagagagagccaagttcaaacgcaagtacaaggtgaagctggtggagaagcgggcgttccgtaagatccagttgtagctgccatcagatgccggagactcgcccttcaataaaaaaatcttttctagctg

SEQ ID NO: 70866 - DNA, 468 bp, Homo Sapiens
  misc_feature (117)..(177): n is a, c, g, or t
gcggcgggagaaggctgtgcacaggctgcgggtacagcaggccgcgttgcgggccgcccggctccggcaccaggagctgttccggctgcgcgggatcaaggcccaggtggccctgannnnnnnnnnnnnnnnnnnnnnnnnnnnnnnnnnnnnnnnnnnnnnnnnnnnnnnnnnnnncaagccccgaaggctgggacggctcaagtaccaggcacctgacatcgacgtgcagctgagctcggagctgacagactcgctcaggaccctgaagcccgagggcaacatccttcgagaccggttcaaaagcttccaaaggaggaatatgatcgagcctcgaaaaagagccaagttcaaacgcaagtacaaggtgaagctggtggagaagcgggcgttccgtgagatccagttgtagctgccatcagatgccggagactcgcccttcaataaaaaaatctcttctagctgaaa

SEQ ID NO: 70867 - DNA, 423 bp, Homo Sapiens
cccacttcccgtgactcctctaagcccagcttagagatggccataggttggtggctgtcatcccaacactgagccccagcagctgagggccaggctgagtccctggtgcccacaggctgccctggggggagactgcatggggctgagccctgccaggaccccgaggagaggtccaggcccttgggcttctgccaggccctgctgaggcctccctctctgtcctgtagcccgagggcaacatccttcgagaccggttcaagagcttccagaggaggaatatgatcgagcctcgagagagagccaagttcaaacgcaagtacaaggtgaagctggtggagaagcgggcgttccgtgagatccagttgtagctgccatcagatgccggagactcgcccttcaataaaaaatctcttctagctgaaa

SEQ ID NO: 70868 - DNA, 1079 bp, Homo Sapiens
cagtcgacggtaccggacatatgcccgggaattcggccattacggccggggctttgacaagatggcggcaggaggcagtggcgttggtgggaagcacagctcgaaaagcgataacgattctggtttcctggggctgcggcccacttcggcggacccagcgctgaggcggcggcggcggcgaggcccaagaaataagaagcgggactggcggaggcttgcgcaggagccgctggggctggaggttgaccagttcctggaagacgtgcggctacaggagcgcacgagcggtggcttgttgacagaggccccaaatgaaaaactcttcttcgtggacaccggctccaaggaaaaagggctgacaaagaagagaaccaaagtccagaagaagtcactgcttctcaagaaaccccttcgggttgacctcatcctcgagaacacatccaaagtccctgcccccaaagacgtcctcgcccaccaggtccccaacgccaagaagctcaggcggaaggagcagctatgggagaagctggccaagcagggcgagctgccccgggaggtgcgcagggcccaggcccggctcctcaacccttctgcaacaagggccaagcccgggccccaggacaccgtagagcggcccttctacgacctctgggcctcagacagtgagtgatcctgctgtcacctatgaacggggacaggacggccatgtgcagtttgtgtgtgttgtgcactgcacgagagtacagtgtgaaagggagtgctttgtgggtgctttggtgacctcccagcagagtcgtgcgtcctgaaggggcggccgtttcccactcgtgcttttcctttcctgagttgtgaggcttcaggaaaggaagccttcagctttggtctcttccactttctgaacccgtccagacacagttttgtcctggtgatcaaggcccttggggtctagaatcagtccttcccttgcctgagcttcagggtcagcctttttgaaatgtggagggactgggggggagcctttggtgcctcttccatgctgggactgtcaccagcagctcccctcgctgtatccacagacc

SEQ ID NO: 70869 - DNA, 945 bp, Homo Sapiens
  misc_feature (598)..(655): n is a, c, g, or t
taagagcgttacgcgcggttggccaattccgggtaatctgggaacaggatggatttttcccgaggaccctggcccaggaaggaaactgttggaggtcggtcgcccgtggtcgggacttccaaggctgttccaggaagcccccccgttgaatggaaagccctggccgggggttgcttacgattccatccgttgaaaggcccccccgggccttggttttcagcggctcccacaaggtggagtttgcagcggcagaaggaagggggaaaaaactggtagggacaggctggtccctccccacccgcggagcaggcctcccaccccaggaggccccattcccaggagcttgtgcgaggggcttctggaggagttggaatggtgagggggagccagaccagggcgaggggccggaggttgggaatgccgaggttggtcccacgcccgcccgcctggccaccacagagaagaagacggagcagcagcggcggcgggagaaggctgtgcacaggctgcgggtacagcaggccgcgttgcgggccgcccggctccggcaccaggagctgttccggctgcgcgggatcaaggcccaggtggccctgannnnnnnnnnnnnnnnnnnnnnnnnnnnnnnnnnnnnnnnnnnnnnnnnnnnnnnnnntgacaagccccgaaggctgggacggctcaagtaccaggcacctgacatcgacgtgcagctgagctcggagctgacagactcgctcaggaccctgaagcccgagggcaacatccttcgagaccggttcaagagcttccagaggaggaatatgatcgagcctcgagagagagccaagttcaaacgcaagtacaaggtgaagctggtggagaagcgggcgttccgtgagatccagttgtagctgccatcagatgccggagactcgcccttcaataaaaaatctcttctagctg

SEQ ID NO: 70870 - DNA, 998 bp, Homo Sapiens
  misc_feature (205)..(217): n is a, c, g, or t
ctcactgggcggggccgggccctggctcccggtggggggggcgagggccccaggctcgccgcttccaagtgtttctccgccctcccctttttgcccggctggcaatctcccccccttgcgtggccccgcctgaagaagccggggtccctggtggttcttccaaaagggatgggattgctaaggaaagctttccgggcaggggcgnnnnnnnnnnnnnggccggggcggcctgggggaccgcctttggtgtgcccaggccgtgcctggcccgctttccactcccttttcttctcgggtctgcctcccaggaaaaaaactccatcctgggcccaacccaacggccctggcccaagggggttgtctgagggccccagaggtccgtagaagcgccccgctctaccggtgtcctgggggccccgggcttggcccttgttgcagaaaggggttgaggagccgggcctgggccctgcgcacctcccggggcagctcgccctgcttggccagcttctcccatagctgctccttccgcctgagcttcttggccgttggggacctggtgggcgaggacgtctttgggggcagggactttggatgtgttctcgaggatgaggtcaacccgaaggggtttcttgagaagcagtgacttcttctggactttggttctcttctttgtcagccctttttccttggagccagtgtccacgaagaagagtttttcatttggggcctctgacaacaagccaccgctcgtgcgctcctgtagccgcacgtcttccaggaactggtcaacctccagccccagcggctcctgagcaagccgccgccagccccgcttcttatttcttgggcctcgccgccgccgcctcagcgctgggtccaccgaagtgggccgcagccccaggaaaccagaatcggcatcgcttttcgagctgcgcttcccaccaacgccactgcataacggacgcgtggtcgacgattctgaaaatccggccggtcca

SEQ ID NO: 70871 - DNA, 497 bp, Homo Sapiens
  misc_feature (161)..(207): n is a, c, g, or t
ccaccacagagaagaagacggagcagcagcggcggcgggagaaggctgtgcacaggctgcgggtacagcaggccgcgttgcgggccgcccggctccggcaccaggagctgttccggctgcgcgggatcaaggcccaggtggccctgaggctggcggagctnnnnnnnnnnnnnnnnnnnnnnnnnnnnnnnnnnnnnnnnnnnnnnnacaagccccgaaggctggggcggctcaagtaccaggcacctgacatcgacgtgcagctgagctcggagctgacagactcgctcaggaccctgaagcccgagggcaacatccttcgagaccggttcaagagcttccagaggaggaatatgatcgagcctcgagagagagccaagttcaaacgcaagtacaaggtgaagctggtggagaagcgggcgttccgtgagatccagttgtagctgccatcagatgccggagactcgcccttcaataaaaaatctcttctagctgta

SEQ ID NO: 70872 - DNA, 1015 bp, Homo Sapiens
taaggcaggtagcgaggcctgggtggctgaattcggcacgaggggaggcagtggcgttggtgggaagcgcagctcgaaaagcgatgccgattctggtttcctggggctgcggcccacttcggtggacccagcgctgaggcggcggcggcgaggcccaagaaataagaagcggggctggcggcggcttgctcaggagccgctggggctggaggttgaccagttcctggaagacgtgcggctacaggagcgcacgagcggtggcttgttgtcagaggccccaaatgaaaaactcttcttcgtggacactggctccaaggaaaaagggctgacaaagaagagaaccaaagtccagaagaagtcactgcttctcaagaaaccccttcgggttgacctcatcctcgagaacacatccaaagtccctgcccccaaagacgtcctcgcccaccaggtccccaacgccaagaagctcaggcggaaggagcagctatgggagaagctggccaagcagggcgagctgccccgggaggtgcgcagggcccaggcccggctcctcaacccttctgcaacaagggccaagcccgggccccaggacaccgtagagcggcccttctacgacctctgggcctcagacaaccccctggacaggccgttggttggccaggatgagtttttcctggagcagacccagaagaaaggagtgaagcggccagcacgcctgcacaccaagccgtcccaggcgcccgccgtggaagggggcccctgcccggaccttcctaccatccatcctttgaagaacccccggacctggttctcagggggccaagaagggggagtttccccccggcaaaaggaggcggcgacaacctggcaccggcgcttggcccctccccgccccggggaagggcccgccacccgggagtccccctttcccggaagctgggggaacggggttgctccgcggacgggcatgcggccatcgggccccccgggcgtcggcgcaggggccccgggcccc

SEQ ID NO: 70873 - DNA, 895 bp, Homo Sapiens
ggctaggtcgaggctgggtttaattcggcacgaggggcaggaggcagtggcgttggtgggaagcgcagctcgaaaagcgatgccgattctggtttcctggggctgcggcccacttcggtggacccagcgctgaggcggcggcggcgaggcccaagaaataagaagcggggctggcggcggcttgctcaggagccgctggggctggaggttgaccagttcctggaagacgtgcggctacaggagcgcacgagcggtggcttgttgtcagaggccccaaatgaaaaactcttcttcgtggacactggctccaaggaaaaagggctgacaaagaagagaaccaaagtccagaagaagtcactgcttctcaagaaaccccttcgggttgacctcatcctcgagaacacatccaaagtccctgcccccaaagacgtcctcgcccaccaggtccccaacgccaagaagctcaggcggaaggagcagctatgggagaagctggccaagcagggcgagctgccccgggaggtgcgcagggcccaggcccggctcctcaacccttctgcaacaagggccaagcccgggccccaggacaccgtagagcggccttctacgacctctgggcctcagacaaccccctggacaggccgttggttggccaggatgagtttttcctggagcagaccaagaagaaaggagtgaagcggcagcacgcctgcaaaacaagccgtccaagcacccgccgtgggaggtggcgcctgcggagcttctacaatccatcctttgaagacaacagaacctggtctcagcgggccaagagtgggagttgagcggcagaaaggaggcggagaagctggaggggagtgtcctggcgcatgaggaggcgcacccagatccatcc

SEQ ID NO: 70874 - DNA, 1029 bp, Homo Sapiens
  misc_feature (898)..(913): n is a, c, g, or t
aactacgctagtagaggctgggtttgaattcggcacgaggggcaggaggcagtggcgttggtgggaagcgcagctcgaaaagcgatgccgattctggtttcctggggctgcggccacttcggtggacccagcgctgaggcggcggcggcgaggcccaagaaataagaagcggggctggcggcggcttgctcaggagccgctggggctggaggttgaccagttcctggaagacgtgcggctacaggagcgcacgagcggtggcttgttgtcagaggccccaaatgaaaaactcttcttcgtggacactggctccaaggaaaaagggctgacaaagaagagaaccaaagtccagaagaagtcactgcttctcaagaaaccccttcgggttgacctcatcctcgagaacacatccaaagtccctgcccccaaagacgtcctcgcccaccaggtccccaacgccaagaagctcacgcggaaggagcagctatgggagaagctggccaagcagggcgagctgccccgggaggtgcgcagggcccaggcccggctcctcaacccttctgcaacaagggccaagcccgggccccaggacaccgtagagcggcccttctacgacctctgggcctcagacaaccccctggacaggccgttggttggccaggatgagtttttcctggagcagaccaagaagaaaggagtgaagcggcagacgctgcacacaagccgtcccaggcacccgcgtggagtgggcctggcggagcttctacatccatcctttgaagacaccaagacctggtctcagggccacgagtggattgcacggaaagagcgggaagctgggcggagatggcctggccgcacgggaggcgcccaggtccattcccgagtggcgagggcnnnnnnnnnnnnnnnncaccggcagggcgacgggatcattctccccccggcgcaaaaagaagggggaagtattgaaaagcgccccaatgaccaaggcgggtgttctctcccctagcctcaacacacaaccgg

SEQ ID NO: 70875 - DNA, 975 bp, Homo Sapiens
aagcgctggtacgctccggatttcccgggatatcgtcgacccacgcgtcgggcagtggcgttggtgggaagcgcagctcgaaaagcgatgccgattctggtttcctggggctgcggcccacttcggtggacccagcgctgaggcggcggcggcgaggcccaagaaataagaagcggggctggcggcggcttgctcaggagccgctggggctggaggttgaccagttcctggaagacgtgcggctacaggagcgcacgagcggtggcttgttgtcagaggccccaaatgaaaaactcttcttcgtggacactggctccaaggaaaaagggctgacaaagaagagaaccaaagtccagaagaagtcactgcttctcaagaaaccccttcgggttgacctcatcctcgagaacacatccaaagtccctgcccccaaagacgtcctcgcccaccaggtccccaacgccaagaagctcaggcggaaggagcagctatgggagaagctggccaagcagggcgagctgccccgggaggtgcgcagggcccaggcccggctcctcaacccttctgcaacaagggccaagcccgggccccaggacaccgtagagcggcccttctacgacctctgggcctcagacaaccccctggacaggccgttggttggccaggatgagtttttcctggagcagaccaagaagaaaggagtgaagcggccagcacgcctgcacaccaagccgtcccaggcgcccgccgtggaggtggcgcctgccggagcttcctacaatccatcctttgaagaccaccagaccctgctctcagcggcccacgaggtggagttgcagcggcagaaggaggcggagaagctggagcggcagctggccctgcccgccacggagcaggccgccaccccaggagtccacattccaagaaactgtgcgaggggcctcctggaaggaacccgaagggggaagggggaac

SEQ ID NO: 70876 - DNA, 392 bp, Homo Sapiens
  misc_feature (114)..(167): n is a, c, g, or t
gcgggagaaggctgtgcacaggctgcgggtacagcaggccgcgttgcgggccgcccggctccggcaccaggagctgttccggctgcgcgggatcaaggcccaggtggccctgannnnnnnnnnnnnnnnnnnnnnnnnnnnnnnnnnnnnnnnnnnnnnnnnnnnnnaggctgacaagccccgaaggctgggacggctcaagtaccaggcacctgacatcgacgtgcagctgagctcggagctgacagactcgctcaggaccctgaagcctgagggcaacatccttcgagaccggttcaagagcttccagaggaggaatatgatcgagcctcgagagagagccaagttcaaacgcaagtacaaggtgaagctggtggagaagcgggcgttcc

SEQ ID NO: 70877 - DNA, 497 bp, Homo Sapiens
  misc_feature (153)..(200): n is a, c, g, or t
ccacccacagagaagaagacggagcagcagcggcggcgggagaaggctgtgcacaggctgcgggtacagcaggccgcgttgcgggccgcccggctccggcaccaggagctgttccggctgcgcgggatcaaggcccaggtggccctgaggctnnnnnnnnnnnnnnnnnnnnnnnnnnnnnnnnnnnnnnnnnnnnnnnntgaggctgacaagccccgaaggctgggacggctcaagtaccaggcacctgacatcgacgtgcagctgagctcggagctgacagactcgctcaggaccctgaagcccgagggcaacatccttcgagaccggttcaagagcttccagaggaggaatatgatcgagcctcgagagagagccaagttcaaacgcaagtacaaggtgaagctggtggagaagcgggcgttccgtgagatccagttgtagctgccatcagatgccggagactcgcccttcaataaaaaaatctcttctagctg

SEQ ID NO: 70878 - DNA, 601 bp, Homo Sapiens
  misc_feature (227)..(279): n is a, c, g, or t
ggaacgcccgcttctccaccagcttcaccttgtacttgcgtttgaacttggctctctctcgaggctcgatcatattcctcctctggaagctcttgaaccggtctcgaaggatgttgccctcggccttcagggtcctgagcgagtctgtcagctccgagctcagctgcacgtcgatgtcaggtgcctggtacttgagccgtcccagccttcggggcttgtcagcctcnnnnnnnnnnnnnnnnnnnnnnnnnnnnnnnnnnnnnnnnnnnnnnnnnnnnntcagggccacctgggccttgatcccgcgcagcggagacagctcctggtgccggagccgggcggcccgcaacgggccctggctgtacccgcagcctgtgcacagccttctcccgccgccgctgctgctccgtcttcttctctgtggtggccaggcgggcgggcgtgggacagacctcggcatcccagcctcgggccctcgccctggcctgctcccctcacatccggatctcagcagcctcgacagtccggaatgttgatccgggtggggctgtcgttggggcaggcagtggcgtcagttctcgctctttgcgttgaatcactc

SEQ ID NO: 70879 - DNA, 1159 bp, Homo Sapiens
  misc_feature (943)..(991): n is a, c, g, or t
cgcacaggaagcgggcgggaccggacttccggctggtctgtggggtttcgggttcggggtttcctggtgggcgtcaggggcaggcaacagagtggcggccgctacggccctggaacggggccatggagaagctgcggcgagtcctgagcggccaggacgacgaggagcagggcctgactgcgcaggtcctggatgcctcatcccttagtttcaacaccagattgaaatggtttgccatctgcttcgtatgtggcgttttcttttctattcttggaactggattgctgtggcttccgggcggcataaagctttttgcagtgttttataccctcggcaatcttgctgcgttagccagtacatgctttttaatgggacctgtgaagcaactgaagaaaatgtttgaagcaacaagattgcttgcaacaattgttatgcttttgtgtttcatatttaccctgtgtgctgctctttggtggcataagaagggactggctgtgttattctgcatattgcagttcttgtcaatgacctggtatagcctgtcgtacatcccatatgcaagggatgcagttattaaatgctgttcttctctcctaagttgaaaatcagaaacttgtggaaaagagcacttgaatgttggtactctatgtttggtgaagtttgcttttccccataaaacactccaggaacaactgacgtgacagttgaagaccgttttgtactaagtctcattttgtatactggtaaaaactacatgcttgattaaaccattaaatgcttgtaactttaaattcattatgtgtcattaatatacttttccaaagataagatttttaatcactgccagttgtaaattatttttagccaatttttaaatcttttcaaagcagctttgaaatgtgaatatttaaaggtagacctgtgctgcaagataattaaactnnnnnnnnnnnnnnnnnnnnnnnnnnnnnnnnnnnnnnnnnnnnnnnnnaactgttgaaactctatttttaagctaaaaaatggctctattatcattgttcttcacccatactcttttaactcccttaccattctcggaaattaagaccattctccaaaaaacaacaaccacctctcccacaacctttgtttcggcacactgggtccctgagaaaac

SEQ ID NO: 70880 - DNA, 281 bp, Homo Sapiens
ttttttgaatttaaagttacaagcatttaatggtttaatcaagcatgtagtttttaccagtatacaaaatgagacttagtacaaaacggtcttcaactgtcacgtcagttgttcctggagtgttttatggggaaaagcaaacttcaccaaacatagagtaccaacattcaagtgctcttttccacaagtttctgattttcaacttaggagagaagaacagcatttaataactgcatccctggtggaaaagagagggaaaaaaacagaatataatattcctc

SEQ ID NO: 70881 - DNA, 592 bp, Homo Sapiens
  misc_feature (580)..(580): n is a, c, g, or t
gcggccgctacgcgcatggaacggggcataggagaagctgcggcatgtcctgagcggccaggacgacgaggagcagggcctgactgcgcaggattcacagattaatctcttgaggtcctggatgcctcatcccttagtttcaacaccagattgaaatggtttgccatctgcttcgtatgtggcgttttcttttctattcttggaactggattgctgtggcttccgggcggcataaagctttttgcagtgttttataccctcggcaatcttgctgcgttacccagtacatgctttttaatgggacctgtgaagcaactgaagaaaatgtttgaagcaacaagattgcttgcaacaattgttatgcttttgtgtttcatatttaccctgtgtgctgctctttggtggcataagaagggactggctgtgttattctgcatattgcagttcttgtcaatgacctggtatagcctgtcatacatcccatatgcaagggatgcagttattaaatgctgttcttctctcctaagttgaaaatcagaaacttgtggaaaagagcacttgaatgttggtactctatgtntggtgaagtttg

SEQ ID NO: 70882 - DNA, 1224 bp, Homo Sapiens
  misc_feature (201)..(218): n is a, c, g, or t
  misc_feature (1083)..(1113): n is a, c, g, or t
aaaagtcaaatgtctttattttatataaaaaaatttgtacagttttagttcctatgtttaagaaaaaatcctaaaattgccgtaatgtttagatccactgcaaactgtagaaacaagctttttatatattaaaaaaaatttacattttacaattttctacatgcatgcacaaggtctcagctctgtaaccccacccccccnnnnnnnnnnnnnnnnnntctagatccaacagtggaaaattctacatttacaatctcacttggaagggactcaaaaagccctcttccttttgcgcacggaagaacaaatcacaacaatcacacaccaggactgaatccatcagcagatactgccctgtgggaagggcagaggaaagagaagacagacggactgacagacaccacagaggaacaggggagttagcctgggaccaatggaggagaagtacgaaccctgggaaaaagacgtgtcagatgagaaagttccggagagtccgatgtctcatcgcaggtgttacatcatcagggtttgccattggaatactgagtggagatgggaaagagaaaagttaagggctgaaatgggaggggaatgggaagaaaaaatgagagacaagagggaaataagaaaaaacaaagagagcacaaagaccagtttaggagaaaggaccaatggggacagtggcagagtggcgaggtaggtgaaggactgaggcacagcgtcctgttgtggagggaggaaaggcaagcgttccgaggtggtgaaaaggaaggcctgctaggcacggtggggatgaacgaggatgccatgagtcacacaaaagacagtgctggtgaggcccagccacagcagccctatggtgtcaagggggtaagaggtgggcatacccccacagcaggagaatgagcagatccagcgcatgatgggacagacacagtggggaaactgctcagagggactgagtcagctgcacaccccacagcagttcacagcatggagacaacttcccacaggggagaagcagaggacaaacacatggccatatgtctgacaattcatcctgacattttaaaaaacaatagnnnnnnnnnnnnnnnnnnnnnnnnnnnnnnngaaaaaagacaaagataccacagttctgaagcaaaagaccaaaatgctaccattctcaggcacagcccttagtgcttagagagttggaggaaaaaaatttttttaggaaag

SEQ ID NO: 70883 - DNA, 1087 bp, Homo Sapiens
  misc_feature (91)..(92): n is a, c, g, or t
  misc_feature (108)..(110): n is a, c, g, or t
  misc_feature (165)..(165): n is a, c, g, or t
  misc_feature (175)..(175): n is a, c, g, or t
  misc_feature (182)..(182): n is a, c, g, or t
  misc_feature (1009)..(1027): n is a, c, g, or t
tctgtgcagatgtacgaggatgtctcaccaactcacctccttagagccacagcgaggactgtctcctgttgtactgttcatgagtctgatnntaaaatgtttgttgtnnntctgggatgatagtcttagcaatgtccatacccgtcagactcccagctagtcatntcttgtattntctgtcnacagtattgtgtgtggcttgtttggcagctcatttggctgtatatatattgagtgatgaattgatcctcttttttccctaagggatatgaattgtttttcttgtgttatattctgcttgtgaatagctggagcaaacctggggctgacacgcgtaagctagggctgcaaagcgagaagagagccggtggagtgtacttgtccctgacaggctgacctacctgagtctctgagcttttcagtccaaatctttgcaaggctcaaaatgccacagaacctctcctcttctccccactccccatggcagggaccggaccatccctacatgcaacatgctgttcctccagcccctcccattgccatggcaaaacaggtacctttggggcatgggggcattacatgggatgcttgtgtaatcgaccacctagccttctctctcccctcccgtcctcccccagaatcacttcctaggacacccgagctgcttgcccagggtcctgtttccctgctaactccagagaagcatcccagggctttgtgacagtctctaattcccttcccttctcgttaagaatcatattgtatagtagctttcagaccatacagtattcattgggttactcctattattatcaagtagctggaattgtgaaggtcggagtagttagatctttagcttttattccttatttttttgtattactctccatgtgtataaattattgatcatgttgctggcttttataaactctaagcgaaggaggagcactgcctcagcctttgcacatggtaatgaagcactgtttttaaataaaagagagaaacaccnnnnnnnnnnnnnnnnnnncctgagcaggcggccgcaagcttattccctttagttgagggttaattttagctttggcac

SEQ ID NO: 70884 - DNA, 341 bp, Homo Sapiens
  misc_feature (23)..(23): n is a, c, g, or t
  misc_feature (46)..(46): n is a, c, g, or t
  misc_feature (135)..(135): n is a, c, g, or t
aggggtccagccctgtccagggnaacaaagtaacaacttcccacgnggcctcctccttccctccgtttggccagcccccctaagtaacgccgtgtccagcccccccggtttggctcccagcctattccacaagcnagaataataacacaagaaaaacaattccataatccccttagggaaaaaagaggatcaattcatcactcaatatataatacagccaaaatgagctgccaaaacaagcacacacacaaatactgtgaacagaaaaatacaagaaaatgactaagctgggagtcttgacggggtatggacattgcttaaagcacttatcagtccccaga

SEQ ID NO: 70885 - DNA, 606 bp, Homo Sapiens
tctctggagttagcagggaaacaggaccctgggcaagcagctcgggtgtcctagcaagtgattctgggggaggacgggaggggagagagaaggctaggtggtcgattacacaagcatcccatgtaatgcccccatgccccaaaggtacctgttttgccatggcaatgggaggggctggaggaacagcatgttgcatgtagggatggtccggtccctgccatggggagtggggagaagaggagaggttctgtggcattttgagccttgcaaagatttggactgaaaagctcagagactcaggtaggtcagcctgtcagggacaagtacactccaccggctctcttctcgctttgcagccctagcttacgcgtgtcagccccaggtttgctccagctattcacaagcagaatataacacaagaaaaacaattcatatcccttagggaaaaaagaggatcaattcatcactcaatatataatacagccaaaatgagctgccaaaacaagcacacacacaaatactgtgaacagaaaaatacaagaaaatgactaagctgggagtcttgacggggtatggacattgcttaaagcacttatcagtccccag

SEQ ID NO: 70886 - DNA, 1039 bp, Homo Sapiens
  misc_feature (184)..(237): n is a, c, g, or t
  misc_feature (947)..(972): n is a, c, g, or t
gagcgaggcctgggtggcgaattcggcacgagggcccccaaactagaaagctaatttcccccgaaggttcatgaagccagaggcatgcccttgggggttggtcgggagaagggtgagaggcagtgctgtggaaggggcctggcccctgctgcctgcgattctccccgggtatgtggccttctgnnnnnnnnnnnnnnnnnnnnnnnnnnnnnnnnnnnnnnnnnnnnnnnnnnnnnngcccaggccacctcctgggactgcagtggggactctaagtgtaaaactgtcatgaggatggtttatgaagtcccagggaccacacctgccactcagggaagagaccgctgacctcagccatcagccgtgtgcatcgtgaggggcagcgagctcaggacggagagctctcccttggttcggagtcagcacacctgcactcccacacgcccactcagctgtgtgtcctccgccgagggcgagcctctctgtgactcttctgtaaaatgcatcccattctgcccactcctgccacgagacccatcctctgcgatcccgccaggcatgtgtgtgtgaatgcatgtgcaaagctctccatcagaagggtggtgtgggccctgcaggtcctacccctcggccttgaagctccctcgggctgcggactctgcctcctgggtctgagcattagaaccaggagaggggtgtccctgggcagagccaggggtgcaaacagcctgcagccatctggccttttaagtatagtgtgtcgcatttccgggtaggaaggtagcatttcaagttcaaagagaggtcaagtcatgcaaccatctttcctccagcacttttggggtaaggaggacagtttttgttatggtttaggggaaattttcatgaaatttccaccattaccaatagattactgatgtccatggcaagtgatctgttcttggcannnnnnnnnnnnnnnnnnnnnnnnnnaaatgtaatcacccattggtcaggcccaggactggtcaccatgagctttgctagccacggccccaaa

SEQ ID NO: 70887 - DNA, 892 bp, Homo Sapiens
  misc_feature (713)..(845): n is a, c, g, or t
ggtacctaagtcagtcactttgctaaattcttcacctgtggtaactcattttgattgttataacatctcagcaccattattcccattttaatgatgaggaaactgagtcatagaggatacagacttgcccaaaggagagccaggattttcacaccccctcctcaagctgggccagcactccaagtgcttgttatatacctccacgggtgtcagcccagatgactcctcacccatccaccacctgcagcttgagatgttaactattagagctccattcttttggttcaaaacgttgatacttacttaaatgttccctgagaggagtgtttatttctgagtaaggggctttgttgaaagagggggttagagagagcaagacagcacttgagtgcactggcaggaagcagagataagacttgaatttcagtttggtagacctccttctttagcagcccaacctgtagcaaatctagtttagcctgcatggcagggagagggattctcttcccaccctcaccatttgcaagtggcaggagctgagaatgccagtacgagagtgtagccaaagtgagaggctgagagcaaaggagacatttttttcagttttgagtcgagtatccagacagaggcaaatcattttgtttaactttttattaaagtgtaactatagaaacacatcaatgatttttcacaagtggagcacgtgcatacannnnnnnnnnnnnnnnnnnnnnnnnnnnnnnnnnnnnnnnnnnnnnnnnnnnnnnnnnnnnnnnnnnnnnnnnnnnnnnnnnnnnnnnnnnnnnnnnnnnnnnnnnnnnnnnnnnnnnnnnnnnnnnnnnnnnttcttcgtatctggtttcttttcaccaatattatgtttgtgagattt

SEQ ID NO: 70888 - DNA, 1794 bp, Homo Sapiens
  misc_feature (1719)..(1731): n is a, c, g, or t
cagacaagaggtttcagccagtgcatgaccttaatattggtgcagagttcggtgctcgaatgataactattgatggaaaacagataaaacttcagatatgcgatacggcagggcaagaatcctttcgttccatcacaaggtcgtattacagaggtgcagcaggagctttactagtttacgatattacacggagagatacattcaaccacttgacaacctggttagaagatgcccgccagcattccaattccaacatggtcattatgcttattggaaataaaagtgatttagaatctagaagagaagtaaaaaaagaagaaggtgaagcttttgcacgagaacatggactcatcttcatggaaacgtctgctaagactgcttccaatgtagaagaggcatttattaatacagcaaaagaaatttatgaaaaaattcaagaaggagtctttgacattaataatgaggcaaatggcattaaaattggccctcagcatgctgctaccaatgcaacacatgcaggcaatcagggaggacagcaggctgggggcggctgctgttgagtctgtttttactgtctagctgcccaacggggcctactcacttattctttcaccccctctcctcctgctcagctgagacatgaaactatttgaaatggctttatgtcacagaagactttaatccgtcaaattcttgtataactttgaataaatggttaatgttcacttaaaagacagattttggagattgtattcatatctatttgcatttgatttctaggtcaattgatgtgattatttttgttaaatgttgtcttgtgcccttaactacgaactgaattgtattaaacactacaaagtcatcttgagtattttaaatcggtttgtgtagttaggtttcccaacatctgtggttacctaatgtttaatattatagaactgtcctcagaaactttgtcaattttcacggctataaggaaacagaaggactcttttaattctgtatttatcatttactttctgtatatatagtttaataacctgcttgggtgtaatttgccaagcttgaattctttaatgcatttgcataaattctatactgtttagagcttaaagctacagaagcattgttaggaattgcttggacactgaattttaaactttttgacattgttaacaagcatgttcatcttttcttgtcactagtccaagaaaaatatgcttaatgtatattacaaaggctttgtatatgttaacctgttttaatgccaaaagtttgctttgtccacaatttccttaagacctcttcagaaagggatttgtttgccttaatgaatactgttgggaaaaaacacagtataatgagtgaaaagggcagaagcaagaaatttctacatcttagcgactccaagaagaatgagtatccacatttagatggcacattatgaggactttaatctttccttaaacacaataatgttttcttttttcttttattcacatgatttctaagtatatttttcatgcaggacagtttttcaaccttgatgtacagtgactgtgtaaaatttttctttcagtggcaacctctataatctttaaaatatggtgagcatcttgtctgttttgaaggggatatgacaataaatctatcagatggaaaatcctgttacaaagtagaaaagctttagtaatttactcagtgtggtggttttatccnnnnnnnnnnnnnctcccttggtctataatgaaattgttacagcagtgcaaaataaaatcctatgtataaaaaaaa

SEQ ID NO: 70889 - DNA, 1367 bp, Homo Sapiens
  misc_feature (1062)..(1062): n is a, c, g, or t
  misc_feature (1153)..(1153): n is a, c, g, or t
  misc_feature (1215)..(1215): n is a, c, g, or t
ggggcggaggcggggcggaggcgccgcggcggctgttattgttcggctgggctcggtcgggcgctgtctccctcggctctgcgggtgtcagttcgtccggcttcctcacagcccctcactcccggcggctgacagcagcagcggcggcggcgggcggcgcctggcgtttcgaggctgagcggcaccggggttggggcgcggaggaggagcagcagcgggaggaggagccgtgtgccctggcactgagcggccgcggccatggcgtacgcctatctcttcaagtacatcataatcggcgacacaggtgttggtaaatcatgcttattgctacagtttacagacaagaggtttcagccagtgcatgaccttactattggtgtagagttcggtgctcgaatgataactattgatgggaaacagataaaacttcagatatgggatacggcagggcaagaatcctttcgttccatcacaaggtcgtattacagaggtgcagcaggagctttactagtttacgatattacacggagagatacattcaaccacttgacaacctggttagaagatgcccgccagcattccaattccaacatggtcattatgcttattggaaataaaagtgatttagaatctagaagagaagtaaaaaaagaagaaggtgaagcttttgcacgagaacatggactcatcttcatggaaacgtctgctaagactgcttccaatgtagaagaggcatttattaatacagcaaaagaaatttatgaaaaaattcaagaaggagtctttgacattaataatgaggcaaatggcattaaaattggccctcagcatgctgctaccaatgcaacacatgcaggcaatcagggaggacagcagggctgggggcggctgctgttgagtctgtttttactgtctagctgcccaacggggcctactcacttattctttcaccccctctcctcctgctcagctgagacatgaaacctatttgaaatgggctttatgtcacagaaagaatttaaatcccgtcaaaattctggaataacgtttgaataaatggtntaatgtttcaccttaaaagaacagattttttggagaatggaaattcatattctatttggcattttgaatttcctaaggtccattggaaggnggattaatttttggttaaaagggtggccttgggggccccttaactaccaaccttggaatggnattaaaacccctaccaaaggccctccttgggaaaatttttaaaacccggtttttggggaaattaagggtttcccaacaatctggggggggtacccccaaggggttaaaaattataaaagaaactggccccccaaaaaacttttggccaattt

SEQ ID NO: 70890 - DNA, 614 bp, Homo Sapiens
  misc_feature (105)..(168): n is a, c, g, or t
cgcttattagaaaatgtctctttccttttgtcctggtgtctggtgacctcctcttgtcctgtggcatctataacctgagttcagtcacttaataccgaggtcctnnnnnnnnnnnnnnnnnnnnnnnnnnnnnnnnnnnnnnnnnnnnnnnnnnnnnnnnnnnnnnnnggctcacaaggagacatacgacaaccaggtaaacatggcagacaagagcatgtcagatgcgctgtgaagaacactgcggggcccctcctaggaggtggcatgagttacatgcagacagagacgatccgggggcagacggagttccatgtggggcagtggtgagggcagacgctctggggctgggatccctgggagtgttcgagaagcaccgagaaggcttctgtggctggagccggccagctgggggagatggggccagggagatggcaggggcctctccctgtcccaggacccagagccaagggaggctttaagcccaggaccaggggtctgaaaacgaaaagcactcacagtccttgaacattggaaagagaatttttgaagagtagcccttctttttgtttttgttggcattctaagttaataaacacgcttatgaacacaaa

SEQ ID NO: 70891 - DNA, 1023 bp, Homo Sapiens
ccacataggctaggtacgaggctgggtggtgaattcggcacgaggcggttcgctcggccgcggtcgctatggaggagccggagatgcagctcaaggggaagaaagtcacggacaagttcactgagagcgtctacgtcctggccaacgagccatccgtggccctgtaccggctgcaggagcatgtgcgtcgctccctccccgagctggcccagcacaaggcagacatgcagcgttgggaggagcagagccagggagccatctacactgtggagtacgcctgcagcgccgtgaagaacctggtggacagcagcgtctacttccgcagcgtggagggtctgctcaaacaggccatcagcatccgggaccatatgaatgccagtgcccagggccacaggtagctcctgggaccgcccgcccccactgccactcccagctgcaaggaccgtctctcagctgcgctgggaaccgctgcttctcgcttattagaaaactgtctctttccttttgtcctggtgtctggtgacctcctcttgtcctgtggcatctataacctgagttcagtcacttaataccgaggtcctgcactctgctgtgtgcctggccctgggctgggcactggggacatagcagtgaccgagacagacaggctcacaaggagacatacgacaaccaggtaaacatggcagacaagagcatgtcagatgcgctgtgaagaacactgcggggccctcctaggaggtggcatgagttacatgcagacagagacgatccaggggcagacggagttccatgtggggcagtggtgagggcagacgctctggggctgggatccctggggagtgttcgagaagcaccgagaaggttctgtggctggagccggcaagtggggagatgggccgggaatggcagggcccttcctgtccagaccaagcaggaggttaaccaggaccgggttgaaacgaagatcccgtcttgacattggcagaatttggaggcccctttggttggcgtcattaaaacctg

SEQ ID NO: 70892 - DNA, 1158 bp, Homo Sapiens
cggccgcggtcgctatggaggagcctggagatgcagctcaaggggaagaaagtcacggacaagttcactgagagcgtctacgtcctggccaacgagccatccgtggccctgtaccggctgcaggagcatgtgcgtcgctccctccccgagctggcccagcacaatggcagacatgcagcgttgggaggagcagagccagggagccatctacactgtggagtacgcctgcagcgccgtgaagaacctggtggacagcagcgtctacttccgacagcgtggagggtctgctcaaacagtgccatcagacatccgggaccatcatgaatgccagtgcccagggaccacagcccggaggaaccaaccccgcacctcactcagcctgatcctggaagagactcggggcacccccagactccgccaacccagagacaggggtttcgaccatgtttggctaggctggtctcacactcctgaggctcgtgatactcccgactcagcatcccaaaagtgctgggatcatagcgtgtgagaccaccagcacccaaggccttgagatctcccattcttcatcatggcataaggaaggctggagatgcagcattctctacaagagctgagatttggacaattcagcaaggaatctacgccttcaccaaagctgcattcacttgcctcaatggacagcaacggcccaacccactgatcagggccaacatggaggaagcaccccgtagtacagatggtgaatagtagggactcggcactgaccagtcagaagcctccatgaaccacggatccgaggtgaatggcgatcgcgcaggaaccgatgaccaaagggaagcgaccaaacatgagaagcctaccaggacgtcggaaggtgaccgtgaagaagaaacccgacggccaggggccagggcagccgaaaatataggcgcgcccgccccaggggccgacccaccaccgcgccgcaggggggggaagcccaaacaaaaaggacaagagaaacacagaggagacgaaaaaacgaggggaggagacaacaaggagaagaccagccacacaaacagacgccaccacacgggcacgcgcgcccaccgcgacaccgcaaacaaagcgcgacgtcagagagaggcgccacaagagcagccgaaaagacag

SEQ ID NO: 70893 - DNA, 613 bp, Homo Sapiens
gaaggacctggtgtacatcagcgtctacttccgcagcatggagggtctgctcaaacaggccatcagcatccgggaccatatgaatgccagtgcccaaggccacagcccaggaggaaccacccccgccctcctcagcctgatcctggaagagactcggggccccccagcctccgccaacccaggtcagtgccgagggtagccacgagcctctctctctgctctgaactaaccaacccgcccgcttggcagccaggcaggcacctgcttgtctaaccacttggggtttctcactgggcttgtgggatgatttcggaggtggcaggtggaggggtgtctgcaggtccagaatgttccaccctgctgctcagggaccatgtcagcccatctctcccactctctctccaccaccttcctctctcttttccaggccataggccccatgctagtcccagagatttccaccccccaagacagagaagggagcccacatttcctctatcctaccacgtgccagcagcctgcttatacccgtgcacagtctctcaggcagagcccggcatgggcaattacccacctatcaacgggacctccccacccatctactgcctactaa

SEQ ID NO: 70894 - DNA, 859 bp, Homo Sapiens
cggtaggcagtactctaacggtttaaggtagcgaggcctgggtggcgaattcggcacgaggccgggagtggttcgctacctttctgtttgtgcagcatgacggcctggtgtggccctcagagccctcacgcgtgtcccgggcagtgcctgaggtccggctgggtagtgtgtcactgatcccccttcgaggtagtgaaaatgaaatgcgccggagtgtggctgccttcaccgcggaccctctgtctcttttgcgcaacgtctgagcacaggagcccatccttggctctaggattccgccgctggaagccttctgttcagacaccccttatgctccaaggcctgatgtgagccagcggggggtgcatgggaaactgcaccccacaacccacatcctccatcctgactgcagcatggggttccccggcaggggtgggaggcagcaggggtcagcctgggcaggaacctctcccaactctgtccaggtgttcagacctcttggcccaacctgctcaccccaccgggttcactgtccttgtggggctggagagatgggcataagtcaggaacttgggaggaccaccaccctttcagaggcgtgaggccctggggccctgccggaagggagccccctgctcctcccaacaaactccagaacagcagaaagcgggtgctgtagaggagcactcagctcacggggagggagctcttggctgagcttctacagggctgagagctgcgctttggggacttcagccttccttccagtctgggctgagtggggggtccagactacctgatgccccttccccaatttggggactttttgataatataaatatatctgtatattttaaaaaaa

SEQ ID NO: 70895 - DNA, 1656 bp, Homo Sapiens
  misc_feature (1401)..(1401): n is a, c, g, or t
  misc_feature (1423)..(1423): n is a, c, g, or t
  misc_feature (1462)..(1481): n is a, c, g, or t
aatgaattccaagatgcaggtgtattctggttccaagtgtgcctatctccctaaaatgatgaccttgcaccagcaatgcatccgagtacttaaaaacaacatcgattcaatctttgaagtgggaggagtcccatactctgttcttgaacccgttttggagaggtgtacacctgatcagctgtatcgcatagaggaatacaatcatgtattaattgaagaaacagatcaattatggaaagttcattgtcaccgagactttaaggaagaaagacccgaagagtatgagtcgtggcgagagatgtacctgcggcttcaggacgcccgagagcagcggctacgagtactaacaaagaatatccagttcgcacatgccaataagcccaaaggccgacaagcaaagatggcctttgtcaactctgtggccaagccacctcgtgacgtccggaggaggcaggaaaagtttggaacgggaggagcagctgtccctgagaaaatcaagatcaagccagccccgtaccccatgggaagcagccatgcttccgccagtagcatcagctttaaccccagccctgaggagccggcctatgatggcccaagcaccagcagtgcccacttggcaccagtggtcagcagcactgtttcctatgatcctaggaaacccactgtgaagaaaattgccccaatgatggccaagacaattaaagctttcaagaacagattctcccgacgataaactgaggacttgccttggaaatggaatctggggaggcaggaatacaaggacagtgggggttggggaatggaattctacaggagactggagtcttgctttgtggatccttttggtctccgagtcctgcagtctgcaggtgctgcccctgggaacctgcgtgccacagccccgcctccctgcctggagcacactttagaattctgaagatgtgaagcctctgtctcactgaggattttaaaggtcaattatacttttgttgttcattagcatctttgtaaactataagacgtagttttaattaataaatattgcccccagattgtatttatattatcccccaggtttgtttttgttttttgtcctctaccacacatttagccttttatcttccaggtccttattaaaatcagatgaaagcctagtgaaagccagtctcctgccccagctcagctctgtgtggactctggtccagacagaggactgggcatctccagagcctgcacagtacctgctgcacgtagggcaaggaatgagcactagaccgcctgtccccaagggagcctcagtggggcgacagggtgctcggcggactccacctcaggccctccccactgttgctgtgcattcctgtgcaggtgcatctctttcttactaactggtatttattnaagggagggtgctctgtaggtnctggagcctttccctcatcctttttgcgagtccccaccnnnnnnnnnnnnnnnnnnnnctttgaggctcactagaggacgcagaacccttgggagattgatttgcacagaactccccacctcccactttttacattttcccgttttctgattgaaaaattttagggttttctcccccactggccctttcccctatcttttccttccccctcaaaccccagggaagggaaaaaa

SEQ ID NO: 70896 - DNA, 1261 bp, Homo Sapiens
  misc_feature (584)..(584): n is a, c, g, or t
  misc_feature (715)..(753): n is a, c, g, or t
  misc_feature (992)..(1043): n is a, c, g, or t
aaatttgtccagagctttctttttcctagaaatccagagagcaaagtcagagcctggcacctgcagataggataacactggtgtctgatggtgaggctgcccagtcccatcaggagcctcagccaaggaggggcctgggcacactcaggtccccatggttgtccattgaatggagtgaggatcaaggtgggaatgactgggtggtggctgccactagcccaggaacatgacaacgtgaccacaccacacatgcctccaacacacacccacagtctaaacatctctccttctcagtgagcccttctcccattccagatcatcagcacacccacacccaccataggtctctcttctccggtcttcccagaagggtaaaactcccagcctaccctgctccagcttcagcccaggtagttggtgtgtctcaatatgaatagggggtgagtagcttcatagaaagaatggggaactcccttggcctcaagccagtatagtttggaagttgggggtcggggatgttaagggtggggagtatcctgcctgtgacctctaggttatgaaaactatcttagaaggtgcttttnagaaagaaccaggagaacaaccaaagcagcttacagacgcctgaacggagaatgaagtgtttcaagtaagcgagtctgcaagttctcagaagcagacagatatccaatctggactgcagccagggaagtcnnnnnnnnnnnnnnnnnnnnnnnnnnnnnnnnnnnnnnnattgcttgtatgacttcacaagcaactcaggatcattctagcaggctttcccactgtcaaacagagacttcattctaaaaagagaagtgataaacagagctccagctctgctagctctatatatttactgattagtggaaagcactgaccaaggagacttttaagccagtggttcttcagaatcacctagatgcctccaccctccagagatccagagtccaggagtctgaagtggggcnnnnnnnnnnnnnnnnnnnnnnnnnnnnnnnnnnnnnnnnnnnnnnnnnnnnttttcagatgtctcatgaggaacactacttaatgcagtgggaaagaaaatatttcagaggagaattttttcttaaagaagctgcatattctggactctaatttagtttaattcactccaggatggcacgcaggattcctaattcttaaatgccattcagtctggacttcaaatcacttgtcttcagaaaataaaagatttgttccacccgggaaaaaa

SEQ ID NO: 70897 - DNA, 881 bp, Homo Sapiens
  misc_feature (813)..(850): n is a, c, g, or t
  misc_feature (881)..(881): n is a, c, g, or t
acaatacaacgaaaatcataaaccataggctaggtacgaggccggtgtgaatcggccgaggcaaaatagtttgcagccagtccctgccctcccggaggtacctcatggcagggccaggttccagcagtgaggaggatgaggcctctcacagcggtggcagcggagatgaagcccccaagcttcctcagaagcaaccccagaccaaaaccaagcccactcaggcagctggacccagctcaccccagaagcccccaacccctgaagagaccaaagcagcctcaccagtgctccaggaagatatagacattgagggggtacagtcagaaggacaggacaatggggcggaagattctggggacacagaggatgagctgaggagggtggcagagcagaaggaacacagactgccccctggccaggaggagaatggggaagacccgtatgcaggctccacggatgagaacacggacagtgaggaacaccaggagcctcctgatctgccagtccctgagctcccagatttcttccagggcaagcacttctttctttacggggagttccctggggacgagcggcggaaactcatccgatacgtcacagccttcaatggggagctcgaggactatatgagtgaccgggttcagtttgtgatcacagcacaggaatgggatcccagctttgaggaggccctgatggacaacccctccctggcattcgttcgtccccgatggatctacagttgcaatgagaagcagaagttacttcctcaccagctctatggggtggtgccgcaggcctgaagtatgtgctatnnnnnnnnnnnnnnnnnnnnnnnnnnnnnnnnnnnnnngatgcatttaataaagatgagttggttctcn

SEQ ID NO: 70898 - DNA, 491 bp, Homo Sapiens
cattccccttcctttgtcctaatcctggaattaagtacaggggtttataggttctatttcttcccaagagccctgcaaagaaccccagtttcctatttggatgcccctacactgttgtgtttcagtggaatgtattttcatttaaaaacaactttgaatggggcactttttctttcctgttttaaaaattgaaaaattcttacagtacaaacaggactgtcagggtgggggtgttggtgctgtaagaggtcactcttgagtgcattttggcactgggatgggatggctggggtgggaagaccccccatccccacccccaacttcttttctaatatttaaggagtgttttgtaggattcaacaaccaccacaacttgaatttgtatcatgggaggtgggagggagtggcttagaggtgtctgcctatgcttaaagccaactgtggaagttttgttttcccttttttgtataataaagtgaaaaacaaaggtt

SEQ ID NO: 70899 - DNA, 215 bp, Homo Sapiens
  misc_feature (43)..(43): n is a, c, g, or t
  misc_feature (103)..(103): n is a, c, g, or t
gcctcctacttctgtcttgaagccagacaatcgacttcagctntccctcccctccctctttctccacgttctgatcccactcgctctcctgtccccttccccntcccctcccggcggaaagccccccgaaaccaacaaagctgagccgagagaaacaaacaaaacaaacacaccgggccagacaagccatcgacaaagctttgcaaaagcaaaaa

SEQ ID NO: 70900 - DNA, 468 bp, Homo Sapiens
  misc_feature (315)..(324): n is a, c, g, or t
gatattttaacaaacgttcctttattaggttactgactattatcaaccatcataaaatagaacgggagtttcaaaactgtacaagccacaaggctctgggctggtaggaaagaagggtggggtcgagggtcccagggtgtcggggggtgggagatgcagagagagctagagggtcacccggcatctgtgaggacggctgggtcaaggccataagctgggatctgtacaagggaaacattcatcagaatgtgacccacctgaaacaggagggaggaaaatctttaaaagtcttacaggtaaggtcccctgccccgnnnnnnnnnnccgtcaaaataataagggggtaatgtacatttctcacccagtcttggcaccaattttgtgctttaaaaaatatactccactgtaagatttacttaaaaaaaggtactctacagcagctgtttaaaacataattcttacagacaa

SEQ ID NO: 70901 - DNA, 715 bp, Homo Sapiens
  misc_feature (157)..(177): n is a, c, g, or t
cttctttaattttttgattaaaacatacacacagctgttagcataaagtcgtggggggcattttctggaatgctcagcagttctgattaactgccaagcccaggttgcctctcatgaggcaactgaaaaaatcctgtgtcttgatagcatgggtgcnnnnnnnnnnnnnnnnnnnnnctgcattcatgccttaactcgggttactgcacaactttagttcttgacttagtctgcaccgtcatctagattgtattgtacatctcggtctgaacttcatcctggcaaaaacaaagttgcaggcacaacagtttaagaatgcattcctccagaagagtatctggtcaggttgaccctgagccttctttggacttgatttggaacttagcctggaaagcgaaagtggactgtccaacagaaagatgtcaacaaggaaaagaggagagccaagcgctagcatgccttttgcctctgcatatctgtgcacactgtatgttgttcatgatagcttgtctacaacttgactaggttggagttctggtaatagtggcaatcttgacattcttggtcagagtttagagagatgtaagactttcaattaatgtcttatttactcctttatgttgattagtctttgatacatgtgctgaatcagaaacctaaataaagataattttttaaaatgcaaacaaaccccacaaaataaaaataaaacatg

SEQ ID NO: 70902 - DNA, 1525 bp, Homo Sapiens
gctggtaccggtccggaattcctccgattggacgctggattagaaggattaacaaaaatctgtgctggctggagccccctcagtgtgcaggcttagagggactaggctgggtgtggagctgcagcgtatccacaggccccaggatgcaggccctggtgctactcctctgcattggagccctcctcgggcacagcagctgccagaaccctgccagccccccggaggagggctccccagaccccgacagcacaggggcgctggtggaggaggaggatcctttcttcaaagtccccgtgaacaagctggcagcggctgtctccaacttcggctatgacctgtaccgggtgcgatccagcatgagccccacgaccaacgtgctcctgtctcctctcagtgtggccacggccctctcggccctctcgctgggagcggagcagcgaacagaatccatcattcaccgggctctctactatgacttgatcagcagcccagacatccatggtacctataaggagctccttgacacggtcactgccccccagaagaacctcaagagtgcctcccggatcgtctttgagaagaagctgcgcataaaatccagctttgtggcacctctggaaaagtcatatgggaccaggcccagagtcctgacgggcaaccctcgcttggacctgcaagagatcaacaactgggtgcaggcgcagatgaaagggaagctcgccaggtccacaaaggaaattcccgatgagatcagcattctccttctcggtgtggcgcacttcaaggggcagtgggtaacaaagtttgactccagaaagacttccctcgaggatttctacttggatgaagagaggaccgtgagggtccccatgatgtcggaccctaaggctgttttacgctatggcttggattcagatctcagctgcaagattgcccagctgcccttgaccggaagcatgagtatcatcttcttcctgcccctgaaagtgacccagaatttgaccttgatagaggagagcctcacctccgagttcattcatgacatagaccgagaactgaagaccgtgcaggcggtcctcactgtccccaagctgaagctgagttacgaaggcgaagtcaccaagtccctgcaggagatgaagctgcaatccttgtttgattcaccagactttagcaagatcacaggcaaacccatcaagctgactcaggtggaacaccgggctggctttgagtggaacgaggatggggcgggaaccacccccagcccagggctgcagcctgcccacctcaccttcccgctggactatcaccttaaccagcctttcatcttcgtactgagggacacagacacaggggcccttctcttcattggcaagattctggaccccaggggcccctaatatcccagtttaatattccaataccctagaagaaaacccgagggacagcagattccacaggacacgaaggctgcccctgtaaggtttcaatgcatacaataaaagagctttatccctaaaaaaaa

SEQ ID NO: 70903 - DNA, 672 bp, Homo Sapiens
ctcgttggtatttgtaagaccacattttttcctccctaggagatgcctcataaatttgtgatagccgtgctgatggaatacattcgttctcttaaccagtttcagattgcagtacagcattacctacatgaacttgttatcaaaacccttgtccagcacaacctcttttatatgctgcatcagttcctgcagtaccacgtcctcagcgactccaaacctttggcttgtctgctgttatccctagagagtttctatcctcctgctcatcagctatctctggacatgctgaagcgactttcaacagcaaatgatgaaatagtagaagttctcctttccaaacaccaagtgttagctgccttaaggtttatccggggcattggtggccatgacaacatttctgcacgaaaatttttagatgctgcaaagcagactgaagacaacatgcttttctatacaatattccgcttttttgaacagcgaaaccagcgtttgcgagggagccccaatttcacaccaggggaacactgtgaagaacatgttgcttttttcaaacagatttttggagaccaagctctaatgaggcctacaacattctgaaatcacttgctgtttttttatataaaaatgtgtacaaagttaatttattgcattaataaagctctttaaactata

SEQ ID NO: 70904 - DNA, 1623 bp, Homo Sapiens
  misc_feature (78)..(112): n is a, c, g, or t
  misc_feature (1461)..(1561): n is a, c, g, or t
  misc_feature (1567)..(1577): n is a, c, g, or t
gaaatgtatagatcatatagggcgcagctcgcgagacgaacgacgagcgcaggagtcagtgagcgaggaagcggccgnnnnnnnnnnnnnnnnnnnnnnnnnnnnnnnnnnncagtcgacggtaccggacatatgcccgggaattcggccattacggccggggatgtcttctacgaacagtacctgaccatcattgacgacactatcttcaacctcggtgtgtccctgggcgcgatatttctggtgaccatggtcctcctgggctgtgagctctggtctgcagtcatcatgtgtgccaccatcgccatggtcttggtcaacatgtttggagttatgtggctctggggcatcagtctgaacgctgtatccttggtcaacctggtgatgagctgtggcatctccgtggagttctgcagccacataaccagagcgttcacggtgagcatgaaaggcagccgcgtggagcgcgcggaagaggcacttgcccacatgggcagctccgtgttcagtggaatcacacttacaaaattgggagggatcgtggtgttggcttttgccaaatctcaaattttccagatattctacttcaggatgtattgtggccatggtcttactgggagccactcacggattaatatttctccctgtcttactcagttacatagggccatcagtaaataaagccaaaagttgtgccaatgaagagcgatacaaaggaacagagcgcgaacggcttctaaatttctagccctctcgcagggcatcctgactgaactgtgtctaagggtcggtcggtttaccactggacgggtgctgcatcggcaaggccaagttgaacaccggatggtgccaaccatcggttgtttggcagcagctttgaacgtagcgcctgtgaactcaggaatgcacagttgacttgggaagcagtattactagatctggaggcaaccacaggacactaaacttctcccagcctcttcaggaaagaaacctcattctttggcaagcaggaggtgacactagatggctgtgaatgtgatccgctcactgacactctgtaaaggccaatcaatgcactgtctgtctctccttttaggagtaagccatcccacaagttctataccatatttttagtgacagttgaggttgtagatacactttataacattttatagtttaaagagctttattaatgcaataaattaactttgtacacatttttatataaaaaaacagcaagtgatttcagaatgttgtaggcctcattagagcttggtctccaaaaatctgtttgaaaaaagcaacatgttcttcacagtgttcccctagaaaggaagagatttaattgccagttagatgtggcatgaaatgagggacaaagaaagcatctcgtaggtgtgtctactgggttttaacttatttttctttaataaaatacattgtttttcctcccggacacgnnnnnnnnnnnnnnnnnnnnnnnnnnnnnnnnnnnnnnnnnnnnnnnnnnnnnnnnnnnnnnnnnnnnnnnnnnnnnnnnnnnnnnnnnnnnnnnnnnnnngccttnnnnnnnnnnncgttccaaaatatttcctccgggggggcccccctttctgggccaca

SEQ ID NO: 70905 - DNA, 549 bp, Homo Sapiens
ggtcggtaccctcgcgaacgtgtatcggggcatcggtggcatgacaacatttctgcacgaaaatttttagatgctgcaaaacagactgaagacaacatgcttttctatacaatattccgcttttttgaacagcgaaaccagcgtttgcgagggagccccaatttcacaccaggtgagaatgcaatgaaaagacttggggtaaccatagcctcaaagagtagcagagggcactggcagctggtgagcgaggaccctgggttagcatttttgtaaacaacacaatctgataacagcccacctagcccttggcccattatttgtagtagagtgaattcagtatactgacagaatctggattatgctctggaactcaccgaggaggtgtgttttgagtcaagacacatttaggacccagatcaggcacagcccatctcttatagcagatcttggaatatctcttaaagccaggaataagacggcaaatggtggctaagggttttaaagggtctggggcttattaaggtttcagttggataacacgttcgcgag

SEQ ID NO: 70906 - DNA, 734 bp, Homo Sapiens
  misc_feature (111)..(111): n is a, c, g, or t
ttcagtttcggccagctctcagatgcttacagcacgggaagcagcctgatgcccagaaagaaaacccgaccagtttggagctgatccgagcaaggctgggcgtgtgtttgngccgtgtgccgggctcctgatgaccctcaagggacttcccagcacctacaacaaagacttacaggaggacaaggaagctgtgtttgaagtgtcagacactatgagtgccgtgctccaggtggccactggcgtcatctctacgctgcagattcaccaagagaacatgggacaggctctcagccccgacatgctggccactgaccttgcctattacctggtccgcaaagggatgccattccgccaggcccacgaggcctccgggaaagctgtgttcatggccgagaccaagggggtcgccctcaaccagctgtcactgcaggagctgcagaccatcagccccctgttctcgggcgacgtgatctgcgtgtgggactacgggcacagtgtggagcagtatggtgccctgggcggcactgcgcgctccagcgtcgactggcagatccgccaggtgcgggcgctactgcaggcacagcaggcctaggtcctcccacacctgccccctaataaagtgggcgcgagaggaggctgctgtgtgtttcctgccccagcctggctccctcgttgctgggctttcggggctggccagtggggacagtcagggactggagaggcagggcagggtg

SEQ ID NO: 70907 - DNA, 1077 bp, Homo Sapiens
gctggccgtgctggcagtgggccgcctcgatccctctgcagtctttcccttgaggctccaagaccagcaggtgaggcctcgcggcgctgaaaccgtgaggcccggaccacaggctccagatggaccctgggaaggacaaagagggggtgccccagccctcagggccgccagcaaggaagaaatttgtgatacccctcgacgaggatgaggtccctcctggagtggccaagcccttattccgatctacacagagccttcccactgtggacacctcggcccaggcggcccctcagacctacgccgaatatgccatctcacagcctctggaaggggctggggccacgtgccccacagggtcagagcccctggcaggagagacgcccaaccaggccctgaaacccggggcaaaatccaacagcatcattgtgagccctcggcagaggggcaatcccgtactgaagttcgtgcgcaatgtgccctgggaatttggcgacgtaattcccgactatgtgctgggccagagcacctgtgccctgttcctcagcctccgctaccacaacctgcacccagactacatccatgggcggctgcagagcctggggaagaacttcgccttgcgggtcctgcttgtccaggtggatgtgaaagatccccagcaggccctcaaggagctggctaagatgtgtatcctggccgactgcacattgatcctcgcctggagccccgaggaagctgggcggtacctggagacctacaaggcctatgagcagaaaccagcggacctcctgatggagaagctagagcaggacttcgtctcccgggtgactgaatgtctgaccaccgtgaagtcagtcaacaaaacggacagtcagaccctcctgaccacatttggatctctggaacagctcatcgccgcatcaagagaagatctggccttatgcccaggcctgggccctcagaaagcccggaggctgtttgatgtcctgcacgagcccttcttgaaagtaccctgatgaccccagctgccaaggaaacccccagtgtaataataaatcgtcctcccaggccaggctcctg

SEQ ID NO: 70908 - DNA, 960 bp, Homo Sapiens
gggactatgctaggtacgaggcctggggtgaaattcggcacgagggggacctgacgcttatggagctctcggagttttgtgggggacggctgtgagtggggggttcctgctgcgggatgagaacgtagacgccagtggctcactcgctcctggcaccttccctttcaggctccagatggaccctgggaaggacaaagagggggtgccccagccctcagggccgccagcaaggaagaaatttgtgatacccctcgacgaggatgaggtccctcctggagtgaggggcaatcccgtactgaagttcgtgcgcaatgtgccctgggaatttggcgacgtaattcccgactatgtgctgggccagagcacctgtgccctgttcctcagcctccgctaccacaacctgcacccagactacatccatgggcggctgcagagcctggggaagaacttcgccttgcgggtcctgcttgtccaggtggatgtgaaagatccccagcaggccctcaaggagctggctaagatgtgtatcctggccgactgcacattgatcctcgcctggagccccgaggaagctgggcggtacctggagacctacaaggcctatgagcagaaaccagcggacctcctgatggagaagctagagcaggacttcgtctcccgggtgactgaatgtctgaccaccgtgaagtcagtcaacaaaacggacagtcagaccctcctgaccacatttggatctctggaacagctcatcgccgcatcaagagaagatctggccttatgcccaggcctgggccctcagaaagtaagagctctgggaaagaacccaaggagttgggggaaggagagagccccaaataaacacaacctgagaccccaaagttttaaggtgaaaaaagaaccaaagaccagacacagtggcttccgcctgtaatcccaacacttgggaggccaggcgggaca

SEQ ID NO: 70909 - DNA, 945 bp, Homo Sapiens
  misc_feature (468)..(481): n is a, c, g, or t
  misc_feature (483)..(621): n is a, c, g, or t
  misc_feature (623)..(640): n is a, c, g, or t
ttcagagtctggggaggaggctcccacaggccgggacaagaagcggaagcagcagcagcagcagcctgtgtagtctgcccccgggaaactgaggaactaaagaaagctgaaggtgcccacctgggccaccagaaggtgacacccccagaatccctccccagagactgcaccagcgcagccagcaggagcctggcctgggaggacgatttattattacactgggggtttccttggcagctggggtcatcagggtactttcaagaagggctcgtgcaggacatcaaacagcctccgggcctggatgggagggagaaaaaaatgaggaaccagtcattaaaggagctgtttcctgggtaaatctagagtggggttttggttctttattttcccctataccctcaagcatttatccattgagttaccaacaatccagttacaatctttttaagctattattattattattannnnnnnnnnnnnngnnnnnnnnnnnnnnnnnnnnnnnnnnnnnnnnnnnnnnnnnnnnnnnnnnnnnnnnnnnnnnnnnnnnnnnnnnnnnnnnnnnnnnnnnnnnnnnnnnnnnnnnnnnnnnnnnnnnnnnnnnnnnnnnnnnnnnnnnnnannnnnnnnnnnnnnnnnnaccaaagacggggcttcacccccttagccaggatgggctccgatctcctgaccctctgatgggcctggcccaacctccccgtgcttgggattatagggggggacccccctgcgcccgggctaaagtcacccttatttttttgccaccaggcccccctgggggctccccaccgttggaaccgcaccgggttggcatccttggccttaatgtcgatactttcccccccctgggggttcccaaacgatccccccggcccttaaacctcccgaagaaaacctcgggccctaaaaggggctcccacacaa

SEQ ID NO: 70910 - DNA, 599 bp, Homo Sapiens
tggggagggggcaccatgcagctcactacactattcattgcacacaaaatgaatttttcactttttaagatgcattcttggtgctcaaaccagatcgaagtttgtctctaaaagctattgtctgcacaggctgctgcatgctctgttgttaaatggatggacaggctattctaaattttggttgatacttttgctactatgggcaattaacttgaaaaaaataatcgatcccaactctgtgctctgatgtacctcttctgccccttttatgacacctttgaccaaatgccttctatggttcacagtgcaggcacaaaactacctctgatacagaagggttctttacaagcttattttacataccgtgaatccctcacctaaagggagaggtgaaagcaaagactgctttgaatgggtattgagggagattgtgtccataccaagccaccctgaagaagtatttcacttgcagtagaactgtggatttgtgctgtcatttcaccttggaataaacacctatctctaagcaggaccaagaatgacttgcaatctatatgtaatggctacttacttattcaataaagttaagatatacgttt

SEQ ID NO: 70911 - DNA, 359 bp, Homo Sapiens
aaaatgctcatgtcttattccaagcaccttcctccaaagtccccataaagctgcatctccaacacattgttatgccaataaggttttatttaactttatttaaggatgattgtgtctttgaatgacaaatgtactgctgcttcctacctgcaagacgcacaatgtatgtttcaagggtgagcaagtgttatttcttaaatttctcaaatgcctgtagtaactattgtttctgcctctcaattgttgccagctctttgaagaaggggagaattgtgtgtttttgtgtggggatgtttctgatatgctgctacagttgcaaaacactggagctagagaaaataaagtactgatcttcgaaa

SEQ ID NO: 70912 - DNA, 1630 bp, Homo Sapiens
  misc_feature (82)..(117): n is a, c, g, or t
atattatacatcatcatagggcgctagtcgcgtttttcgaacgacagagcgcagcgagtcagtgagctgaggaagcggccgnnnnnnnnnnnnnnnnnnnnnnnnnnnnnnnnnnnncagtcgacggtaccggacatatgcccgggaattcggccattacggccggggggagtcgttggcgctgtcatggcgggtgtgctgaagaagaccactggccttgtgggattggctgtgtgcaatactcctcacgagaggctaagaatattgtacacaaagattcttgatgttcttgaggaaatccctaaaaatgcagcatatagaaagtatacagaacagattacaaatgagaagctggctatggttaaagcggaaccagatgttaaaaaattagaagaccaacttcaaggcggtcaattagaagaggtgattcttcaggctgaacatgaactaaatctggcaagaaaaatgagggaatggaaactatgggagccattagtggaagagcctcctgccgatcagtggaaatggccaatataattattaagtgactttggtgtgttcatgggaaactgatgtaattaaatattctgttatattaagagcgtgttcttattactgacattttgtaatcaagaaaagtgatatagaaaatatgtaggagactgttaaaattggtgattatggtaatatggtcatgtgaatcaatttttgatttataaagtactcacacaagttgtttcaaagatgatatttctgtgaacagagaggccatgggaagatttgaaaaattattaaagaaaaattcctacagattttcaatgcagagaccataatcaaaaagtaaactttctttagtagtatgttcaatacatcatttaatttttttagttatccctgaagaaggaaaggtccttaattattatagtctaaacaaatttatagattactgtttgaagtaaataatacgagtgaatattttcaaatgtgataaaatagcacaagtggctggtgataaaatttgaaattatggttaacctcagctgtgatcttatgtatgtaaagtgaaatttaaatagataattataggttgattacaaaatccatagtgtcattttattttagtcattattgaattataccatttactctgttttcttatagtcttaattttattatattttgttgttactgtattatatttgaaaaccttcaaattagaatacattgtacagttaaagaaattgacttggtacttaaaagaaagatttcccattgcatacaggttattggagaaattttccttttgttgcatttgtggaagttagttttctggcccgtggcctttaattttcttaatcaacctaattacatcaggatagaggtagagtttctgtaaaagaagagacattaagagttcctgaaatttatatctggcatacggataggcttatattcaaaacatcttagtcatacgaccataaattaaaagtggagtcactaaatagtttgcagtacgtttctaatataagtgtaggtgggtatcaaaacaagacaaatgctgttcagggaaagaagttggcaagcttaaggttaaacaaaaataaaattacatgtgttttcgccttcctaa

SEQ ID NO: 70913 - DNA, 1328 bp, Homo Sapiens
  misc_feature (134)..(134): n is a, c, g, or t
  misc_feature (158)..(158): n is a, c, g, or t
  misc_feature (161)..(161): n is a, c, g, or t
  misc_feature (174)..(574): n is a, c, g, or t
  misc_feature (581)..(581): n is a, c, g, or t
  misc_feature (603)..(603): n is a, c, g, or t
  misc_feature (635)..(659): n is a, c, g, or t
  misc_feature (768)..(791): n is a, c, g, or t
  misc_feature (1243)..(1251): n is a, c, g, or t
cttccgaagagagcgacagttccgtagcgcagtcgaacagagacgcagaggactccaggggaacgctgaatttttgtctgtccgtttcccacctctgactgagctcgatttgtgtgctcgtcagggggccgacntatggaaaacgccagcacgcgccnttntacgttcgtgccnnnnnnnnnnnnnnnnnnnnnnnnnnnnnnnnnnnnnnnnnnnnnnnnnnnnnnnnnnnnnnnnnnnnnnnnnnnnnnnnnnnnnnnnnnnnnnnnnnnnnnnnnnnnnnnnnnnnnnnnnnnnnnnnnnnnnnnnnnnnnnnnnnnnnnnnnnnnnnnnnnnnnnnnnnnnnnnnnnnnnnnnnnnnnnnnnnnnnnnnnnnnnnnnnnnnnnnnnnnnnnnnnnnnnnnnnnnnnnnnnnnnnnnnnnnnnnnnnnnnnnnnnnnnnnnnnnnnnnnnnnnnnnnnnnnnnnnnnnnnnnnnnnnnnnnnnnnnnnnnnnnnnnnnnnnnnnnnnnnnnnnnnnnnnnnnnnnnnnnnnnnnnnnnnnnnnnnnnnnnnnnnnnnnnnnnnnnnnnnnntggcccntcgaggcccaagaattcggcancgagggttggagcggccgctggcttgtaggcnnnnnnnnnnnnnnnnnnnnnnnnntgagacattccccgcgctcctcactcctgcctctccacgctgccccgtccctctcccccaacagggaggaggtcggattaggggaggttcagaggaggagaatgtctcnnnnnnnnnnnnnnnnnnnnnnnnccagagccactcctttaatacagaaacttcattgaaaaaacctagccctgtacagctgcccttttaaagaggtggccattgcagggtctctgcctccccagcaggtggcagatgctcccggccactcgtttaaataactgtcccctggagggggccggggtttgaaggcagggcccctgccaccctcctgggggacacccgtgcatgtttacgccttttctggttgtgtcagtggccggagcatggcagctgggcatcaataaacacctccgaggaagctggactcgtgtgtgctggcacggggagggcgccgggcggggccgttggtgggcatggcgtgatgtcacggtcactccgggatgtcgatcaccaggtcatcgtctccatccaaggcatcgtccccgctacctgcatcgctgaacatctgccgagggaccgtgctcaggatcgtnnnnnnnnncatcttagggggtggtaagggggtcaaggttgtcccgaccccagccccagaaccccggccagggaaggtcagcggcc

SEQ ID NO: 70914 - DNA, 820 bp, Homo Sapiens
gtatttaccgtgctagttctcttctacacctactctgtctctcaagccattttgccactcgcttccctgccatctggcccttccctttgtctcagtgggatagatggattgtgaaatggaatctcccagaacccctgccctggcagcctggaagaccgtgcctgcccagccctcgtcaccacagggactccttgggtcctggcagtgcatgtgccagcaggcaggacaaactctgtgtacctgtgcccaggtgaatgggcgcagggtcctcttgccctgtcctgcggggggccccacgagttcctggcattcagcactgcttagcattctcggaaggtttcttcaactgcttgcttttcccaggcttgcctttagtgtcatgtaagacatttttaagttatatttattttgttgggttttaaaattgcacagaacactaagaccgaaaggctggactcttgtttctccttgaaagctttgcctttgttttgaacttcctttcccacttggtagaaagagcccagaagcagccctggccctgtaagatggactctttcatccttcagttgtatttagctttgagtttctctgcatctgtccaccccatgtgtatataacccagcccctggctctggggtggtcacctcgtcagtgccttttgttctggaggagaggaccccccccgcctgccgagaggctctcttcctgttctgcacccctctccccatgggaccttggagaaaactgaactgttacaaacccctgcacagtgcctgtcaaacagatgcaaaccttcctgaataaagccttgggaggacca

SEQ ID NO: 70915 - DNA, 730 bp, Homo Sapiens
  misc_feature (477)..(498): n is a, c, g, or t
gggactaaggaccgagcaccaaataaccaaggaaaaggaagcgagttaaggacgtactcgtcttggtgagagcgtgagctgctgagatttgggagtctgcgctaggcccgcttggagttctgagccgatggaagagttcactcatgtttgcacccgcggtgatgcgtgcttttcgcaagaacaagactctcggctatggagtccccatgttgttgctgattgttggaggttcttttggtcttcgtgagttttctcaaatccgatatgatgctgtgaagagtaaaatggatcctgagcttgaaaaaaaactgaaagagaataaaatatctttagagtcggaatatgagaaaatcaaagactccaagtttgatgactggaagaatattcgaggacccaggccttgggaagatcctgacctcctccaaggaagaaatccagaaagccttaagactaagacaacttgactctgctgattcnnnnnnnnnnnnnnnnnnnnnnaaataaaaatactattaactggacttcctaatatatacttctatcaagtggaaaggaaattccaggcccatggaaacttggatatgggtaatttgatgacaaataatcttcactaaaggtcatgtacaggtttttatacttcccagctattccatctgtggatgaaagtaacaatgttggccacgtatattttacacctcgaaataaaaaatgtgaatactgctccaaaaaa

SEQ ID NO: 70916 - DNA, 988 bp, Homo Sapiens
  misc_feature (878)..(921): n is a, c, g, or t
gatgaaaatgagaatgaagaaatggaagaatttgaagaagggccctgtggatgtccagacttccctccagggctaccactgaagctactgaagaaaatgaacatgatgaacaggtcctacaacgtgactttaaaaagacagcagaaagcaaaaatgtcccattggaacgagaagccactagtaaaaatgaccaaaataactgtcctgtgaaaccctgttacctcaatatcttggaagatgagcaacctttaaatagtgctgcccataaggagtcacctcctactgttgattcaactcaacagcctaaccctttgccgttacgtttacctgaaatggaacccttagtgcctagagtcaaagaagttaaatctgctcaggaaactcctgaaagctctctggctggaagtcctgatactgaatctccagtgttagtgaatgactatgaagcagaatctggtaatataagtcaaaagtctgatgaagaagattttgtaaaagttgaagatttaccactgaaactgacaatatattcagaggcagatctaagaaagaaaatggtagaagaagaacagaaaaaccatttatctggtgaaatatgtgaaatgcagaccgaagaattagctggaaattctgagacactaaaagaacctgaaacggtgggagcccagagtatatgagatgtcttcagaggctcatctaactctgtccttacatactcaatgcatatatgaaaacaatactaaataaacatctgatctgtataaaaatgtaaattagtttgacactgcttttttgataggtgtggtcatttctccccatggtagtttaaaacatcagaaactgaattctggacagatttaagccttgacacactgtgnnnnnnnnnnnnnnnnnnnnnnnnnnnnnnnnnnnnnnnnnnnnccccattgtgatgtttggtaacgaatttaaaatgtagttttaaataaagtttggacttatctataaa

SEQ ID NO: 70917 - DNA, 3351 bp, Homo Sapiens
  misc_feature (69)..(69): n is a, c, g, or t
  misc_feature (84)..(85): n is a, c, g, or t
  misc_feature (107)..(109): n is a, c, g, or t
  misc_feature (117)..(117): n is a, c, g, or t
  misc_feature (119)..(119): n is a, c, g, or t
  misc_feature (127)..(128): n is a, c, g, or t
  misc_feature (134)..(135): n is a, c, g, or t
  misc_feature (143)..(144): n is a, c, g, or t
  misc_feature (161)..(161): n is a, c, g, or t
  misc_feature (2703)..(2732): n is a, c, g, or t
  misc_feature (2734)..(2742): n is a, c, g, or t
acggactggagcagccagccagaggtctatgttgatgcgagtgacatgcggccgcataagcgttcgtanttagcagtacattanntacgaagttacttccagtcgannncggtaccngngcacatanntgcccnngggaagtnntcgtgccccagttaccngtgcctggggaaaacgcggcagacagcacagacagattgacctattggggtgtttcgcgagtgtgagagggaagcgccgcggcctgtatttctagacctgcccttcgcctggttcgtggcgccttgtgaccccgggcccctgccgcctgcaagtcggaaattgcgctgtgctcctgtgctacggcctgtggctggactgcctgctgctgcccaactggctggcaagatgaagctctccctggtggccgcgatgctgctgctgctcagcgcggcgcgggccgaggaggaggacaagaaggaggacgtgggcacggtggtcggcatcgacctggggaccacctactcctgcgtcggcgtgttcaagaacggccgcgtggagatcatcgccaacgatcagggcaaccgcatcacgccgtcctatgtcgccttcactcctgaaggggaacgtctgattggcgatgccgccaagaaccagctcacctccaaccccgagaacacggtctttgacgccaagcggctcatcggccgcacgtggaatgacccgtctgtgcagcaggacatcaagttcttgccgttcaaggtggttgaaaagaaaactaaaccatacattcaagttgatattggaggtgggcaaacaaagacatttgctcctgaagaaatttctgccatggttctcactaaaatgaaagaaaccgctgaggcttatttgggaaagaaggttacccatgcagttgttactgtaccagcctattttaatgatgcccaacgccaagcaaccaaagacgctggaactattgctggcctaaatgttatgaggatcatcaacgagcctacggcagctgctattgcttatggcctggataagagggagggggagaagaacatcctggtgtttgacctgggtggcggaaccttcgatgtgtctcttctcaccattgacaatggtgtcttcgaagttgtggccactaatggagatactcatctgggtggagaagactttgaccagcgtgtcatggaacacttcatcaaactgtacaaaaagaagacgggcaaagatgtcaggaaagacaatagagctgtgcagaaactccggcgcgaggtagaaaaggccaaacgggccctgtcttctcagcatcaagcaagaattgaaattgagtccttctatgaaggagaagacttttctgagaccctgactcgggccaaatttgaagagctcaacatggatctgttccggtctactatgaagcccgtccagaaagtgttggaagattctgatttgaagaagtctgatattgatgaaattgttcttgttggtggctcgactcgaattccaaagattcagcaactggttaaagagttcttcaatggcaaggaaccatcccgtggcataaacccagatgaagctgtagcgtatggtgctgctgtccaggctggtgtgctctctggtgatcaagatacaggtgacctggtactgcttgatgtatgtccccttacacttggtattgaaactgtgggaggtgtcatgaccaaactgattccaaggaacacagtggtgcctaccaagaagtctcagatcttttctacagcttctgataatcaaccaactgttacaatcaaggtctatgaaggtgaaagacccctgacaaaagacaatcatcttctgggtacatttgatctgactggaattcctcctgctcctcgtggggtcccacagattgaagtcacctttgagatagatgtgaatggtattcttcgagtgacagctgaagacaagggtacagggaacaaaaataagatcacaatcaccaatgaccagaatcgcctgacacctgaagaaatcgaaaggatggttaatgatgctgagaagtttgctgaggaagacaaaaagctcaaggagcgcattgatactagaaatgagttggaaagctatgcctattctctaaagaatcagattggagataaagaaaagctgggaggtaaactttcctctgaagataaggagaccatggaaaaagctgtagaagaaaagattgaatggctggaaagccaccaagatgctgacattgaagacttcaaagctaagaagaaggaactggaagaaattgttcaaccaattatcagcaaactctatggaagtgcaggccctcccccaactggtgaagaggatacagcagaaaaagatgagttgtagacactgatctgctagtgctgtaatattgtaaatactggactcaggaacttttgttaggaaaaaattgaaagaacttaagtctcgaatgtaattggaatcttcacctcagagtggagttgaaactgctatagcctaagcggctgtttactgcttttcattagcagttgctcacatgtctttgggtgggggggagaagaagaattggccatcttaaaaagcgggtaaaaaacctgggttagggtgtgtgttcaccttcaaaatgttctatttaacaactgggtcatgtgcatctggtgtaggaagttttttctaccataagtgacaccaataaatgtttgttatttacactgnnnnnnnnnnnnnnnnnnnnnnnnnnnnnngnnnnnnnnntaaaaatttcccccggggggcccagtttagggttccccggtttttttgccccaagggggcccctatgggggtcgtataataggcagggcaggggccgtgttttaccacgcgtgcgtgcgggggagcacccggctcgctggggcccttgggggagggaacccctaaccttcggcgggggcccatattggcccccctcaccctacagagtttaagcggtcctcagggtcaatttacactctcacgtgttacggtctacccacgcgaattgctggcgtggaagtcggtcccaggtttgttctgagcatcttcaccacgggctgccgccacaaaacaacagggaacagaaaccaatagagccacggagaggaacaacgagaactatagagccaagaggtataccagaggcacaagccagtcaaaaggaccagggacatggagagaaacacattctttgcacgccagcagacagagacgagacagcaaagaacagaaaccacgaacccaacaggaaaccaatcaaaacacgcaagacctcagccgaacaaacagcatcttacaagagagatcactaccaactcagcagacgagacaaacacaagagacaaaccg

SEQ ID NO: 70918 - DNA, 724 bp, Homo Sapiens
tcggatggtacgtttacttggaagtgttggcctaaaacccatagttcctgatggaggatacttcatcatcgctgatgtgtctttgctagatccagacctctctgatatgaagaataatgagccttatgactataagtttgtgaaatggatgactaaacataagaaactatcagccatccccgtttcagcattctgtaactcagagactaaatcacagtttgagaagtttgtgcgtttttgcttcattaaaaaagacagcacactggatgctgctgaagaaatcatcaaggcatggagtgtacagaagtcttgatttgtgcagaatggattaatgtttctgttagatgacctagtatggaattgttacttagtgctgccacctgctggatgttaaaaggtatttcagtacaactggaatttaaatatttccattgtttttccaaagcagttaacccaactcctaacaacattttcgggggatctgaccttttttttccagttgaaatgtattaacacaccttccacaatcattttataagagtcagcataacatagtggataagaaatgtgagatgtttaacctctcagtaactcggttctctcattataaaataggaataaaatcagtacctgtttcatatgaaggtcgtttctgagaattaaatggactaatgtatgcaaaaagcctggcaaacaataaacactcatctgactttaaaaaaaa

SEQ ID NO: 70919 - DNA, 1095 bp, Homo Sapiens
gcctacccctatactggtccggtccggattcccgggatctgcagtcaaccatgagggtgatcagaggccagtgaaggcttatgggcaggggatgcagagaaaatggctcatgggaagaaggggcctccaattttcctttgccctcccgggctctgtgtctagccatgtaaggaagtggagacagattcctgtctctaatccagacctgagaatgcttgaattctcaaagtcctcctagctgggaccttgggagtgtcacctgctgtaagacttgagtggcctgactgggtggttgtgaggatgcaaggagaaaaggtgcaccaaggtgcttcctaagtcggggagaccattcctgggagccacgtgactgacccccaccatggctctttccctccaactcgtgctgatagctggccgctgggaggccgtccccagtgagatcctcagaccctgcacagccctgagtggcttcacatctcttggtcagtgtcttcattctccccagtcagggacctgggatgtttgttacttctagaagcccttcctcaccctcataatggaccttagccccttgctggtcccactcacatcccgtctccattgctgtctgagttccaagactgagtttcttcaagcatccacttgtgctaccaggctgagaagttctgaggatgtgaccccatctgggcatcatttaaccaataaaatttctccaaatggaccatatcaagaaagcgtgaaccttatgttccctatttccagcgataccccaggcgtggcctctttaaatacccacacgtcaacccccatccccttcgcccaacgcccgaccccatctctgcgcacgcggcctatggtggccttaataaaccggcccgatcaagattaaagactatggtcccgccccctcacaacttatcgagacccctcagaaactatatcatacaaggggcttcccagtcttcccgctgacggtcaacgtataaacgattacacgccacaaaaccggtagtaacaacagtaaagagaggtcattaaccttgacaatttcgctcatctcgaacctcgggcatgcacgttcaccgcaccttgcgt

SEQ ID NO: 70920 - DNA, 758 bp, Homo Sapiens
ttcggctaggtagcgaggctgggtgttgaattcggcacgagggtcatggagggagcaggagctggatccggcttccggaaggagctggtgagcaggctgctgcacctgcacttcaaggatgacaagaccaaagtgagcggggacgcgctgcagctcatggtggagttgctgaaggtcttcgttgtggaagcagcagtccgcggcgtgcggcaggcccaggcagaagacgcgctccgtgtggacgtggaccagctggagaaggtgcttccgcagctgctcctggacttctagggatctcagccgtggctgaggccacccccagaggagcccctggtccacagaagcaggccttgtgtttccagcggcctctgataagaggcagggaaggacctgaaggatttggagttgattcaaacaagatctctgggagtctccagcctgtgcagaaggggcaggactgcagtgcactgcgggccttggagtgtccagtggggacactggtgtgggaaggggcagcacctggggagtccctgcctctcctccctgggacaatagtgtgcatgccacccggggtcctacaggcaggtgctgggaaaggcctggccagcaggtagcctgtgtgtttgacaaaaagcagctggcagcgctgcctctgcccacattcctgccacccgacatcaaagctggcgtgtgacctttccagccatgcgatattccccttggaagatgcttccccaggctataaatttgttctcaca

SEQ ID NO: 70921 - DNA, 733 bp, Homo Sapiens
ggggttgaggctgcggtcatggagggagcaggagctggatccggcttccggaaggagctggtgagcaggctgctgcacctgcacttcaaggatgacaagaccaaagaagcagcagtccgcggcgtgcggcaggcccaggcagaagacgcgctccgtgtggacgtggaccagctggagaaggtgcttccgcagctgctcctggacttctagggatctcagccgtggctgaggccacccccagaggagcccctggtccacagaagcaggccttgtgtttccagcggcctctgataagaggcagggaaggacctgaaggatttggagttgattcaaacaagatctctgggagtctccagcctgtgcagaaggggcaggactgcagtgcactgcgggccttggagtgtccagtggggacactggtgtgggaaggggcagcacctggggagtccctgcctctcctccctgggacaatagtgtgcatgccacccggggtcctacaggcaggtgctgggaaaggcctggccagcaggtagcctgtgtgtttgacaaacagcagctggcagcgctgcctcctgcccacattcctgccacccgacatcaaagctggcgtgtgacctttccagccatgcgatattccccttggaagatgcttccccaggctataaatttgttctcacaaagcaacatcaataaatcaaaactgtctctcccagaaaaaatagacagcgatcac

SEQ ID NO: 70922 - DNA, 1078 bp, Homo Sapiens
  misc_feature (985)..(985): n is a, c, g, or t
tggctaggtacgaggctgggtgttgaattcggccgaggcacaagttgagcagtagctgtgagttgctggcgctggagcgattcggtggcacgtggagccacggcgtgggagtagggggctgaaggcaggcagcagcggccagggccgccctctgctagccgcttgggtctcgggataccccgtttcttcctgtaggtgtgggacgtgcgtgcggcgagatggacactcccccgctctcggattcggagtcggaatccgatgaatcccttgtcacagacagagagttgcaggatgcgttttcccgagggcttctgaagccaggcctcaatgtcgtgctagaggggccgaagaaggccgtgaacgacgtgaatggcctgaagcaatgtttggcagaattcaagcgggatctggaatgggttgaaaggctcgatgtgacactgggtccggtaccggagatcggtggatctgaggcgccagcacctcagaacaaggaccagaaagctgttgatccagaagacgacttccagcgagagatgagtttctatcgccaagcccaggccgcagtgcttgcagtcttaccccgcctccatcagctcaaagtccctacgaagcgacccactgattattttgcggaaatggccaaatctgatctgcagatgcagaagattcgacagaagctgcagactaaacaggctgccatggagaggtctgaaaaagctaagcaactgcgagcacttaggaaatacgggaagaaggtgcaaacggaggttcttcagaagaggcagcaggagaaagcccatatgatgaatgctattaagaaatatcagaaaggcttctctgataaactggatttcctttgagggagatcagaaacctctggcacaggcggcagaaggcaggagcccaaaggccagcagaatgagggaagggggcccagttgctaaaacgacgggtattaaaaacccagaaggttttgggttttggnttgggaaaggaaaaaagaggctccaaagtgggaaacccttccggggaaaaaccttatgaatggatggtaatcctaggcttttcccggggccca

SEQ ID NO: 70923 - DNA, 1340 bp, Homo Sapiens
gtgagttgctggcgctggagcgattcggtggcacgtggagccacgtgcgtgggagtagggggctgaaggcaggcagcagcggccaggccgccctctgctagccgcttgggtctcgggataccccgtttcttcctgtaggtgtgggacgtgcgtgcggcgagatggacactcccccgctctcggattcggagtcggaatccgatgaatcccttgtcacagacagagagttgcaggatgcgttttcccgagggcttctgaagccaggcctcaatgtcgtgctagaggggccgaagaaggccgtgaacgacgtgaatggcctgaagcaatgtttggcagaattcaagcgggatctggaatgggttgaaaggctcgatgtgacactgggtccggtaccggagatcggtggatctgaggcgccagcacctcagaacaaggaccagaaagctgttgatccagaagacgacttccagcgagagatgagtttctatcgccaagcccaggccgcagtgcttgcagtcttaccccgcctccatcagctcaaagtccctacgaagcgacccactgattattttgcggaaatggccaaatctgatctgcagatgcagaagattcgacagaagctgcagactaaacaggctgccatggagaggtctgaaaaagctaagcaactgcgagcacttaggaaatacgggaagaaggtgcaaacggaggttcttcagaagaggcagcaggagaaagcccatatgatgaatgctattaagaaatatcagaaaggcttctctgataaactggatttccttgagggagatcagaaacctctggcacagcgcaagaaggcaggagccaaaggccagcagatgaggaaggggcccagtgctaaacgacggtataaaaaccagaagtttggttttggtggaaagaagaaaggctcaaagtggaacactcgggagagctatgatgatgtatctagcttccgggccaagacagctcatggcagaggcctcaagaggcctggcaagaaagggtcaaataagagacctggaaaacgaacaagagagaagatgaagaacagaacacactaaatagcatctttgaatacaaagaaccaagaaaaaggaatgaagactcgcaatttcacgacacactttgatcccttctgttggtgtcatgttgtaaacatttctttcaataaactaaagaaaaattattaaaggaacacatacctttggttaaatagtctagactaaaagattgagaagttactttccattgctatctattgataatttagacattgagttcaaattgccttcattttatgataaataatgatttaactg

SEQ ID NO: 70924 - DNA, 947 bp, Homo Sapiens
  misc_feature (710)..(710): n is a, c, g, or t
acatacggtcctaagtagcgaggcctgggtggcgaattcggcacgaggcgattcggtggcacgtggagccacggcgtgggagtagggggctgaaggcaggcagcagcggccagggccgccctctgctagccgcttgggtctcgggataccccgtttcttcctgtaggtgtgggacgtgcgtgcggcgagatggacactcccccgctctcggattcggagtcggaatccgatgaatcccttgtcacagacagagagttgcaggatgcgttttcccgagggcttctgaagccaggcctcaatgtcgtgctagaggggccgaagaaggccgtgaacgacgtgaatggcctgaagcaatgtttggcagaattcaagcgggatctggaatgggttgaaaggctcgatgtgacactgggtccggtaccggagatcggtggatctgaggcgccagcacctcagaacaaggaccagaaagctgttgatccagaagacgacttccagcgagagatgagtttctatcgccaagcccaggccgcagtgcttgcagtcttaccccgcctccatcagctcaaagtccctacgaagcgacccactgattattttgcggaaatggccaaatctgatctgcagatgcagaagattcgacagaagctgcagactaaacaggctgccatggagaggtctgaaaaagctaagcaactgcgagcacttanggaaataccgggaagaaggtgcaaacggaggtttctttcacaaagaggcagccaggagaaagcccatatgatgaatggctattacagaaatatccggaaagggctttctctggataaacctgggattttcccttgaaggggagaatctcaaaaaccttcttgggcaccagccgccaagaaagggcaaggaagccccaaaaaggcccacgcccactaatgaagggaaaggcgggccca

SEQ ID NO: 70925 - DNA, 452 bp, Homo Sapiens
ctcgctggaagtcgtcttctggatcacagctattctggtccttgttctgaggtgctggcgcctcagatccaccgatctccggtccgtgacccagtgtcacatcgagcctttcaacccattccagatcccgcttgaattctgccaaacattgcttcaggccattctaggaaatccagacactgagctcacaagaagggaactctgagtttgtctttcccaagcacaggctgttaggcgaagggacaaagtgctaatccccaatacccagacaggtaattgaccctcttggcgaggcgcagggtgcatctttcctgggacaagaatcggtctcccaagcccaacagcgcctgaagcgcataccatgtccgagtacccccgaccctgtgcccacgctcaacacgacgttcacggccttcttcggcccctctagcacgacatatcctagagagtcg

SEQ ID NO: 70926 - DNA, 1626 bp, Homo Sapiens
  misc_feature (1431)..(1522): n is a, c, g, or t
aacaacacccaccccccccacataatgcccctataggtcctaagtagcgaggcctgggtggcgattcaaagcacgaggcagcggcgctggagctttccccagacgaggcggtggaggttgaggaggttattgaggagtcccgcgcagagcgtatcaagcgcagcggcctgcggcgcgtggacgacttcaagaaggccttctccaaggagaagatggagaagaccaaggtgcgtacccgcgagaacctggagaagacgcgcctcaagaccaaggaaaacctggagaagacgcggcacaccctggagaagcgcatgaacaagctgggcacgcgcctggtgcccgccgagcggcgcgagaaactgaagacgtcgcgggacaagttgcgcaaatccttcacgcccgaccacgtggtgtacgcgcgctccaagaccgcggtctacaaggtgccacccttcaccttccacgtcaagaagatccgcgagggccaggtggaagtgctcaaggccaccgagatggtggaggtgggcgccgacgacgacgagggcggcgcggagcgcggggaggccggcgacctgcggcgcgggagcagccccgacgtgcacgcgctgctggagatcaccgaggagtcggacgccgtgctggtggacaagagcgacagcgactgagccgcccccgctgccacccaccccattcctcgctccttccgaacttcctctttcgcattctctctcggctcgagctggctgagatttttctaaattgaaaacacgcccccctccccacacctccaggaactccactcccagtcttagagctgttaggacccgatggggaggcagcccccgcagtggacagcccccgcttggacacagtccgagtggaatgggaagggaatggtcaatccctgtcctggttgtccaagtcgggatctcagaggaaattgcagtgattccacggttaggcccccctgggggggctgccttcccctcagcctctccccacaccacccacccagctgctgtcattccgctcactgagctcttcttcattctcaccctgatccctgggggactcaaagccaaaactgcccaaagaggaaagattgaatcctaaaggggatccttgcccccatgggaggccccctactagaaggacgtgaaagcagcttttgggggaaactgaggcagtggggaagacagagcagaatgagccctcaccctggctgggggtccagcacaggctgtatctgcagagggtcccagaggaacgctggagccaagagaagccctgggaaggaggggtggggaacgacatgcatgtgagggatggcacactgatgtgtttatgcacctgtacacaggagcgcatggccatggctttggaaaggagaatggaaaaatagaagaaggtcggccgggcttggtggcttannnnnnnnnnnnnnnnnnnnnnnnnnnnnnnnnnnnnnnnnnnnnnnnnnnnnnnnnnnnnnnnnnnnnnnnnnnnnnnnnnnnnnnnnnnntaagcgaaaacccatctctactaaaattacaaaaattagctgggcatggttgcgcatgcctgtaatcccagctactttggaggctgaggtggggagaattgctt

SEQ ID NO: 70927 - DNA, 969 bp, Homo Sapiens
  misc_feature (831)..(831): n is a, c, g, or t
aaggaagcgaggcctgggtggcgaattcggcacgagggctctccgctctcgcccgctagctctcctcccttccgctcctgcttctctccgggtctcccgctccagctccagccccacccggccggtcccgcacggctccgggtagccatggaggaccccacgctctatattgtcgagcggccgcttcccgggtaccccgacgccgaggccccggagccttcctccgctggggctcaggcagcggaggagccgtcgggggccggctcagaagagctgatcaagtcggaccaggtgaacggcgtgctggtgctgagcctcctggacaaaatcatcggggccgtagaccagatccagctgactcaagcacagctggaggagcggcaggcggagatggagggcgcagtgcagagcatccagggcgagctgagcaagctgggcaaggcgcacgccaccacgagcaatacggtgagcaagctgctggagaaggtgcgcaaggtcagcgtcaacgtgaagaccgtgcgcggcagcctggagcgccaggcggggcagatcaagaagctggaggtcaacgaggccgagctgctgcggcgccgcaactttaaagtcatgatctaccaggatgaagtgaagctgccggccaaactgagcatcagcaaatcgctgaaagagtcggaggcgctgccagagaaagagggcgaggagctgggcgagggcgagcggcccgaagaggacgcagcggcgctggagctttcctcggacgaagcggtggaggttgaggaagttattgaggagtcccgcgcagagcgtatcaagccgcaacggcccggcggngcgcgtgggaccgacttcaaagaaggcccttctcccagggagaaagatggaagaaaaaccaaaggggcgctaccccggcgaaaaaaccctgggaagaaaaaccccgcccttccaaggaacaaaggggaaaaaaccttc

SEQ ID NO: 70928 - DNA, 910 bp, Homo Sapiens
  misc_feature (682)..(682): n is a, c, g, or t
caaggaagcgaggcctgggtggcgaattcggcacgaggccgctctcgcccgctagctctcctcccttccgctcctgcttctctccgggtctcccgctccagctccagccccacccggccggtcccgcacggctccgggtagccattgaggaccccacgctctatattgtcgagcggccgcttcccgggtaccccgacgccgaggccccggagccttcctccgctggggctcaggcagcggaggagccgtcgggggccggctcagaagagctgatcaagtcggaccaggtgaacggcgtgctggtgctgagcctcctggacaaaatcatcggggccgtagaccagatccagctgactcaagcacagctggaggagcggcaggcggagatggagggcgcagtgcagagcatccagggcgagctgagcaagctgggcaaggcgcacgccaccacgagcaatacggtgagcaagctgctggagaaggtgcgcaaggtcagcgtcaacgtgaagaccgtgcgcggcagcctggagcgccaggcggggcagatcaagaagctggaggtcaacgaggccgagctgctgcggcgccgcaactttaaagtcatgatctaccaggatgaagtgaagctgccggccaaactgagcatcagcaaatcgctggaaagagtccgaggcgctgccanagaaggagggcgaggagctgggcgagggcgagcggcccgaggaggacgcagcggcgctggagctttcgtccgacgaggcgggtggaaggttaaggaggttatttgaggagccccgcgcagagcgtatcaagccgcagcggcctgcgggggcgtggaccacttccagaagggcttctcccagggagaaaaaggagaaaaacccgggggcgttaccccccaaaaccctgg

SEQ ID NO: 70929 - DNA, 1659 bp, Homo Sapiens
caaggtagcgaggcctgggtggcgccggtgcgcacggacgtggctcgagtttcctctgctctccgctctcgcccgctagctctcctcccttccgctcctgcttctctccgggtctcccgctccagctccagccccacccggccggtcccgcacggctccgggtagccatggaggaccccacgctctatattgtcgagcggccgcttcccgggtaccccgacgccgaggccccggagccttcctccgctggggctcaggcagcggaggagccgtcgggggccggctcagaagagctgatcaagtcggaccaggtgaacggcgtgctggtgctgagcctcctggacaaaatcatcggggccgtagaccagatccagctgactcaagcacagctggaggagcggcaggcggagatggagggcgcagtgcagagcatccagggcgagctgagcaagctgggcaaggcgcacgccaccacgagcaatacggtgagcaagctgctggagaaggtgcgcaaggtcagcgtcaacgtgaagaccgtgcgcggcagcctggagcgccaggcggggcagatcaagaagctggaggtcaacgaggccgagctgctgcggcgccgcaactttaaagtcatgatctaccaggatgaagtgaagctgccggccaaactgagcatcagcaaatcgctgaaagagtcggaggcgctgccagagaaggagggcgaggagctgggcgagggcgagcggcccgaggaggacgcagcggcgctggagctttcgtcggacgaggcggtggaggttgaggaggttattgaggagtcccgcgcagagcgtatcaagcgcagcggcctgcggcgcgtggacgacttcaagaaggccttctccaaggagaagatggagaagaccaaggtgcgtacccgcgagaacctggagaagacgcgcctcaagaccaaggaaaacctggagaagacgcggcacaccctggagaagcgcatgaacaagctgggcacgcgcctggtgcccgccgagcggcgcgagaaactgaagacgtcgcgggacaagttgcgcaaatccttcacgcccgaccacgtggtgtacgcgcgctccaagaccgcggtctacaaggtgccacccttcaccttccacgtcaagaagatccgcgagggccaggtggaagtgctcaaggccaccgagatggtggaggtgggcgccgacgacgacgagggcggcgcggagcgcggggaggccggcgacctgcggcgcgggagcagccccgacgtgcacgcgctgctggagatcaccgaggagtcggacgccgtgctggtggacaagagcgacagcgactgagccgcccccgctgccacccaccccattcctcgctccttccgaacttcctctttcgcattctctctcggctcgagctggcttgagatttttctaaattgaaaaaacggcccccctccccaaacctccaggaactccactccccgtctttaaagctgttaggaaccgaaagggggaggcacccccccgcaggggaaagccccccgctttggacccggtccgcacgggaaatggggaaggggaatggtccaatcccccggcccggggtgggcccaagcccgggtgctccagaaggaatttgccggggatttcccggggtagg

SEQ ID NO: 70930 - DNA, 2162 bp, Homo Sapiens
  misc_feature (130)..(150): n is a, c, g, or t
  misc_feature (1175)..(1196): n is a, c, g, or t
  misc_feature (1773)..(1806): n is a, c, g, or t
cagtcgacggtaccggacatatgcccgggaattcggccattacggccggggctataacaactactagacaccttcattttacggctgtggtatcggcagtttagggtatggagcaagtaatattgtgtgnnnnnnnnnnnnnnnnnnnnncttccatgtagcatctgcataccaaaggacttattctatgaaatactttaaaaattcctcatcagcaaaggacaattcaataaatacatccaaacatgatcatcgttggagccggaggtggcaggagtcgaggcgctgatccctaaaatggcgaacatgtgttttcatcatttcagccaaagtcctaacttcctgtgcctttcctatcacctcgagaagtaattatcagttggtttggatttttggaccaccgttcagtcattttgggttgccgtgctcccaaaacattttaaatgaaagtattggcattcaaaaagacagcagacaaaatgaaagaaaatgagagcagaaagtaagcatttccagcctatctaatttctttagttttctatttgcctccagtgcagtccatttcctaatgtataccagcctactgtactatttaaaatgctcaatttcagcaccgatggccatgtaaataagatgatttaatgttgattttaatcctgtatataaaataaaaagtcacaatgagtttgggcatatttaatgatgattatggagccttagaggtctttaatcattggttcggctgcttttatgtagtttaggctggaaatggtttcacttgctctttgactgtcagcaagactgaagatggcttttcctggacagctagaaaacacaaaatcttgtaggtcattgcacctatctcagccataggtgcagtttgcttctacatgatgctaaaggctgcgaatgggatcctgatggaactaaggactccaatgtcgaactcttctttgctgcattcctttttcttcacttacaagaaaggcctgaatggaggacttttctgtaaccaggaacattttttaggggtcaaagtgctaataattaactcaaccaggtctactttttaatggctttcataacactaactcataaggttaccgatcaatgcatttcatacggatatagacctagggctctggagggtgggggattgttaaaacacatgcaannnnnnnnnnnnnnnnnnnnnngaaattttgtatatataaccattttaatcttttataaagttttgaatgttcatgtatgaatgctgcagctgtgaagcatacataaataaatgaagtaagccatactggatttaattttatgggatgttatttcccctaagacctgaaaatgaacatagtatgctagttattttccagtggtaagcctttaactttcctcacacaatttggaatcatataatataaggtactttgtccctgattaaataatgtgacggatagaatgcatcaagtgtttattatgaaaagagtgggaaaagtatatagcttttagcaaaaggtgttggcccattctaaaaaaatgagacgaatatatagaaatagtgtgggcatttcttcctgttaggtggagtgtatgtgttgacatttctccccatctcttcccactctgttttctccccattatttgaataaagtgactgctgaagatgactttgaatccttatccacttaatttaatgtttaaagaaaaacctgtaatggaaagtgagactccttccctaatttcagtttagagcaacttgaagaagagtagacnnnnnnnnnnnnnnnnnnnnnnnnnnnnnnnnnnggcccaaagggattggcccaatattgattcttttttataaaacctcctttggcttagaaggaatgactctagctacaataatacacagtatgtttaagcaggttcccttggttgttgcattaaatgtaatccacctttaggtattttagagcacagaacaacactgtgttgatctagtaggtttctatttttcctttctctttacaatgcacataatactttcctgtatttatatcataacgtgtatagtgtaaaatgtgaatgactttttttgtgaatgaaaatctaaaatctttgtaactttttatatctgcttttgtttcaccaaagaaacctaaaatccttcttttactaaa

SEQ ID NO: 70931 - DNA, 943 bp, Homo Sapiens
gggggggacagcagagacaaggaggccatggccctggatggcacagcctatcaggggagcagctccacctgcatcctccaggagacctccctgtgatgttgactcaggaccccgcctctgtcctcactgtgccaggccatagccagaggccaccctgtagtacagggatgagtcttggtgcgttctgcagggacaggcctggatgatctagctcataccaaaggaccttgttctgagaggttcttgcctgcaggagaagctgtcacatctcaagcatgtgaggcaccgtttttctcgtcgcttgccaatctgttttttaaaggatcacgctcgtagggagcaggatcatgccagaaatagggatggaagtgcatcctctgggaaaaagataatggcttctgattcaacatagccatagtcctttgaagtaagtggctagaaacagcactctggttataattgccccagggcctgattcaggactgactctccaccataaaactggaagctgcttcccctgtagtccccatttcagtaccagttctgccagccacagtgagcccctattattactttcagattgtctgtgacactcaagcccctctcatttttatctgtctacctccattctgaagagggaggttttggtgtccctggtcctctgggaatagaagatccatttgtctttgtgtagagcaagcacgttttccacctcactgtctccatcctccacctctgagatggacacttaagagacggggcaaatgtggatccaagaaaccagggccatgaccaggtccactgtggagcagccatctatctacctgactcctgagccaggctgccgtggtgtcatttctgtcatccgtgctctgtttccttttggagtttcttctccacattatctttgttcctggggaataaaaactaccattggacctag

SEQ ID NO: 70932 - DNA, 1382 bp, Homo Sapiens
gggctctctccccaagatggctgctgaggacgagttacagctgccgcggctccccgagctgttcgaaactggtagacagttactggacgaagtagaagtggcgactgaacccgccggttcccggatagtccaggagaaggtgttcaagggcttggacctccttgagaaggctgccgaaatgttatcgcagctcgacttgttcagccgaaatgaagatttggaagagattgcttccaccgacctgaagtaccttttggtgccagcgtttcaaggagccctcaccatgaaacaagtcaaccccagcaagcgtctagatcatttgcagcgggctcgagaacactttataaactacttaactcagtgccattgctatcatgtggcagagtttgagctgcccaaaaccatgaacaactctgctgaaaatcacactgccaattcctccatggcttatcctagtctcgttgctatggcatctcaaagacaggctaaaatacagagatacaagcagaagaaggagttggagcataggttgtctgcaatgaaatctgctgtggaaagtggtcaagcagatgatgagcgtgttcgtgaatattatcttcttcaccttcagaggtggattgatatcagcttagaagagattgagagcattgaccaggaaataaagatcctgagagaaagagactcttcaagagaggcatcaacttctaactcatctcgccaggagaggcctccagtgaaacccttcattctcactcggaacatggctcaagccaaagtatttggagctggttatccaagtctgccaactatgacggtgagtgactggtatgagcaacatcggaaatatggagcattaccggatcagggaatagccaaggcagcaccagaggaattcagaaaagcagctcagcaacaggaagaacaagaagaaaaggaggaagaggatgatgaacaaacactccacagagcccgggagtgggatgactggaaggacacccatcctaggggctatgggaaccgacagaacatgggctgatcttcccacaacaccacaggactgcagggtgcacaactcccctgccaaggaaaaccatgcagtcctcccctccctggtctcctgcttcagctctgtacaacgagggcaaagatgctaaatcttgctttgcattcagtaaagtgtcaagtgattaagtgtgtatttgtaccctagatgatatgaaccagcagtcttgttttggcatcatcctcatcatgttgtattccagcttcttaagtggaaggaaaagagtgctgagaaatggctctgtataatctatggctatccgaattctctgaaaaaataataaaagtcccctctattatatgagcctgtacagaaaaaa

SEQ ID NO: 70933 - DNA, 604 bp, Homo Sapiens
atgttttagagcagttttcagcatgacactgttaacaagtgtgtattttccaaggccacatgaaacttactttcttagccactccaggtttgcgagcagaaaagctgaaaaacccttttgtgtagaagtctgagtggtttgtgggggggccttttttagagtttgcatgccagcgcacggcctattgctgtgaaacagagagaaggtaaagctacctgaggcagtgcgctggaggatgaagtgtttgatagcactaggggggaaagaaaatgcatggcaaagtttcgtcttctcgtagactatctagcatgcagagtgtagtgtgttgaaacggtgtatgacattgctgtatcaaagttgtaaaattaagcattatttattgaaaactatgtatttttttgtaaaaacctgatcacatagagaatatcagtggcttgtgcttgtgcttcgatctaaccagcttcttgacccacccccccttggtatgcagtgttaatgctcacgggttgaaaatagtacactccaatgtctcttttgcaagagtttttcacagaggattacatttgttcaaaagactctaataaaattgtgtgatcaatcttca

SEQ ID NO: 70934 - DNA, 776 bp, Homo Sapiens
ctacaagaagcttttagtatatgaaaattattactctttttggggtttaaagaaatggtctgcataacctgaatgaaagaagcaaatgactattctctgaagacaaccaagagaaaattgcaaaaagacaagtatgacttttatatgaaccccttctttagggtccagaaggaattgtggactgaatcactagccttaggtctttcagcaaacagcctatcagggccatttatcatgtgtgagatttgcattttactttgctgactttgttgtaatagatcccattcattgtcccctttggggtatttccaatacttgaatggcagattggagtttttcagagtatgtgtttcatctgctagtctttctctccttcatagcttttcttttcctggacttgctccttttgagttgcttttgcgtttctcatgcctaggcaagtgtaatagaaattatgtagctccttatgttggcaaaggagctctatatagtttcactttgtataaaagttaggaccagctgttgttacatgtaatattttagttcagaacttgacctgaaggaagggaagaaaagtatgtgatttttaccttttttaacaaaggtgaaaaagtcagttttagaaatttcgtggtagtaagttcggcatttgttacatgtataagagaagactaataatctctatttataactaaatcattgagatagaaaaagattcccattgactgtagacttcttcccattttgtcttccttctgcctgtttccccttcaggc

SEQ ID NO: 70935 - DNA, 1021 bp, Homo Sapiens
  misc_feature (31)..(31): n is a, c, g, or t
  misc_feature (44)..(44): n is a, c, g, or t
  misc_feature (72)..(72): n is a, c, g, or t
  misc_feature (78)..(78): n is a, c, g, or t
  misc_feature (99)..(99): n is a, c, g, or t
  misc_feature (102)..(102): n is a, c, g, or t
  misc_feature (116)..(119): n is a, c, g, or t
  misc_feature (135)..(135): n is a, c, g, or t
  misc_feature (142)..(142): n is a, c, g, or t
  misc_feature (149)..(149): n is a, c, g, or t
  misc_feature (161)..(162): n is a, c, g, or t
  misc_feature (165)..(165): n is a, c, g, or t
  misc_feature (180)..(180): n is a, c, g, or t
  misc_feature (200)..(200): n is a, c, g, or t
  misc_feature (215)..(215): n is a, c, g, or t
  misc_feature (228)..(229): n is a, c, g, or t
  misc_feature (245)..(246): n is a, c, g, or t
  misc_feature (268)..(270): n is a, c, g, or t
  misc_feature (303)..(304): n is a, c, g, or t
  misc_feature (317)..(318): n is a, c, g, or t
  misc_feature (347)..(347): n is a, c, g, or t
  misc_feature (350)..(350): n is a, c, g, or t
  misc_feature (357)..(357): n is a, c, g, or t
  misc_feature (363)..(363): n is a, c, g, or t
  misc_feature (367)..(367): n is a, c, g, or t
  misc_feature (375)..(376): n is a, c, g, or t
  misc_feature (385)..(385): n is a, c, g, or t
  misc_feature (392)..(395): n is a, c, g, or t
  misc_feature (403)..(403): n is a, c, g, or t
  misc_feature (406)..(408): n is a, c, g, or t
  misc_feature (410)..(412): n is a, c, g, or t
  misc_feature (416)..(417): n is a, c, g, or t
  misc_feature (421)..(422): n is a, c, g, or t
  misc_feature (424)..(432): n is a, c, g, or t
  misc_feature (434)..(436): n is a, c, g, or t
  misc_feature (438)..(454): n is a, c, g, or t
  misc_feature (456)..(470): n is a, c, g, or t
  misc_feature (480)..(480): n is a, c, g, or t
  misc_feature (488)..(496): n is a, c, g, or t
cgcggtccgcgcggccggcggggggcgcggnggcggctgcgtcncgccggccccgcgccggcggccctggcngcggcnggcgcgtcccgcggctcgtgntgncggttcgcttgctnnnnccgcgtcgctcggggnctgcgtnccgggcnggtggggcgggnnccntgggggggcgcgtcncctgcgtgcgggtgcgggcncgtggcccgcggggngccgccccgcgcnntgggtgctcccgcggnnggcggtgccccggcggcgcttnnnccggcgccggccccgcctcggggtcgccgggcnntgggcgcccgttnnggtttccgcgtccgctcccgtccgggccnccnttgtcgngcgtcngccntgggcccnngtggggggntggggtnnnnggggtggnggnnngnnngggnngtgnngnnnnnnnnngnnntnnnnnnnnnnnnnnnnncnnnnnnnnnnnnnnnaattccaatntttccctnnnnnnnnntttcctccccactacctgaggctccccagcctaaggaggagccgccagtgcctgaagcccccagctcggggcccccctcctcctcccctggaattgctggcctccttgaccccagaggccttctccctggacagctccctgcggggcaaacagcggatgagcaagcataactttctgcaggcccataacgggcaagggctgcgggccacccggccctctgacgaccccctcagccttctggatccactctggacactcaacaagacctgaacaggttttgcctacctggtccttacactacatcatcatcatctcatgcccacctgcccacacccagcagagcttctcagtgggcacagtctcttactcccatttctgctgcctttggccctgcctggcccagcctgcacccctgtggggtggaaatgtactgcaggctctgggtcaggttctgctcctttatgggacccgacatttttcagctctttgctattgaaataataaaccaccctgttctgtgaaaaa

SEQ ID NO: 70936 - DNA, 805 bp, Homo Sapiens
tccagctcggtaccactagtcacggttggctctgttgaaggctgtgcagtaatactccctcctgttccttgttagccttctgcttggtccaaaatgcctgggtggcatttgaggtcatttgatagaagggtttgccctctttttctctgtaaaacttataggtgatgggaccagatccttcattcacagcacattgcagcacaatgtcctctccagactccaccaccttacttgacaggatagaaatctggacctcatccaccggggctatcaccttcaccctcagaacctcacttaacattttggcgtgggaatggcaattatctgcaacacactggtattcgacgtcttcagtggggttgtctttgaataccgcaggatcatttgagttcttggtactattctccaaaactttacttgtttttaaaagttggtaagaaataggcaaagttccactgatcgattcgcaacggacttcgatggtctgtccttttatgacctcaaactgggcatcataagaaatcctgggctgggagagcatttcacatacgactatctggactgtgttgcttttcttgaccactttgtcaatacctgcagtgcagatatacgtcccactgtccgactttgaggctatcttggtgaaatcttgagtctgtgacacaatcgtatcttccttctggatggtgaagttggctggaggtgctcctgggatggagcaggacaggttcagtctttcaccttggtccagatatgtgaaggaagattccagttcgggcttgcaaaatagttctgaaataccagt

SEQ ID NO: 70937 - DNA, 1280 bp, Homo Sapiens
  misc_feature (86)..(120): n is a, c, g, or t
  misc_feature (697)..(780): n is a, c, g, or t
  misc_feature (888)..(939): n is a, c, g, or t
  misc_feature (962)..(981): n is a, c, g, or t
  misc_feature (1192)..(1220): n is a, c, g, or t
aaaatcgtatcgactcactatagggcgctagcgcgttatttcgaacgaccgagacgcagcgagtcagtgagcgaggaagcggccgnnnnnnnnnnnnnnnnnnnnnnnnnnnnnnnnnnncagtcgacggtaccggacatatgcccgggaattcggccattacggccgggggatattctgaaacttgaatattttgttttgtgcagagataaagaccttttccatgcaccctcatacacagaaaccaattttcttttttatactcaatcatttctagcgcatggcctggttagaggctggttttttctcttttcctttggtccttcaaaggcttgtagttttgggtagtccttgttctttggaaatacacagtgctgaccagacagcctccccctgtcccctctatgacctcgccctccacaaatgggaaaaccagactacttgggagcaccgcctgtgaaataccaacctgaagacacggttcattcaggcaacgcacaaaacagaaaatgaaggtggaacaagcacagatgttcttcaactgtttttgtctacactctttctcttttcctctaccatgctgaaggctgaaagacaggaagatggtgccatcagcaaatattattcttaattgaaaacttgaaatgtgtatgtttcttactaatttttaaaaatgtattccttgccagggcaggcnnnnnnnnnnnnnnnnnnnnnnnnnnnnnnnnnnnnnnnnnnnnnnnnnnnnnnnnnnnnnnnnnnnnnnnnnnnnnnnnnnnnatgaaaccctgtctctactaaaaatacaagaattggccgggcgtggtggcgcatgcctgtagtatcagctactcaagaggctgaggtgagattatcgcttgaacccannnnnnnnnnnnnnnnnnnnnnnnnnnnnnnnnnnnnnnnnnnnnnnnnnnntgacagagtgagaatccatctcnnnnnnnnnnnnnnnnnnnnttgcttgctaaagaagtggtctcctgaggtcttaagacattcctgacagtgtcttgagtgggtgggagagaggctgctgtcattgcgctgtggaatttcacagatgagaaccacgcctagccaaaatcacttttcctgtttgcctcagtgacacagctgcagggaccctcgtggatgttgtattaaataaatttgacctttgctctttgcnnnnnnnnnnnnnnnnnnnnnnnnnnnnngaccgcgtatgcggccgcaagcttattcccttgtagtgagggttaattttagcttggcac

SEQ ID NO: 70938 - DNA, 2182 bp, Homo Sapiens
  misc_feature (71)..(105): n is a, c, g, or t
  misc_feature (1688)..(1771): n is a, c, g, or t
  misc_feature (1879)..(1930): n is a, c, g, or t
  misc_feature (1953)..(1972): n is a, c, g, or t
tgatcgatcactatagggcctgcgtggagcgaagacgagcgcagcgagatcagtgagcgaggaagcggcgnnnnnnnnnnnnnnnnnnnnnnnnnnnnnnnnnnncagtcgacggtaccggacatatgcccgggaattcggccattacggccggggatgaggtccagatttctatcctgtcaagtaaggtggtggagtctggagaggacatgtgctgcaatgtgctgtgaatgaaggatctggtcccatcacctataagttttacagagaaaaagagggcaaacccttctatcaaatgacctcaaatgccacccaggcatttggaccaagcagaaggctaacaaggaacaggagggagagtattactgcacagccttcaacagagccaaccacgcctccagtgtccccagaagcaaaatactgacagtcagagtcattcttgccccatggaagaaaggacttattgcagtggttatcatcggagtgatcattgctctcttgatcattgcggccaaatgttattttctgaggaaagccaaggccaagcagatgccagtggaaatgtccaggccagcagtaccacttctgaactccaacaacgagaaaatgtcagatcccaatatggaagctaacagtcattacggtcacaatgacgatgtcggaaaccatgcaatgaaaccaataaatgataataaagagcctctgaactcagacgtgcagtacacggaagttcaagtgtcctcagctgagtctcacaaagatctaggaaagaaggacacagagacagtgtacagtgaagtccggaaagctgtccctgatgccgtggaaagcagatactctagaacggaaggctcccttgatggaacttagacagcaaggccagatgcacatccctggaaggacatccatgttccgagaagaacagataatccctgtatttcaagacctctgtgcacttatttatgaacctgccctgctcccacagaacacagcaattcctcaggctaagctgccggttcttaaatccatcctgctaagttaatgttgggtagaaagagatacagaggggctgttgaatttcccacataccctccttccaccaagttggaacatccttggaaattggaagagcacaagaggagatccagggcaaggccattgggatattctgaaacttgaatattttgttttgtgcagagataaagaccttttccatgcaccctcatacacagaaaccaattttcttttttatactcaatcatttctagcgcatggcctggttagaggctggttttttctcttttcctttggtccttcaaaggcttgtagttttggctagtccttgttctttggaaatacacagtgctgaccagacagcctccccctgtcccctctatgacctcgccctccacaaatgggaaaaccagactacttgggagcaccgcctgtgaaataccaacctgaagacaccgttcattcaggcaacgcacaaaacagaaaatgaaggtggaacaagcacagatgttcttcaactgtttttgtctacactctttctcttttcctctaccatgctgaaggctgaaagacaggaagatggtgccatcagcaaatattattcttaattgaaaacttgaaatgtgtatgtttcttactaatttttaaaaatgtattccttgccagggcaggcnnnnnnnnnnnnnnnnnnnnnnnnnnnnnnnnnnnnnnnnnnnnnnnnnnnnnnnnnnnnnnnnnnnnnnnnnnnnnnnnnnnnatgaaaccctgtctctactaaaaatacaagaattagccgggcgtggtggcgcatgcctgtagtatcagctactcaagaggctgaggtgagattatcgcttgaacccannnnnnnnnnnnnnnnnnnnnnnnnnnnnnnnnnnnnnnnnnnnnnnnnnnntgacagagtgagaatccatctcnnnnnnnnnnnnnnnnnnnnttgcttgctaaagaagtggtctcctgaggtcttaagacattcctgacagtgtcttgagtgggtgggagagaggttgctgtcattgcgctgtggaatttcacagatgagaaccacgcctagccaaaatcacttttcctgtttgcctcagtgacacagctgcagggaccctcgtggatgttgtattaaataaatttgacctttactctttgc

SEQ ID NO: 70939 - DNA, 1644 bp, Homo Sapiens
ttaaggctaggtacgaggctcgcgttgcaaattcggcacgaggaggatgtcggtgaattacgcggcggggctgtcgccgtacgcggacaagggcaagtgcggcctcccggagatcttcgaccccccggaggagctggagcggaaggtgtgggaactggcgaggctggtctggcagtcttccaatgtggtgttccacacgggtgccggcatcagcactgcctctggcatccccgacttcaggggtccccacggagtctggaccatggaggagcgaggtctggcccccaagttcgacaccacctttgagagcgcgcggcccacgcagacccacatggcgctggtgcagctggagcgcgtgggcctcctccgcttcctggtcagccagaacgtggacgggctccatgtgcgctcaggcttccccagggacaaactggcagagctccacgggaacatgtttgtggaagaatgtgccaagtgtaagacgcagtacgtccgagacacagtcgtgggcaccatgggcctgaaggccacgggccggctctgcaccgtggctaaggcaagggggctgcgagcctgcaggggagagctgagggacaccatcctagactgggaggactccctgcccgaccgggacctggcactcgccgatgaggccagcaggaacgccgacctgtccatcacgctgggtacatcgctgcagatccggcccagcgggaacctgccgctggctaccaagcgccggggaggccgcctggtcatcgtcaacttgcagcccaccaagcacgaccgccatgctgacctccgcatccatggctacgttgacgaggtcatgacccggctcatgaagcacctggggctggagatccccgcctgggacggcccccgtgtgctggagagggcgctgccacccctgccccgcccgcccacccccaagctggagcccaaggaggaatctcccacccggatcaacggctctatccccgccggccccaagcaggagccctgcgcccagcacaacggctcagagcccgccagccccaaacgggagcggcccaccagccctgccccccacagaccccccaaaagggtgaaggccaaggcggtccccagctgaccagggtgcttggggagggtggggctttttgtagaaactgtggattctttttctctcgtggtctcactttgttacttgtttctgtccccgggagcctcagggctctgagagctgtgctccaggccaggggttacacctgccctccgtggtccctccctgggctccaggggcctctggtgcggttccgggaagaagccacaccccagaggtgacagctgagcccctgccacaccccagcctctgacttgctgtgttgtccagaggtgaggctgggccctccctggtctccagcttaaacaggagtgaactccctctgtccccagggcctcccttctgggccccctacagcccaccctacccctcctccatgggccctgcaggaggggagacccaccttgaagtgggggatcagtagaggcttgcactgcctttggggctggagggagacgtgggtccaccaggcttctggaaaagtcctcaatgcaataaaaacaatttctttccctcgtgccgaattcgccacccaggcc

SEQ ID NO: 70940 - DNA, 463 bp, Homo Sapiens
gcggccgcccgtagtgcgcgccctgcagcgggaagtgtgcccctgctgcctctacgctggcaccgtagcccttgggtgggtgctggtgctggtggccgggcccgtgggggccgactccggggaaaaggtagtccacgtacggccgcggcatctcctccagcgccgtggggccgtcagcgccgaagcttgggccctcgtagggggtaccgctcagctggtggtaggacgcaaacgaatcgccggttccttcgaagctgggcctccgcgtcactggggttggcatgagcccctttcctggggaggtctgcttaatgacccgcacaatctgctcattcctcgggtccaggtagcccatcttgctgatgtactccagggcggcctcgatgctcctgctgccagtctgcttgagagctcggccagccatctcctggtcgcatcctgcgttcaccagttcctgcagcat

SEQ ID NO: 70941 - DNA, 973 bp, Homo Sapiens
ggcacgaggcccagaccttggcccttgccgggtcccctgccccatcggggcaccccaaggctggacacagtgagaacggggttgaggaggacacagaaggtcgaacggggcccaaagaaggtacccctgggagcccatcggagaccccaggccccagcccagcaggacctgcaggggacgagccagccgagagcccatcggagaccccaggcccccgcccagcaggacctgcaggggacgagccagccgagagcccatcggagaccccaggcccccgcccagcaggacctgcaggggacgagccagccgagaccccatcggagaccccaggccccagcccggcaggacctacaagggatgagccagccgagagcccatcggagaccccaggcccccgcccagcaggacctgcaggggacgagccagccgagagcccatcggagaccccaggcccccgcccggcaggacctgcaggggacgagccagccgagagcccatcggagaccccaggccccagcccggcaggacctacaagggatgagccagccaaggcgggggaggcagcagagttgcaggacgcagaggtggagtcttctgccaagtctgggaagccttaaggaaaggagtgcccgtcggcgtcttggtcctcctgtccctgctgcaggggctggggcctccggagctgctgcgggctcccctcaggctctgcttcgtgacccgtgacccatgacccacagtgctggcctcctgtggggccactatagcagccaccagaagccgcgaggccctcagggaagcccaaggcctgcagaagcctcctggcctggctgtgtcttccccacccagctctcccctgcgcccctgtctttgtaaattgacccttctggagtggggggcggcgggcagggctgcttttcttagtctgatgccaagcaaggccttttctgaataaattcatttgactttgaaaaaa

SEQ ID NO: 70942 - DNA, 1109 bp, Homo Sapiens
  misc_feature (809)..(817): n is a, c, g, or t
  misc_feature (1018)..(1026): n is a, c, g, or t
ctataagggtctttaggtagcgaggctgggtggcgaattcggcacgaggggaccctggggaggcagtgcagccctgccgcaacccctgggagccaggttggccgacaaggtgaggaagcggaggaaggtggatgagggtgctggggacagtgctgcggtggccagtggtggtgcccagaccttggcccttgccgggtcccctgccccatcggggcaccccaagggctggacacagtgagaacggggttgaggaggacacagaaggtcgaacggggcccaaagaaggtacccctgggagcccatcggagaccccaggccccagcccagcaggacctgcaggggacgagccagccgagagcccatcggagaccccaggcccccgcccagcaggacctgcaggggacgagccagccgagagcccatcggagaccccaaggcccccgcccagcaggacctgcaggggacgagccagccgagagcccatcggagaccccaggcccccgcccggcaggacctgcaggggacgagccagccgagagcccatcggagaccccaggccccagcccggcaggacctacaagggatgagccagccaaggcgggggaggcagcagagttgcaggacgcagaggtggagtcttctgccaagtctgggaagccttaaggaaaggagtgcccgtcggcgtcttggtcctcctgtccctgctgcaggggctggggccctccggagctgctgcgggcctccccctcgggctctggcttcgttgacccggtgacccatggaacccacaggtggctggggcctccctnnnnnnnnnccccctattagccagctcaccccaaaaaagcccgcgccagggcccccttcaggggaaagcccccaaagggccctggcaaaaaagcccctccctggggccctggagttgtgtggttttctcccccagcccagaggttcctcccccctggcgagccccttggtgttttttggaaacaattgggaaccctctttctgggaaatnnnnnnnnntcagaccggggccaagggcgctggcttttttcctttgaggccgtgggaaacccagaggcaaaggggcccttttttctcggaag

SEQ ID NO: 70943 - DNA, 1572 bp, Homo Sapiens
ggacgcgtgggattaacccaaagggcctggagttggatcccgagggttccctgcaccaccagcaaaaacgggaagctccaagccgcagctctgcttcctcgggacctcagatcctgaaatgcccggaggttgagtgtttcaggctgcgctgtgagctcgggcccctgcaccaacaagagagccaaagtctgcagttgcatttccgagtctgggccaagactttcttgcagcgggagcaccagccatttagcctgcagtgtgaggctgtgtacaaagccctgaagatgccctaccgaatcctgcctcggcagctgccccaaaaagagcgtcaggtggccacagctgtgcaatggaccaaggcagaaggcagctatggcgtcccactgtggatcatcatcctagccatcctgtttggcctcctgctcctaggtctactcatctacatcctctacaagcttggattcttcaaacgctccctcccatatggcaccgccatggaaaaagctcagctcaagcctccagccacctctgatgcctgagtcctcccaatttcagactcccattcctgaagaaccagtccccccaccctcattctactgaaaaggaggggtctgggtacttcttgaaggtgctgacggccagggagaagctcctctccccagcccagagacatacttgaagggccagagccaggggggtgaggagctggggatccctcccccccatgcactgtgaaggacccttgtttacacataccctcttcatggatgggggaactcagatccagggacagaggccccagcctccctgaagcctttgcattttggagagtttcctgaaacaacttggaaagataactaggaaatccattcacagttctttgggccagacatgccacaaggacttcctgtccagctccaacctgcaaagatctgtcctcagccttgccagagatccaaaagaagcccccagctaagaacctggaacttggggagttaagacctggcagctctggacagccccaccctggtgggccaacaaagaacactaactatgcatggtgccccaggaccagctcaggacagatgccacacaaggatagatgctggcccagggcccagagcccagctccaaggggaatcagaactcaaatggggccagatccagcctggggtctggagttgatctggaacccagactcagacattggcacctaatccaggcagatccaggactatatttgggcctgctccagacctgatcctggaggcccagttcaccctgatttaggagaagccaggaatttcccaggaccctgaaggggccatgatggcaacagatctggaacctcagcctggccagacacaggccctccctgttccccagagaaaggggagcccactgtcctgggcctgcagaatttgggttctgcctgccagctgcactgatgctgcccctcatctctctgcccaacccttccctcaccttggcaccagacacccaggacttatttaaactctgttgcaagtgcaataaatctgacccagtgcccccactgaccagaactagaaa

SEQ ID NO: 70944 - DNA, 1297 bp, Homo Sapiens
ggcccctcctaatgtcagggacttaagattggggctcgctgggacctggtggtccggttatgggaaaagaagcctcgtgggagagcagagcctgaaaaaggactgcgcggactgacttcttggctactgaaagcaaagctccactgttccaggcacgattctgccttctctcaaatggcataactcaggactctgcaaattcccaaaaacaggaggaaaaatgaccaagttcaaggaggcagtgaccttcaaggatgtggctgtggtcttcactgaggaggagctggggctgctggaccctgcccagaggaagctgtaccgagatgtgatgctggagaacttcaggaacctgctgtcagtggggcatcaaccattccaccgagatactttccactttctaagggaggaaaagttttggatgatggatatagcaacccaaagagaagggaattcaggagggagtgtgcaagcgagcaagtgcaggaaccggagcaaatgaatgctggaattggctggtcgctcctctctggcgagagcaggctctgttgtgcacgccccacagcagtgtccaagcatgttacaacccatgctgtttcagctctgccatctggggatggccaagtgccaatcagctcagtggagcatcagggtagcagcccctgccctcttggcacctgggttcttgtccagcatccaggaagaaccaggtcacatgaactgtgtgaaaggtgatgaacgcagaagactttattgagtggaggcaagatccaacctgagatgaagacttttccagaagcaggaccacatgaagggtggtcctgccagcaaatctgggaacaaattgcaaaagacttaaccaggcctcaagactctaccataaagaactctcagttctttgaaaagggtgatgcccactcccaggttgaagaaggaatacccacaatgcacacaggacagaaaccttccaagggtgggaagtgtaaacaatccttcagtgatatgcccatctttgatcttcctcagcaaatacactcagaagagaagtctcatacatgtgatgagtgtggaaaaagcatctgttacatctcagcacttcatattcatcagagagtccacctgggagagaaactctttaagtgtgacgtgtgtggcaaggaattcagtcaaagctcacatctgcaaactcatcagagagtccacactgggagagaaaccattcaaatgtgaacaatgtgggagaggcttcagatgtagatcaagcacttacagttcattgcaaattaccatgggagagaac

SEQ ID NO: 70945 - DNA, 992 bp, Homo Sapiens
gaacgagtctcctttccttggggctcgcaaccacccaatgatcgattcaggagaaaagaagcctgggcggagagcagaggaggcagtgaccttcaaggatgtggctgtgatcttcactgaggaggagctggggctgctggaccctgcccagaggaagctgtaccgagatgtgatgcttgagaacttcaggaacctgctctcagtggggcatcaaccattccatggagatactttccacttcctaagggaagaaaagttttgggtgatggggacaacaagccaaagagaagggaattcgggaggcaagatccaaactgagatggagactgttccagaagcaggaacacatgaagaattttcctgcaagcaaatttgggaacaaattgcaagtgacttaaccaggtctcaagataccaccataagtaactctcagttatttgaacaagatgacaacccctcccagattaaagcaagactatctacagttcacacaagagaaaaacctttccagggtgaaaattgtaaacagttcttcagtgatgtttccttctttgatcttcctcagcagttatattccaggagcagaagtctcatacctgtgatgagtgtggcaaacaagcttctgttacatctcagcccttcatattcatcagagggtccacatgggagtgaaatgcctataacgtgtgatgtgtgtggtaagggaatttagtcagaggctcacgtctgcaaacctcatcaaaagagtccaacactgcacgagaaaccattcaaatgtgagcagtgtgggacaggcttcagatgtagatcagcacttaagcgtcattgcaacttacaccttgagagagaaaccttattactgtgagcaatggtgggaacgctttactgcccattcccagctcagacacatcgcgaattcatatggggggaagccgtccatgtcgacagtggtaagagcgccggctaggcacggctcaagggatgctggtcca

SEQ ID NO: 70946 - DNA, 1062 bp, Homo Sapiens
agctgatcagccaggcacagaatctccagaacaacctagagagtgaatgctaatttgtagagcgaacttccatttggcccattatttgtaactgtgtaactgctccaagtgccagaatgcttacacgttaaagcagcacctttccatttgcccacatattcttcttgcacaccccttccattactgctgaataggacattgcatgggaagagtacagaggtggcagaatgaagctagagtgggaaggactaaagactgagccccagagtgctcccagcaaccgccacgtacaaggtctgaaatgacaagggcaagagtgagataggaaactgtgtgtgaaaggaaagcccttgcagtatttctgcctccctttctttctgcctttcaccccactaaatgtacgttattgaatgccagtacttctctagtggatgcacacttgttaaatagtgttaagagatgtggagatgagatatacccctttgatgtagaattattcatttggtttgtttcatacttcattataggaatcaagtaatttgatgactaatgtggattatatttcagtcaaagctctgctttcaatttctctgatttgctcactaatgccttatgtgtgttttactaaccttttatatcttgccttcaagtgagaaggaacaaacaactctcagtggttactacttgcttttatatgctggctgtgaaggttaaaagaaagaatggtctgtaccattttttctgctttgctgcccttttattgtaccccaggcctcctagaggactcctgcagattctattgttgggtgggaaatagtgttggaatgtgtttgcacagtcttatgatattcagtctcagtctgctataggtatttgttattcttggatactacacacctgctcagactgagtaaacatttgtggtgctgtcaacctgatttcttgactctcaaatgatttttgtatttccaatatgaatttgtgtgttatgaatttctgatttctccaatagtatatgccactatataaatttgtattaataaatgacagtcttgttggttt

SEQ ID NO: 70947 - DNA, 1281 bp, Homo Sapiens
  misc_feature (906)..(963): n is a, c, g, or t
  misc_feature (1077)..(1077): n is a, c, g, or t
cggtccggaattcccgggatatcgtcgacccacgcgtccggttgctttgaggcagtaccggaggagaaagatggcggctaccttactagctgctcggggagccgggccagcaccggcttgggggccggaggcattcactccagactgggaaagccgagaagtttccactgggaccactatcatggccgtgcagtttgacgggggcgtggttctgggggcggactccagaacaaccactgggtcctacatcgccaatcgagtgactgacaagctgacacctattcacgaccgcattttctgctgtcgctcaggctcagctgctgatacccaggcagtagctgatgctgtcacctaccagctcggtttccacagcattgaactgaatgagcctccactggtccacacagcagccagcctctttaaggagatgtgttaccgataccgggaagacctgatggcgggaatcatcatcgcaggctgggaccctcaagaaggagggcaggtgtactcagtgcctatggggggtatgatggtaaggcagtcctttgccattggaggctccgggagctcctacatctatggctatgttgatgctacctaccgggaaggcatgaccaaggaagagtgtctgcaattcactgccaatgctctcgctttggccatggagcgggatggctccagtggaggagtgatccgcctggcagccattgcagagtcaggggtagagcggcaagtacttttgggagaccagatacccaaattcgccgttgccactttaccacccgcctgaatcctgggattctagtatgcaataagagatgccctgtactgatgcaaaatttaataaagtttgtcaccgagaacacgcggaagacgacggccgcccaaaatagagtttaacagatnnnnnnnnnnnnnnnnnnnnnnnnnnnnnnnnnnnnnnnnnnnnnnnnnnnnnnnnnngcgtacatccaaaggtccgcgcactagaccccccgtttttgtcgcgccgagccgccgcagacccggatgtaactcccccccctcattttgccgtgcagacggcccagctttttntttgccgcgagcccccgcattgaaacagcgccacacccacagagatcggcgcaccgttaaatttgttcccgctgtaaatattcacgaatacctattagcgccgtggttccgcttgtgcccccagcagctgtttatgtatattggttacacaccgcttgcgctgcaccccgcccccaccaatcaacagtgtgcatacgccatgcg

SEQ ID NO: 70948 - DNA, 869 bp, Homo Sapiens
acaattcggctaggtcgaggcttgggttcaaatcggcagtaccggaggagaaagatggcggctaccttactagctgctcggggagccgggccagcaccggcttgggggccggaggcattcactccagactgggaaagccgagaagtttccactgggaccactatcatggccgtgcagtttgacgggggcgtggttctgggggcggactccagaacaaccactgggtcctacatcgccaatcgagtgactgacaagctgacacctattcacgaccgcattttctgctgtcgctcaggctcagctgctgatacccaggcagtagctgatgctgtcacctaccagctcggtttccacagcattgaactgaatgagcctccactggtccacacagcagccagcctctttaaggagatgtgttaccgataccgggaagacctgatggcgggaatcatcatcgcaggctgggaccctcaagaaggagggcaggtgtactcagtgcctatggggggtatgatggtaaggcagtcctttgccattggaggctccgggagctcctacatctatggctatgttgatgctacctaccgggaaggcatgaccaaggaagagtgtctgcaattcactgccaatgctctcgctttggccatggagcgggatggctccagtgggaggagtgatccgcctggcagccattgcagagtcagggggtagagcggccaagtacttttgggagaccagatacccaaattccgccgtttgcccactttaacaccccgccctgaaatcctggggatcctaattatgcaataaagagatgcccctgtaacggatgccaaaattttaataaaggtttggtcccagtaaaaaat

SEQ ID NO: 70949 - DNA, 847 bp, Homo Sapiens
tggtaccgctccggatttcccgggatatcgtcgacccacgcgtccgctttgaggcagtaccggaggagaaagatggcggctaccttactagctgctcggggagccgggccagcaccggcttgggggccggaggcattcactccagactgggaaagccgagaagtttccactgggaccactatcatggccgtgcagtttgacgggggcgtggttctgggggcggactccagaacaaccaccgggtcctacatcgccaatcgagtgactgacaagctgacacctattcacgaccgcattttctgctgtcgctcaggctcagctgctgataccccaggcagtagctgatgctgtcacctaccagctcggtttccacagcattgaactgaatgagcctccactggtccacacagcagccagcctctttaaggagatgtgttaccgataccggggaagacctgatggcgggaatcatcatcgcaggctgggaccctcaagaaggagggcagggtgtactcagtgcctatggggggtatgatggtaaggcagtcctttgccattggaggctccgggagctcctacatctatggctatgttgatgctacctaccgggaaggcatgaccaaggaagagtgtctgcattcactgcaatgctctcgcttggcatggagcgggatggctcagtggaggagtgatccgctggcagcatgcagagtcaggggtagagcggcaagtacttttgggagaccaaataccaaattcgccgtgccatttaccacccgctgaatctgggatctagttgcactagagattcctggtactggtgcaacatttattaagttgtcccgcg

SEQ ID NO: 70950 - DNA, 1031 bp, Homo Sapiens
tgagaactataacagtgtttataaaaagcaggctggtacggtcggtttatcccgggatatcgtcgacccacgcgtccggatggcggctaccttactagctgctcggggagccgggccagcaccggcttgggggccggaggcattcactccagactgggaaagccgagaagtttccactgggaccactatcatggccgtgcagtttgacgggggcgtggttctgggggcggactccagaacaaccaccgggtcctacatcgccaatcgagtgactgacaagctgacacctattcacgaccgcattttctgctgtcgctcaggctcagctgctgatacccaggcagtagctgatgctgtcacctaccagctcggtttccacagcattgaactgaatgagcctccactggtccacacagcagccagcctctttaaggagatgtgttaccgataccgggaagacctgatggcgggaatcatcatcgcaggctgggaccctcaagaaggagggcaggtgtactcagtgcctatggggggtatgatggtaaggcagtcctttgccattggaggctccgggagctcctacatctatggctatgttgatgctacctaccgggaaggcatgaccaaggaagagtgtctgcaattcactgccaatgctctcgcttgggacatggagcgggatggctccagtggaggagtgatccgctggcagccatgcagagtcaggggtagagcggcaagtacttttgggagacagataccaaaatccggcgtgcaatttacacccggctgaacctgggatctagtatgcaataagagaggccttgtatgatgcaattactaacgtgtccccgagatctcgtacaccaacacaaagggcgcgcaaagttcctccagggccactacgtccgttctgcaggggcctcgtgggaaaagagcgggcggtaaagcggaggaacgcgcgggtgggcaccctgtgtgtggcacccaatgccggaaattgtgtccctcccgtctgctttccccagtag

SEQ ID NO: 70951 - DNA, 278 bp, Homo Sapiens
gcggccgcaagtgcttcccaatactgtgttctgtacatgccatgaggtgaaaggattggggaagcaccaactacgccgcctccactcagaggagcggctctccctttcgtggctctagctacttgctttcctgctctaagttccatgatctccccagcccatctccagcatggaactgcaggcagcctgcagtctccaggcacgtagcccccttcctgcccaagccaggccagcctcattaaggctgcagagagcccacaggcatcaaccctcgtgcc

SEQ ID NO: 70952 - DNA, 507 bp, Homo Sapiens
  misc_feature (477)..(477): n is a, c, g, or t
gggggggccagcgaggcaagatggagttagtgcaggtcctgaaacgcgggctgcagcagatcaccggccacggcggtctccgaggctatctacgggtttttttcaggacaaatgatgcgaaggttggtacattagtgggggaagacaaatatggaaacaaatactatgaagacaacaagcaattttttggcatcgttggcttcacagtatgactgatgatcctccaacaacaaaaccacttactgctcgtaaattcatttggacgaaccataaattcaacgtgactggcaccccagaacaatatgtaccttattctaccactagaaagaagattcaggagtggatcccaccttcaacaccttacaagtaaagacaatgaagaacagttgaaacatgcaaaatatggagcttttcatgtaattactcttttactgtttaccattcactataattcacaattaaaattgtgtgactaancagcacctcatacccccctaaacaacatgt

SEQ ID NO: 70953 - DNA, 803 bp, Homo Sapiens
  misc_feature (615)..(616): n is a, c, g, or t
  misc_feature (621)..(621): n is a, c, g, or t
  misc_feature (623)..(624): n is a, c, g, or t
  misc_feature (630)..(631): n is a, c, g, or t
cagtcgacggtaccggacatatgcccgggaattcggccattacggccggggggggccagcgaggcaagatggagttagtgcaggtcctgaaacgcgggctgcagcagatcaccggccacggcggtctccgaggctatctacgggtttttttcaggacaaatgatgcgaaggttggtacattagtgggggaagacaaatatggaaacaaatactatgaagacaacaagcaattttttggccgtcaccgatgggttgtatatactactgaaatgaatggcaaaaacacattctgggatgtggatggaagcatggtgcctcctgaatggcatcgttggcttcacagtatgactgatgatcctccaacaacaaaaccacttactgctcgtaaattcatttggacgaaccataaattcaacgtgactggcaccccagaacaatatgtaccttattctaccactagaaagaagattcaggagtggatcccaccttcaacaccttacaagtaaagacaatgaagaacagttgaaacatgcaaaatatggagcttttcatgtaattactcttttactgtttaccattcactataattcacaattaaaattgtgtgactaaccnnccccncnncccccnnaaacaaacactgtcggccgccttcggccctcgaaaaagctttctaaaaccattcctttgggcgcccgggccccagaagggtaagggaacacgggccataacctgtttcccaaaggaaaaccctggccattgaactagggcctgtggattctcccccaattaaaaaaccgccc

SEQ ID NO: 70954 - DNA, 1508 bp, Homo Sapiens
  misc_feature (924)..(924): n is a, c, g, or t
atagaccattgttaagcctcccaaagtagtgtgcatgaagatttctagagtgtccagctcttgcactacaaatgtaataataacagaataaatacacttaccctgatgatattgagggtacatgattgccctaatgtgatgtcatatgaggaagtttaggagtccatttttcaggtggtctggtgataggaataaaaatgttactcccgtcgctgatttggaagaaaaccgatgaagtacaagtaaggtttccccactcctgtgtgtggtcatgggaagccattagagggaagctggagaacagaatggaacaggacaggctgggctagactcgagcacgcagtggcccctgtgccaccacactgtgggtcaggaacacgcgtcatggtgttcttgtcggaatgtgaacatacagcaccctctagcattacgaatctcttaggatttttaagattgtatttgataatacttatatttcacagggcacacttttggcacacctcagagcacactgctgctattttgggtcgtatcactgtaaaatacataataagtactacttaactgtgacatgaagaattggaatcccagagggcaacatttgatttgactaagatcaggcataagatagaatttttgtcatttttccttgcagttttattgacttagtttatgagcttggataaaataattttttgatgaatcatgtcaataaaaggaaaaataatgtaactacctcataagtctgataaaaggaagttgctagtgttttatagaatttctgaaggtggttaaatcaagtatgatttcaaaatatcaactagttccacttttgtgattgcaggatgcttcttatactaaagttctcataaataataaatcagcttatgccaaaaatatatgaagttccttggttgtaaattntgaactaaaatggactgagcacattaattactgtgtgaaagtaggtaccaaacactgggttatgtgagtgagtaagcaatcatatcgcctgtcaaacacatcaagtgtcgaacacgtcaaggtgtgatactgtctttggaaggctcctaaacaaatgtgagcacaattattaacaccttattcttcatgaacacagactgttaagcagcactaaccaattttatattaaaaagctatttattttggtgagttattccaagagttgtatacagctttattttttggaattgcaatattaaagttgcacgttggatttaactctcatgactttagtaatacctacagaggtgagctaatggatggtacatggagtagggactgcagagaccctagttttgtccccactccatcttcaaataattttggtctcttaggtctgtgatacaaaggcataaaacaattcctatcttgaagccttgagaaaagctgttacatatacgcagatagtagcaagacagaaaatgcaaatatgtaaatgtcttctgatatcttgaaataaagataaatttcagttaaacttgaaa

SEQ ID NO: 70955 - DNA, 684 bp, Homo Sapiens
  misc_feature (12)..(12): n is a, c, g, or t
gaaatcacaagnaaccgggtgaacatgacctacgagaagatgtctcgtgccctgcgccactattataagcttaatatcattaagaaggaaccggggcagaaactcctgttcagatttctaaagactccgggaaagatggtccaggacaagcacagccacctggagccgctggagagccaggagcaggacagaatagagttcaaggacaagaggccagaaatctctccgtgaggggcaggtggactccaggcacccggtaccgatggggcagggaccgagtctcccatgaaggcagactcctcctcccagcagagcagcaggatccccagccagactctgtacccacaggattacagccattgcttgggaaggctgggaggcctcccatccaggacactgggggcaggagtgtcatcttttgggcagggcaatcctggggctaaatgaggtacaggggaatggactctcccctactgcacccctgggagaggaagccaggcaccgatagagcacccagccccacccctgtaaatggaatttaccagatgaagggaatgaagtccctcactgagcctcagatttcctcacctgtgaaatgggctgaggcaggaaatgggaaaaagtgttagtgcttccaggcggcactgacagcctcagtaacaataaaaacaatggtagctgaaa

SEQ ID NO: 70956 - DNA, 944 bp, Homo Sapiens
  misc_feature (70)..(104): n is a, c, g, or t
  misc_feature (152)..(161): n is a, c, g, or t
tgataatcatataggggtagcctagagcgaacgacgagcgcagcgaagtagtgagcgaggaagcggccgnnnnnnnnnnnnnnnnnnnnnnnnnnnnnnnnnnncagtcgacggtaccggacatatgcccgggaattcggccattacggccnnnnnnnnnnattgtgggaaaagatggcggctgccgcacaatcccgggttgtccgggtcctgtcaatgtcacgttctgccattactgcaatagccacatctgtgtgtcacggcccaccctgtcgccagcttcatcatgccctcatgcctcatgggaaaggtggacgttcctcagtcagtgggattgtggccactgtgtttggagcaacaggattcctggggcgatatgttgtcaaccaccttggacgcatggggtcacaggtaatcataccctatcggtgtgataaatatgacatcatgcaccttcgtcccatgggtgacctgggccagcttctgtttctggaatgggacgcgagagataaagattctatccgacgagtagtacaacacagcaatgtggtcatcaatcttattggacgagactgggaaaccaaaaactttgattttgaggatgtttttgtgaagattccccaagcaattgctcaactgtccaaggaagctggagttgaaaaattcattcatgtttcacatctgaatgcgaatattaaaagctcttctagatatttgagaaataaggctgttggagagaaagtagtgagagatgcatttcccgaagccattatcgtaaagccgtcggacatctttgggaagagaagatagattcccttaattccttttgcaagtatgccattcggtttgggtcccaatacccccttgggttcccttggggcctgggaaggacagtttaaaccaacccggtataatggctccaacaagggtatcccccaaggaat

SEQ ID NO: 70957 - DNA, 2008 bp, Homo Sapiens
  misc_feature (47)..(85): n is a, c, g, or t
  misc_feature (89)..(123): n is a, c, g, or t
  misc_feature (1452)..(1541): n is a, c, g, or t
  misc_feature (1701)..(1711): n is a, c, g, or t
  misc_feature (1842)..(1854): n is a, c, g, or t
  misc_feature (1927)..(1927): n is a, c, g, or t
aaaaaaacatttgatactctatagggcgctagctcgcctatttcctnnnnnnnnnnnnnnnnnnnnnnnnnnnnnnnnnnnnnnnccgnnnnnnnnnnnnnnnnnnnnnnnnnnnnnnnnnnncagtcgacggtaccggacatatgcccgggaattcggccattacggccgggggtgggggattgtgggaaaagatggcggctgccgcacaatcccgggttgtccgggtcctgtcaatgtcacgttctgccattactgcaatagccacatctgtgtgtcacggcccaccctgtcgccagcttcatcatgccctcatgcctcatgggaaaggtggacgttcctcagtcagtgggattgtggccactgtgtttggagcaacaggattcctggggcgatatgttgtcaaccaccttggacgcatggggtcacaggtaatcataccctatcggtgtgataaatatgacatcatgcaccttcgtcccatgggtgacctgggccagcttctgtttctggaatgggacgcgagagataaagattctatccgacgagtagtacaacacagcaatgtggtcatcaatcttattggacgagactgggaaaccaaaaactttgattttgaggatgtttttgtgaagattccccaagcaattgctcaactgtccaaggaagctggagttgaaaaattcattcatgtttcacatctgaatgcgaatattaaaagctcttctagatatttgagaaataaggctgttggagagaaagtagtgagagatgcatttccggaagccattatcgtaaagccgtcggacatctttggaagagaggatagattccttaattcttttgcaagtatgcatcggtttggtcctataccccttggttccttgggctggaagacagttaaacaaccagtatatgtcgtagatgtatccaaaggaattgttaatgcagttaaggatcctgatgccaatgggaaatcctttgctttcgttggtcccagtcggtacctccttttccacctggtgaagtacatctttgctgtggctcacagattgttcctcccattccccttgccgctttttgcctatcgatgggtagcaagagtctttgaaataagcccatttgagccctggataacaagggataaagtggagcggatgcacatcacagacatgaaattgcctcacctgcctggcttagaagaccttggtattcaggcaacaccactggaactcaaggccattgaggtgctgcggcgtcatcgcacttaccgctggctgtctgctgaaattgaggatgtgaagccggccaagaccgtcaacatttagtgcctcctgagcagctcttggttttggcgtcttttgggtcggcccatgtggtttgagcacccagccaggcggtctctttagaggatcctgtacacagttccactattaaaacatttcaggttgnnnnnnnnnnnnnnnnnnnnnnnnnnnnnnnnnnnnnnnnnnnnnnnnnnnnnnnnnnnnnnnnnnnnnnnnnnnnnnnnnnnnnnnnnnccttgttcggccgccctcggccccccaaagaccttttcttaacaccttctctttgggcgccgcgggcccccattaggtaaagtgaaacctgtggcctataccttgtttccaaaggaaaaccccgggaccaggaaataagggctttggaattccccccccnnnnnnnnnnncgccccgggggggcacccgaaaccgtttcttgaaaaaaaccccaaaaggggatttccgagagggtcttttcccggggatctattcaaccgggggagcccccaacgggagccctcgactttccaaattttannnnnnnnnnnnntggccactttcattccaaaaaaacgggtggaaaattcccattaacaatttttcggccccaacatgggaaaacnctcttcccaaaacgggtgtatagtaaaacccctgaaattcgccacccgggaatttcaccacccctttgtccccctttgcgg

SEQ ID NO: 70958 - DNA, 892 bp, Homo Sapiens
ctacgaacttttaacaataaagttttagttatttaaaaaaacacttctgaagtattgtacaatataagtgctgtcttaatacaaatcactggtggaaaggagcaggacataccctcagcaaaggtcatacaatagggggtaaaacgtttgtgttcttgagggagaagtttttgctctgtcctggggaggtcatggacacctccgccccgacagctgcctctgacttcttgggagcgtctaccagttgaggcagctgaacagtgtcagctccgtgctggagacagtcctgctgatcacctgaatgctgaacatgcttcgtggggctatcttttgttttctctgtagtctctttggtgatctcatctgcttttctgctcgagtgatgacagccttgaaccttgtccttccttgtctcagaggggaaaaaggaattggatttcctcagggtctggggcctgggctgtggcttgaggttccgagactgatgaatccaagcatgcttgagggcctggtccggggtcatgcgaagagaaggttcccataccaaacaccttctgagaaagtccaggaagctggtgtcataggttttcagcaccatcgtgaggtccttggaatctgggtatctttttttccccctgttgttggttatatttttaggaaaacctttggaatctccatgatgcaggccagctgctccacctcattctccccggggaacagggggtagcccgtgtacaactccgccgtgatgcagcccaggctccacatgtcaatggccacgtcgtaggggtggcccaggatcaccttctggggatcggtagaaccggctttggatgtacgcgacgcgtggtcgacgatatcccgggaattccggaccggtaccagcctgctt

SEQ ID NO: 70959 - DNA, 844 bp, Homo Sapiens
ggggggggattgtgggaaaagatggcggctgccgcacaatcccgggttgtccgggtcctgtcaatgtcacgttctgccattactgcaatagccacatctgtgtgtcacggcccaccctgtcgccagcttcatcatgccctcatgcctcatgggaaaggtggacgttcctcagtcagtgggattgtggccactgtgtttggagcaacaggattcctggggcgatatgttgtcaaccaccttggacgcatggggtcacaggtaatcataccctatcggtgtgataaatatgacatcatgcaccttcgtcccatgggtgacctgggccagcttctgtttctggaatgggacgcgagagataaagattctatccgacgagtagtacaacacagcaatgtggtcatcaatcttattggacgagactgggaaaccaaaaactttgattttgaggatgtttttgtgaagattccccaagcaattgctcaactgtccaaggaagctggagttgaaaaattcattcatgtttcacatctgaatgcgaatattaaaagctcttctagatatttgagaaataaggctgttggagagaaagtagtgagagatgcatttccggaagccattatcgtaaagccgtcggacatctttggaagagaggatagattccttaattcttttgcaagtatgccatcgggttgggtcctatacccccttggttcccttggggctggaaagacagttaaaccaccaggtatatggtcgtagatgtatccaaaagggaattggttatgggcaggttaaggatccctgatgcccaatggggaaatccttttggcctttccttggggca

SEQ ID NO: 70960 - DNA, 711 bp, Homo Sapiens
  misc_feature (139)..(139): n is a, c, g, or t
ggtactccgccagcgggcttcattcagacagcattaaggagcagaccatctttgatccaaaggtttcataaaaatataacaacaacagggggaaaaaagatacccagattccaaggacttcacgatggtgctgaaaacntatgacaccagcttcctgaactgtctcagaagatgggaaccttctcttcgcatgaccccggaccaggccctcaagcatgcttggattcatcagtctcggaacctcaagccacagcccaggccccagaccctgaggaaatccaattcctttttcccctctgagacaaggaaggacaaggttcaaggctgtcatcactcgagcagaaaagatgagatcaccaaagagactacagagaaaacaaaagatagccccacgaagcatgttcagcattcaggtgatcagcaggactgtctccagcacggagctgacactgttcagctgcctcaactggtagacgctcccaagaagtcagaggcagctgtcggggcggaggtgtccatgacctccccaggacagagcaaaaacttctccctcaagaacacaaacgttttaccccctattgtatgacctttgctgagggtatgtcctgctcctttccaccagtgatttgtattaagacagcacttatattgtacaatacttcagactgttttttttaaatacataaaactttatgttaaaaaactagaaaa

SEQ ID NO: 70961 - DNA, 1176 bp, Homo Sapiens
cagtcgacggtaccggacatatgcccgggaattcggccattacggccgggggccggaggaggggtttcggccgacacgtcgggattggcggctgcagccaggggtcctccgacgctgggcttccgtgagcggcgctctgccagatctctggaccggattcgtcccattctcgtcctcatggtggacaagaaactggtggtggttttcggaggcacaggtgcccagggtggctccgtggcccgcacactcctggaagatgggacattcaaggttcgagtggtgacccgaaaccctaggaagaaggcagcaaaggagctgaggctgcaaggtgcagaagtagtgcagggagaccaagatgaccaggtcatcatggagctggccctgaatggggcttacgccaccttcatcgtgaccaattactgggagagctgcagccaggagcaggaggtcaagcaggggaagctgctcgctgatctggccaggcgcctgggcctccactatgtggtctacagcggcctggagaacatcaagaagctgacggcagggagattggccgccgcgcactttgacggcaaaggggaggtggaggaatatttccgggacattggcgttcccatgaccagtgtgcggctgccctgctattttgagaacctcctctcccacttcttgccccagaaagccccagacggaaagagctacttgctgagcttgcccacaggtgacgttcccatggatggcatgtccgtgtctgacctgggtcctgtggtgctcagccttttgaagatgccagaaaaatacgtcggccagaacatcgggctgagcacttgcaggcacacggccgaggagtacgctgccctgctcaccaagcacacccgcaaggtcgtgcacgatgccaagatgactcctgaggactacgaaaagcttggctttcccggtgcccgggacctggccaacatgttccgtttctatgccctgagacccgaccgtgacatcgagctgaccctgagactcaaccccaaggccctgacgctggaccagtggctggaacagcacaaaggggacttcaacctgctgtgacctgcccgcctcgcggccccttgtggggatcgggggcaccagaggggcagaggcaccaacatctgaataaagccattgttctcccagatggcttcccgg

SEQ ID NO: 70962 - DNA, 930 bp, Homo Sapiens
tcggctaggtacgaggctgggtgttgaatcggcacgagggacacgtcgggattggcggctgctgccaggtgtcctccgacgctgggcttccgtgagcggcgctctgccaggtggggccggagctgcggggatgggagttggcgcctagcgcgcagctccatccccgcctctgcagtggactcggccgcagaatcggggtcccgggctcctggaacttgtcccgcccaggccgcggcgaggaggtcactccagccgatctctggaccggattcgtcccattctcgtcctcatggtggacaagaaactggtggtggttttcggaggcacaggtgcccagggtggctccgtggcccgcacactcctggaagatgggacattcaaggttcgagtggtgacccgaaaccctaggaagaaggcagcaaaggagctgaggctgcaaggtgcagaagtagtgcagggagaccaagatgaccaggtcatcatggagctggccctgaatggggcttacgccaccttcatcgtgaccaattactgggagagctgcagccaggagcaggaggtcaagcaggggaagctgctcgctgatctggccaggcgcctgggacctccactatgtggtctacagcggcctggagaacatcaagaagctgacggcagggagattggccgccgcgcactttgacggcaaggggaggtggaggaatatttccgggacattggcgttcccatgaccagtgtgcggtgccctgctatattggagaacctcctctcccacttcttgaccccagaaagccccagacggaaagagctacttgctgagcttgcccacaggtgacgttcccatggatggcatgtccgtgtctgacctggtcctggggtgctcagcctttgaaatgcagaaaaatagtcggcaaaaatcggctgagcata

SEQ ID NO: 70963 - DNA, 1075 bp, Homo Sapiens
cagctgggctcccttggagacagagcgccatgggaaaccgggtctgctgcggaggaagctggagctgcccatcaactttccagaagaaaaagaaaagaggaagccaaacaagacggacactgaagccgcagccacaacagctgcagcagaatctcccaaagggccatgaaacaacaggacatacgtatgaacgggtgttacagcagcaagggtctcaagagaggagtccaggcctcatgtcggaagacagcaacttacattatgctgacattcaagtgtgcagccgtccccatgcccgggaagtgaaacacgtgcatttagaaaacgctacagagtatgcgacccttcgcttcccccaggccacacctcgctatgacagcaagaacgggaccctggtgtgagcgcttgggaggaaggcccagtccatcgttaaccactacacctgtgggggagaacctactgctttggggaattgggtggcaacccagggatgttgtccacgttttaagcttaaagaactccaaagcccctggaattgtgggcgtcccattttctcccctggcctcttacttgccactgttaggttggagttaatagttggtttagctatgggtggatagctaaacttagctatccacatgaggttaggtggagtgtgcagggaggtaggtcttcgaccccaccattgttgctcctgctcttgcaaagtgcagaaagagcaggtaaaaagttagcccataagcacgtgggctgatcttgttggactttaattaatggtatcctttttcacacaccttaaactccaaagctgaaggggaggtgctccggaaaagcattctgagcttttacattcagacactagggctggcttgggccatttcctcagtggctgagtcaggttccagaccttaacagacaaatgggggaagggggctgaggcgtggaggaaacgctttcaggacctcaagtcagtgataaccgacagcacagtgaggcctggaaacttccctcggagggactgttggctctcgcaggtgcggggccgctaggatcaataaacggcctgagaaacaaa

SEQ ID NO: 70964 - DNA, 597 bp, Homo Sapiens
  misc_feature (571)..(571): n is a, c, g, or t
caagaattcggcacgagggtgaatgtggcactgcaggggcagggtgggggacatgcccagcggggctggtgaatatgccaccgcaggggcggggagggcagaatatgcccagtgaggctggtgaatgcgccaggggcagagggcggggagggggaagatgcccagcgaggctggtgaatgtggcactgcaggggtggggtgggcggatgcaatgatgagcatttcctccctggggccagcagagcaggggtgaggctgagtgggtatattactccgatttgggtgggaccccatgcagtcacacgtgggggacgcagggctgacagccttgcatgaccctttcacactttagccatagcaatgccaagcccagagaggctgcaaggccctggggagaacagaggccccggaaggggtggccagctgggcttcactgcagtcctcaccagacaggattgagattttaacgtgttaacttgttttctgtcttttccaaattgtttatggtagccatgcattaattttataatcagaaaagcatgttattataactcaagttaaatggctccanaaaaaaaagtaagcacttgcggccgc

SEQ ID NO: 70965 - DNA, 1012 bp, Homo Sapiens
gcggccgcaagtgctgctgcacttcgcaatggcgtacggcttccgcaacatccagaacctggtgcagaggctcaaacgagggcgctgcccctaccactacgtggaggtcatggcctgcccctcaggctgcctgaacggcgggggccagctccaggccccagacaggcccagcagagagctcctccagcacgtggagagactgtacggcatggtccgggctgaggcgcccgaggacgcgcctggggttcaggagctgtacacacactggctgcagggcacggactcggagtgtgcaggtcgcttgctgcatacgcagtaccacgccgtggagaaggccagcactggcctgggcatccggtggtaggggctgcaggaccaggactcccaggaggccgtgtccatgtgtgacagcagaaccacatgccccaagaccccagggcttcccccaaaattctgagtgagctgcagggtgtgctgggacccgagtaggagctaggactagccaggacccacagccgcctcgtcacctccagttgggtgcctctgggttcccactggctctgcccaggtggggtggggtggcccaaggcagcagaaggttccctgaggtcccagagcctgttccgttggccctgggccgaggcccacaggtgctgcccttgctgctgctggtcgggcacccaagtgcgtgaggggcttcagcctgtcccggggttgcctgaggcagagcaagacgggttctcacccctgacttctggaggcttcccttgaagctctgtgcaaaaggtgggagacagagctggacctgcaggggtggtcccgccacaaccctgcgtgtggaccctggcaggggggggtgccaggcccctggaaagcaggggttaccgttacgaggctgtggtccggggcaagccaagtacgaagcagcagccatcgcgggctgcatcatcccccagccaggtccccaccaggcctgtctcccagcgtttgtctaataaacgcacccctccta

SEQ ID NO: 70966 - DNA, 1175 bp, Homo Sapiens
  misc_feature (78)..(112): n is a, c, g, or t
agtctatccgatcactatagggcgtaccggtgattagcgaacgacgagcgcagcgagtcttgagcgaggaagcggcgnnnnnnnnnnnnnnnnnnnnnnnnnnnnnnnnnnncagtcgacggtaccggacatatgcccgggaattcggccattacggccgggggcttacagtgcaccaagatggccgcccccgtggatctagagctgaagaaggccttcacagagcttcaagccaaagttattgacactcaacagaaggtgaagctcgcagacatacagattgaacagctaaacagaacgaaaaagcatgcacatcttacagatacagagatcatgactttggtagatgagactaacatgtatgaaggtgtaggaagaatgtttattcttcagtccaaggaagcaattcacagtcagctgttagagaagcagaaaatagcagaagaaaaaattaaagaactagaacagaaaaagtcctacctggagcgaagcgttaaggaagctgaggacaacatccgggagatgctgatggcacgaagggcccagtagggagcctctctgggaagctcttcctcctgcccctcccattcctggtgggggcagaggagtgtctgcagggaaacagcttctcctctgccccgatggatgctttatttggatggcctggcaacatcacattttctgcatcaccctgagccccatttgcttcccagccctggagtttttacccggctttgcctgccacctctgcccaggacactcttccctctcgggatgtgtgatgaactcccaggagagggaagatgggagccagggcaagataggaagctctgcctgagctttccactaggcacgccagccagaccaataaaaagcgtctgtcccactctgctaagcctggttttcttgagcagagggatggaacagaggggtgagagaggcagtggccgtctccacctcagctcctgctccctctgcatcagagcccttcctttcttgggggatgggccttgccctcttctcttttcccttcctgtacctttgactaacgctcagcttccgggctgcatgcagtagacagaagaggaagaacgaacagatgtccacagctgaatctcagtgaacagaataccaggtcctggatggcagtctgcctaaagattcctttcctggct

SEQ ID NO: 70967 - DNA, 273 bp, Homo Sapiens
gggacagtgcaccaagatggccgcccccgtggatctagagctgaagaaggtttattcttcagtccaaggaagcaattcacagtcagctgttagagaagcagaaaatagcagaagaaaacattaaagaactagaacagaaaaagtcctacctggagcgaagcgttaaggaagctgaggacaacatccgggagatgctgatggcacgaagggcccagtagggagcctctctgggaagctcttcctcctgcccctccatttcccctgggtgggggg

SEQ ID NO: 70968 - DNA, 1009 bp, Homo Sapiens
aaggtagcgaggcctgggtggcgaactcggcacgaggctgaggacaacatccgggagatgctgatggcacgaagggcccagtagggagcctctctgggaagctcttcctcctgcccctcccattcctggtgggggcagaggagtgtctgcagggaaacagcttctcctctgccccgatggatgctttatttggatggcctggcaacatcacattttctgcatcaccctgagccccatttgcttcccagccctggagtttttacccggctttgcctgccacctctgcccaggacacgcttccctctcgggatgtgtgatgaactcccaggagagggaagatgggagccagggcaagataggaagctctgcctgagctttccactaggcacgccagccagaccaataaaaagcgtctgtcccactctgctaagcctggttttcttgagcagagggatggaacagagggtgagagaggcagtggccgtctccacctcagctcctgctccctctgcatcagagcccttcctttcttgggggatgggccttgccctcttctcttttcccttcctgtacctttgactaacgctcagcttccgggcctgcatgcagtagacagaagaggaagaaagaacagatgttcacagctgaatctcagtgaacagaatagcagtccctggatggcagtctgcctaaagattcctttccctgccttctcccatacattccaaaaggaagttcaacagtaagcagcacctccaagactgtctccttttggccaatatcataagatggacgccataatcctgaggcctcctagaggctgagggggcaacggtgtgatccagctggctcatcccagcccaggtgggccaattattcaattttcaagaattttgttgcaagccagttgtcaaacacagccattataattatgtaaatttgcaaattatgttaaaaacaaggacaataaatattcaaaatgcatccctaaagaacacaacaacagagc

SEQ ID NO: 70969 - DNA, 1138 bp, Homo Sapiens
  misc_feature (16)..(16): n is a, c, g, or t
  misc_feature (674)..(699): n is a, c, g, or t
  misc_feature (837)..(846): n is a, c, g, or t
  misc_feature (954)..(963): n is a, c, g, or t
tcccccgaccccagcntgtcagtccgagcacagtgcaggtttgctctgacttggcttttggctgcagtgggggtggatttcagagcctctcatggcagcatctaagtgaccagagctgcgatgagagaggcgaaggggcaatgtgagtggcgctatgggacgggccagccctgctcctgagccagccccgccctctgccccctggccctgggctctgtgctagggatggtgaagaatgggggcgtgccagcctggcaggagtgggaagcaacacgcaggggtcccggacctctccagccttgccctcacgcttacccgagctcccagtgtggttagcacagagctcacccaccttgcctggctcccagctggggcctgtcctcactggtgctccaggggaagaaacgacagcctcacttctgtatggactgctgatgtggcctgccatcctgttcagcgggcattgtctttggagcagcaggagaataggatgcctctcactcacatgccagttcctggctggccagctgctcagggctcaggctggggcctcccattgacatcctccccctacactccctctctgagcctccgtcgcccctcctgttgggtaagggtgttgagtgtgacttgtgctgaaaacctggttcatatataataaataatggtgatgnnnnnnnnnnnnnnnnnnnnnnnnnncaaacatgtgggcggcgtcgggcctctagaaactttctatacacttcttttggggcgcgggccccctaggtaaatgaacatgggcttagatgtgtccccagagataccgggaatgagtagagccctggttctcacccnnnnnnnnnnccccgcggggaaccccagagttctcaaaaaatctccatgggagacctgagggctttatctgggtttctctccaggggtctcccgcgagaccctatatataatttttannnnnnnnnntgggaccccttttcaaaaatagcgtgtgaatccttttagagattttttgcccacattggaaaacctcctccaaaacgggggagatgaaaccctaaatttccccccgggagtaaaaccccctgggccccccgtggggataatactttttccccctgggtgagaaaaaggggcgggg

SEQ ID NO: 70970 - DNA, 1403 bp, Homo Sapiens
  misc_feature (1344)..(1363): n is a, c, g, or t
aacatacagaagccactgccaatgagctccgccgagtagcaccggggcagggctagcgcttaaaggagccgcgacccctttgcagaccagagggtgacccggatgatggcggccggcgcggccctagccctggccttgtggctactaatgccaccagtggaggtgggaggggcggggcccccgccaatccaggacggtgagttcacgttcctgttgccggcggggaggaagcagtgtttctaccagtccgcgccggccaacgcaagcctcgagaccgaataccaggtgatcggaggtgctggactggacgtggacttcacgctggagagccctcagggcgtgctgttggtcagcgagtcccgcaaggctgatggggtacacacggtggagccaacggaggccggggactacaagctgtgctttgacaactccttcagcaccatctccgagaagctggtgttctttgaactgatctttgacagcctccaggatgacgaggaggtcgaaggatgggcagaggctgtggagcccgaggagatgctggatgttaaaatggaggacatcaaggagtccattgagaccatgcggacccggctggagcgcagcatccagatgctcacgctactgcgggccttcgaggcacgtgaccgcaacctgcaagagggcaacttggagcgggtcaacttctggtcagctgtcaacgtggcggtgctgctgctggtggctgtgctgcaggtctgcacgctcaagcgcttcttccaggacaagcgcccggtgcccacgtagcccctgccatggaaggaagaacgggacaaaggaggggcagcagggtgtgtgcatatgagacttgggggtccctccccaattttagtttcctgccaaaacgggagtgtgcagtcagggcctgcggtctggccccatgagtctccttccgtcctcagcgggcagggaacacctctggcttgtagaagggacggctcagtggctgcaccgacggtcctggaaatctcacatggtgggcactgcagcgttggaacgtgagcctcggatttcctggcccctctactgtaaatgtgccttagcctaagcctcccatcctgtgttagcgttgcctggtgcggggcagggcctaacaaggaaacctgggccctccaagccaggttgaggtctggtaacagaatgccaggaagggggcctggaagaccacctgccccggcccctctcctgcaggggccccacacaggcatgagggatggcccggccaaagtctaggcagaagcctcctataacaaaagggtggtgtggcctgggcattggagtcaataaattatggtcagaaaatcnnnnnnnnnnnnnnnnnnnncctgagcaggcggccgcaagcttattccctttagtgaggg

SEQ ID NO: 70971 - DNA, 221 bp, Homo Sapiens
ggcacgaggacctatttgaacaggggagggagatggatgtgggtggtggagcctgcacatagtttctgtatctcaggaaccttgtgaggtttgctttccagttccttcagtacgtcatgtcccgctggccagggtggagtggagcacatgtttttccttcccttttaactgatatttccgtgatgggagtgtgctaaaaaaaagtaaccacttgcggccgc

SEQ ID NO: 70972 - DNA, 2298 bp, Homo Sapiens
  misc_feature (1)..(1): n is a, c, g, or t
  misc_feature (1993)..(2028): n is a, c, g, or t
  misc_feature (2084)..(2102): n is a, c, g, or t
  misc_feature (2245)..(2254): n is a, c, g, or t
ntccttcaagggagctgcttggaagtggcctccccaggtgcctttggagagaactgttgcgtgcttgagtctgtgagccagtgtctgcctataggagggggagctgttagggggtagacctagccaaggagaagtgggagacgtttggctagcaccccaggaagatgtgagagggagcaagcaaggttagcaactgtgaacagagaggtcgggatttgccctgggggaggaagagaggccaagttcagagctctctgtctcccccagccagacacctgcatccctggctcctctattactcaggggcattcatgcctggacttaaacaatactatgttatcttttcttttatttttctaatgaggtcctgggcagagagtgaaaaggcctctcctgattcctactgtcctaagctgcttttcttgaaatcatgacttgtttctaattctaccctcaggggcctgtagatgttgctttccagccaggaatctaaagctttgggttttctgagggggggaggagggaactggaggttattggggttaggatggaagggaactctgcacaaaacctttgctttgctagtgctgctttgtgtgtatgtgtggcaaataatttgggggtgatttgcaatgaaattttgggacccaaagagtatccactggggatgttttttggccaaaactcttccttttggaaccacatgaaagtcttgatgctgctgccatgatccctttgagaggtggctcaaaagctacagggaactccaggtcctttattactgccttcttttcaaaagcacaactctcctctaaccctcccctcccccttcccttctggtcgggtcatagagctaccgtattttctaggacaagagttctcagtcactgtgcaatatgccccctgggtcccaggagggtctggaggaaaactggctatcagaacctcctgatgccctggtgggcttagggaaccatctctcctgctctccttgggatgatggctggctagtcagccttgcatgtattccttggctgaatgggagagtgccccatgttctgcaagactacttggtattcttgtagggccgacactaaataaaagccaaaccttgggcactgttttttctccctggtgctcagagcacctgtgggaaaggttgctgtctgtctcagtacaatccaaatttgtcgtagacttgtgcaatatatactgttgtgggttggagaaaagtggaaagctacactgggaagaaactcccttccttcaatttctcagtgacattgatgaggggtcctcaaaagacctcgagtttcccaaaccgaatcaccttaagaaggacagggctagggcatttggccaggatggccaccctcctgctgttgccccttagtgaggaatcttcaccccacttcctctacccccaggttctcctccccacagccagtcccctttcctggatttctaaactgctcaattttgactcaaaggtgctatttaccaaacactctccctacccattcctgccagctctgcctccttttcaactctccacattttgtattgccttcccagacctgcttccagtctttattgctttaaagttcactttgggcccacagacccaagagctaattttctggtttgtgggttgaaacaaagctgtgaatcactgcaggctgtgttcttgcatcttgtctgcaaacaggtccctgcctttttagaagcagcctcatggtctcatgcttaatcttgtctctcttctcttctttatgatgttcactttaaaaacaacaaaacccctgagctggactgttgagcaggcctgtctctcctattaagtaaaaataaatagtagtagtatgtttgtaagctattctgacagaaaagacaaaggttactaattgtatgatagtgtttttatatggaagaatgtacagcttatggacaaatgtacacctttttgttactttaataaaaatgtagtaggatnnnnnnnnnnnnnnnnnnnnnnnnnnnnnnnnnnnngaggggggaagaacaaaaaacaacaaaagaaccaccacgcgaacacacaccacacnnnnnnnnnnnnnnnnnnncaaacttggccgcccgcccgcccccccaaaaatttttaaaaactttgttttggccggggggcccaaaagggaaaggaaaagggccaataattgtttccccgagaaaacccggggcaaggaataggggtttggatctccccccnnnnnnnnnnccccccgggcggaaccccccagcgttttttaaacaaaaccccaa

SEQ ID NO: 70973 - DNA, 1323 bp, Homo Sapiens
cccacagctaacatggcggcgccctgtgtgtcctacggcggagcagtttcgtaccggcttcttctctggggtaggggtagcctcgcccggaagcaaggcctctggaaaaccgcggccctgagttgcaaacaaatgtcagatcccagatattaaggctaagacatactgcatttgtaataccaaagaaaaacgttcctacctcaaaacgtgaaacttacacagaggattttattaaaaagcagattgaagagttcaacataggaaagagacatttagccaacatgatgggagaagatccagaaactttcactcaagaagatattgacagagctatgcttaccttttcccaagtggtttgttgagaaacgagccaggccagtaatgaagcatcctgaacagatttttccaagacaaagaggatgtatatggaatgttactcaatttagaaaaacatcaaagtcactcgcaagccaaaagtctgctcccagaaaaaacggtaaccaggagacgttgattggcagcagatggctgattaaggaggaacctagaaagaaatgttagtggaaaaactgtcagatctagattatatgcagttcattcggctgctagaaaagttattgacatcgcagtgtggtgctgctgaggaagaattttgtgcagaggtttcgaagaagtgtaactcttgaatcaaaaaaacagctgattgaacctgtacagtatgatgagcaaggaatggcctttagcaaaagcgaaggtaaaagaaagactgcaaaagcagaagcaattgtttataaacatggaagtggaagaataaaagtaaatggaattgattaccagctttacttcccgatcacacaggacagagaacagctgatgttccctttccactttgttgaccggctgggaaagcacgacgtgacctgcacagtctcagggggcgggaggtcagcgcaggctggagcaatacgactggcaatggcaaaagccttgtgcagctttgtcaccgaggacgaggtcgagtggatgagacaagctggactacttactactgatccacgtgtgagggaacggaagaagccaggccaagagggagcccgcagaaagtttacgtggaagaaacgctaagggtttgctcccaggaaaggagaggaagagctatatatatgtgccggcatgtggcagacacacagtaaataatggctgaccagcatgagggcagtactgtcagaaatttctttgagctgtgagatggatttatttttaaatgctactttgtaaaggtgacctttaaaaaataaaaggaaaataaagaatgttagtttc

SEQ ID NO: 70974 - DNA, 821 bp, Homo Sapiens
gggggagctcccacagctaacatggcggcgccctgtgtgtcctacggcggagcagtttcgtaccggcttcttctctggggtaggggtagcctcgcccggaagcaaggcctctggaaaaccgcggcccctgagttgcaaacaaatgtcagatcccagatattaaggctaagacatactgcatttgtaataccaaagaaaaacgttcctacctcaaaacgtgaaacttacacagaggattttattaaaaagcagattgaagagttcaacataggaaagagacatttagccaacatgatgggagaagatccagaaactttcactcaagaagatattgacagagctattgcttaccttttcccaagtggtttgtttgagaaacgagccaggccagtaatgaagcatcctgaacagatttttccaagacaaagagcaatccagtggggagaagatggccgtccatttcactatctcttctatactggcaaacagtcatactattcattaatgcatgatgtatatggaatgttactcaatttagaaaaacatcaaagtcacttgcaagccaaaagtctgcttccagaaaaaactgtaaccagagacgtgattggcagcagatggctgattaagggaggaactagaagaaatgttaggtggaaaaaactgtcagatctagattatatgcagttcattcggctgctagaaaagttattgacatcgcagtgtggtgctgctgagggaagaatttgtgcagaggtttcgaagaagtgtaactctttgaatcaaaaaaacagctggatggaacctgttacagtatgaatgag

SEQ ID NO: 70975 - DNA, 366 bp, Homo Sapiens
ctcagacaacagtacctataaatttatgaacctgcttttcttctgggcagcatgcatattaatggttcctaaaggcttctctttttatgctgcagctggactacttactactgatccacgtgtgagggaacggaagaagccaggccaagagggagcccgcagaaagtttacgtggaagaaacgctaagggtttgctcccaggaaaggagaggaaaacctatatatatgtgccgacatgtggcaaacacacagtaaataatggctgaccagcatgagggcagtactgtcagaaatttctttgagctgtgagatggatttatttttaaatgctactttgtaaaggtgacctttaaaaaataaaaggaa

SEQ ID NO: 70976 - DNA, 1189 bp, Homo Sapiens
  misc_feature (983)..(996): n is a, c, g, or t
  misc_feature (1046)..(1055): n is a, c, g, or t
gcggccgcctcgccgcagaagtatctccgaatggagccatcccccttcggcgacgtctcctcccgcctcaccacagaacaaattctgtacaacataaaacaagagtataaacgaatgcagaagagaagacatttagaaacgagtttccaacagacagatccgtgttgtacttctgatgcacagccacatgcatttctcctcagtggaccagcttcaccagggacttcatctgcagcatcctcaccattaaaaaaagaacagcccttatttactctacggcaggttgggatgatctgtgaacgtttgttgaaagaacgtgaagagaaagttcgagaagaatatgaagaaatattgaacacaaaacttgcagaacaatatgatgcgtttgtgaagtttacgcatgatcaaataatgcgacgatatggagaacagcctgctagctatgtttcatgaatcacgtatcctgcatttgtgggctgccttgttccttgttgagttgttgcaagaggtcccaattatgacatgcagcaatgccaataccccttctgtgaatacaggttatttcaagctttcgtcagtggcaaccactcttaggcagcagcaactggttttggaaatttccctgatgtcagtaccacctggatgtggacctttgctacctgtattaataccagtggcctcattttgctgtatcattacaatttggcttcttatattaatgtttgaaaaggattaaagctggtattctagaacatgcccttcactggttgtgtaaataaaactgtagaatgacacttcagatgaagttagtgtgattttaattgtgcactacaaccgagctgtaaccagttactaattttaggaatgtaatcccagggacaatattaagcaaatagcctgcagtgcttcctgtgaaatagtgaaggaggagggcatttctgtattccaggacttcttggggtttcagaatgggtttgtatgannnnnnnnnnnnnngtagttttatttattctatcagtctttttaacaaatgtttattgctgcannnnnnnnnnccagtgtatcattgttttactgcccttgtagtactggaatttagttggaagaataaaacatttacttctattttgcttgtttcttaatgtacagatggggttagtatttgaataaagttggtgttttaaaacgt

SEQ ID NO: 70977 - DNA, 1297 bp, Homo Sapiens
  misc_feature (1189)..(1231): n is a, c, g, or t
caaggagtttgtggctgacatcttccgccgggccaaagaggccaagggcggggtccctgaggaagcccggcctgccctgtgcccaggaccctctggcagccgctgccgtgcgcactctgagcccctagccctgtgtggagagacggcaccccgggacagcccccctgcctcggaggcacctgcctccgagcctggctatgtcaactacaccaagctgtactatgtgctggagtccggagaggggacggagccggaggatgagttggaggacgacaagatctccctgcccttcgtggtgactgatcttcgtggccgcaacctgcggcccatgcgggagcggactgctgtccagggccagtacctgacagtggagcagctcacactagacttcgaatatgttatcaatgaggtcatccgccacgacgctacctggggccatcagttctgttctttcagcgactatgacatcgtcattctggaggtctgcccagaaaccaaccaggtcctcatcaacattggcctgctgctcctggccttcccgtcccccactgaggagggccagctccgaccaaagacctatcacaccagcctcaaggtggcatgggacctcaacacagggatcttcgagacagtcagtgtaggcgacctgactgaggtcaaagggcagaccagcggcagtgtctggagctcctaccgcaagagctgcgtggacatggtcatgaagtggctggtgccggagagcagcggccgctacgtcaacaggatgaccaatgaggcgctgcacaaagggtgctccctgaaggttctggcggacagcgagcgatatacgtggatcgtgctgtgagggccaggccgccccggacactgactccaactacctccgtggcctgggaccggcccccttcctggggtggcctcttcctggccggctggcccaccgactgatgaccggcactagtgttagcctgcggaacggggctgggcagggcagcctctgttggcctgagggtctggacgctttttatttatgcctatttaagttgggaaggggcagagagagggcgccccctgccccaccagcctgagtgccccgccttcaccccgagctgggcatgggcctggcccctcgtgcatttgcccttttctcggctacagctgtggacgttgccctcggggaggtcgaatggannnnnnnnnnnnnnnnnnnnnnnnnnnnnnnnnnnnnnnnnnngccggcaacctggccatccccattccgttcttcttcatgtaataaatgttttaatttctgaccgtc

SEQ ID NO: 70978 - DNA, 455 bp, Homo Sapiens
  misc_feature (353)..(395): n is a, c, g, or t
gcggacagcgagcgatatacgtggatcgtgctgtgagggccaggccgccccggacactgactccaactacctccgtggcctcttcctggccggctggcccaccgactgatgaccggcactagtgttagcctgcggaacggggctgggcagggcagcctctgttggcctgagggtctggacgctttttatttatgcctatttaagttgggaaggggcagagagagggcgccccctgccccaccagcctgagtgccccgccttcaccccgagctgggcatgggcctggcccctcgtgcatttgcccttttctcggctacagctgtggacgttgccctcggggaggtcgaatggannnnnnnnnnnnnnnnnnnnnnnnnnnnnnnnnnnnnnnnnnngccggcaacctggccatccccattccgttcttcttcatgtaataaatgttttaatttctg

SEQ ID NO: 70979 - DNA, 344 bp, Homo Sapiens
gcggccgctgctctccggcaccagccacttcatgaccatgtccacgcagctcttgcggtaggagctccagacactgccgctgcggggccagggggtgagtggctctcgtcgccttggccgcgccctgaccctgccccccagccctgcctcacctggtctgccctttgacctcagtcaggtcgcctacactgactgtctcgaagatccctgtgttgaggtcccatgccaccttgaggctggtgtgataggtctttggtctacagtggagagggacataggacaaacgctgggacagccgggctcctgaaccaggccccaggctaccctgagggccttttgtcttt

SEQ ID NO: 70980 - DNA, 1259 bp, Homo Sapiens
  misc_feature (1143)..(1177): n is a, c, g, or t
gctgcccccatatgactgtcactagtcaacagcccgggctggtaacacgaaccctaaccgagcttctcaccaggttctccgccatcaggggatgtaggttcccttggtcctgggtttgggaaaagcgggaaaagggaagtagtgtaccagccttctgtctctttcaggaaaaaggagcctgtttgggtccacatgtaatttctccgtgtgtaactgaaccgtaggtgatatttcaccgccagcggcaggggctccttgctgtggttgaaggggtgctcgaagaccacggcggccagcacgctggacgagcagttgtcgtacctaatgtagtcctcaaagtccttctcggagggaaagccgcgcactcgcatgttgatcacaagtgccctgcgcactgtctcagtgacggtcttggcagcgtcactgtgagaagggatgtaggcaagctcccaggtgtctcctggcggagggaaggtgaagaacagaggcagctcctggatggactggcccgggtagatggtggcgttgggcacattttccgactgaatcttcaagcggagccagatgaggatcccagaaaacagcaatggcaggaagagttccaggaccgtcaccaggaccttccgcttctgcagggtgtagttcttccagaggaggagcgccagctgcctgagcacagccatcgtcttgctgaaagggacgcccagtgctgctagagaagtaggtggtctgagtaagttcaagtaggcgctgcaacccgcaggaaataggagaaacgtgctctgaaaactgagtgtaaagagggcgaggtgtgcagacgtggctgctctgtcctggagaggcagggaaggcgatggaggaggggcagtctagagagcccctggtgctggtccactcgctacaactgcaggcagagaggagtccttcccgctcagcgtccttcatgtgcggaaaagcctccttgactcacagtggaagagtttcaggttcagttgctcagctccacactcatggctgggtcccagaagaggctccacacagcaggtctcccttcaggactactggggaactggccaggaggaggcggctccccccggccgtaatggccgaattcccgggcatatgtccggtaccgtcgactgnnnnnnnnnnnnnnnnnnnnnnnnnnnnnnnnnnncggccgcttcctcgctatctactcgctgcgctcggtcgttcgtaacagaggagctagcgccctaatagtgatctatcgatcg

SEQ ID NO: 70981 - DNA, 611 bp, Homo Sapiens
gcggccgctccaacacagaatggccatgtgctggggtgcaaagcatgagcgcaggtccgcgtggaactcgtgcaggagttcctgcgccagctgctcaccttctacaaggtggctggcggctgccaggagcgcagccagggctgcttccccgtctacctggtctacagtgacaagcgcatggtgcagacggccgccggggactactcaggcaacatcgagtgggccagctgcacactctgttcagccgtgcggcgctcctgctgcgcgccctctgaggccgtcaagtccgccgccatcccctactggctgttgctcacgccccagcacctcaacgtcatcaaggccgacttcaaccccatgcccaaccgtggcacccacaactgttgctgttgctgttgctgttgctgttggcatcttgctgctaatcctgaggctggtagcagaatgcacattggaagctcccaccccatattgttcttcaaagtggaggtctcccctgatccagacaagtgggagagcccgtgggggcaggggacctggagctgccagcaccaagcgtgattcctgctgcctgtattctctattccaataaagcagagtttgacaccgtc

SEQ ID NO: 70982 - DNA, 1234 bp, Homo Sapiens
aaggctaggtacgaggctgggtgttgaatcggcacgaggggaagatggagaactacgagctgatccactctagtcgcgtcaagtttacctaccccagtgaggaggagattggggacctgacgttcactgtggcccaaaagatggctgagccagagaaggccccagccctcagcatcctgctgtacgtgcaggccttccaggtgggcatgccaccccctgggtgctgcaggggccccctgcgccccaagacactcctgctcaccagctccgagatcttcctcctggatgaggactgtgtccactacccactgcccgagtttgccaaagagccgccgcagagagacaggtaccggctggacgatggccgccgcgtccgggacctggaccgagtgctcatgggctaccagacctacccgcaggccctcaccctcgtcttcgatgacgtgcaaggtcatgacctcatgggcagtgtcaccctggaccactttggggaggtgccaggtggcccggctagagccagccagggccgtgaagtccagtggcaggtgtttgtccccagtgctgagagcagagagaagctcatctcgctgttggctcgccagtgggaggccctgtgtggccgtgagctgcctgtcgagctcaccggctagcccaggccacagccagcctgtcgtgtccagcctgacgcctactggggcagggcagcaggcttttgtgttctctaaaaatgttttatcctccctttggtaccttaatttgactgtcctcgcagagaatgtgaacatgtgtgtgtgttgtgttaattctttctcatgttgggagtgagaatgccgggcccctcagggctgtcggtgtgctgtcagcctcccacaggtggtacagccgtgcacaccagtgtcgtgtctgctgttgtgggaccgttgttaacacgtgacactgtgggtctgactttctcttctacacgtcctttcctgaagtgtcgagtccagtccttttttgctgttgctgttgctgttgctgttgctgttggcatcttgctgctaatcctgaggctggtagcagaatgcacattggaagctcccaccccatattgttcttcaaagtggaggtctcccctgatccagacaagtgggagagcccgtgggggcaggggacctggagctgccagcaccaagcgtgattcctgctgcctgtattctctattccaataaagcagagtttgacaccgtcaaaa

SEQ ID NO: 70983 - DNA, 527 bp, Homo Sapiens
  misc_feature (17)..(17): n is a, c, g, or t
  misc_feature (82)..(128): n is a, c, g, or t
tgtggatcacgtgaggnctccattgaagaacaatatggggtgggagcttccaatgtgcattctgctaccagcctcaggattnnnnnnnnnnnnnnnnnnnnnnnnnnnnnnnnnnnnnnnnnnnnnnnagaggactggactcgacacttcaggaaaggacgtgtagaagagaaagtcagacccacagtgtcacgtgttaacaacggtcccacaacagcagacacgacactggtgtgcacggctgtaccacctgtgggaggctgacagcacaccgacagccctgaggggcccggcattctcactcccaacatgagaaagaattaacacaacacacacacatgttcacattctctgcgaggacagtcaaattaaggtaccaaagggaggataaaacatttttagagaacacaaaagcctgctgccctgccccagtaggcgtcaggctggacacgacaggctggctgtggcctgggctagccggtgagctcgacaggcagctcacggacacacaggttctcccactggcg

SEQ ID NO: 70984 - DNA, 821 bp, Homo Sapiens
  misc_feature (85)..(157): n is a, c, g, or t
aacgggtgatgcggttgatgaggaggaggaagaagaggaggacgtggctgagaaccgctactttgaaatggggcccccagacgtnnnnnnnnnnnnnnnnnnnnnnnnnnnnnnnnnnnnnnnnnnnnnnnnnnnnnnnnnnnnnnnnnnnnnnnnncgcctggctctggaatgggccctgggcgcggacgaggacttcctgctggagcacatccgcatcctcaaggtgctgtggtgcttcctgatccatgtgcagggcagtatccgccagttcgccgttctgacttgtgctcaccgacttcggcctcgcagtctctcgatgatcccgcaccaggagtctcggcggcagcagtccagcacatcctctcctcctctgcggctttgtcttttgcttcccgcatggcgacctcaccgaagtatggcttcctcatgccggagctgtgtctggtgctcaaggtacggcacagtgagaacacgctcttcattatctcggacgccgccaacctgcacgagttccacgcggacctgcgctcatgctttgcaccccagcacatggccatgctgggtagccccatcctttacgggagccacaccagcctgcaggagttcctgcgccagctgctcaccttctacaagggggctggcggctgccaggagcgcagccagggctgcttccccgtctacctggtctacagtgacaagcgcatggtgcagacggccgccggggactactcaggcaacatcgagtgggccagctgcacactctgttcagccgtgcggcgctcctgctgcgcgccctctgaggccgtcaagtccgccgc

SEQ ID NO: 70985 - DNA, 1005 bp, Homo Sapiens
  misc_feature (911)..(914): n is a, c, g, or t
  misc_feature (918)..(919): n is a, c, g, or t
  misc_feature (921)..(923): n is a, c, g, or t
  misc_feature (927)..(928): n is a, c, g, or t
  misc_feature (930)..(935): n is a, c, g, or t
gggatgagtcactgttaggatgtgagcagtgggccttcctccgtggccaacctgcagagagctttcccacctactttgtaccttgattgcctacaaagttattatgttcacatagcagcgtaccatataaaagcctcctgccctcttagcttgtgggcacatgggcacatacagactcacatacagacacacacatatatgtacagacatgtactctcacacatcacaggcacctagcatacacacgtttttctaggtacagctcccaggaacagctaggtgggaaagtcccatcactgagggagcctaaccatgtccctgaacaaaaattgggcactcatctattccttttctcttgtgtccctactcattgaaaccaaactctggaaaggacccaatgtaccagtatttatacctctaatgaagcacagagagaggaagagagctgcttaaactcacacaacaatgaactgcagacacagctgttctctccctctctccttcccagagcaatttatactttaccctcaggctgtcctctggggagaaggtgccatggtcttaggtgtctgtgccccaggacagaccctaggaccctaaatccaatagaaaatgcatatctttgctccactttcagccaggctggagcaaggtaccttttcttaggatcttgggagggaatggatgcccctctctgcatgatcttgttgaggcatttagctgccatgcacctgtccccctttaatactgggcattttaaagccatctcaagaggcatcttctacatgttttgtacgcattaaaataatttcaaagatatctgagaaaagccgatatttgccattcttcctatatcctggaatatatcttgcatcctgagtttataataataaataatattctaccttggnnnnaaanngnnngaannannnnnnccctgtccggccgccctcggcccctcaagaaagctttcctagaccaattctttttggcgccgcggggccc

SEQ ID NO: 70986 - DNA, 777 bp, Homo Sapiens
  misc_feature (295)..(344): n is a, c, g, or t
acaaataagcaaatataaagcttaatctcctccttgatatttcaacatagttgttaccttccgccatttcaccatagaaactgtcaaattccaagggggaatatctaccaaaagtataagcttatgcttctgattctctcttctttcctcctcctcccaaatcactctcttctgactggctactgctaaggacaacaaactgcccctcactactggcttggtttggtctactggaagcagctatcaaccgactttgttcttccaagtccttttcaatctgtttttgtttattgannnnnnnnnnnnnnnnnnnnnnnnnnnnnnnnnnnnnnnnnnnnnnnnnngatgccctacgatccagttcagcatgcaaagctatctgttttgccagtccaacagaatcacatatcttttccccctcattgtttgactcaaatatatagcagactgatgacagattactttcacttctcccgcttgatgtccgaagaacaaatccaaaaaggcgcttattttcctggtgtgtagcatacaaaactacacaaggtaatggaaacgtgagccttgtaacttgtgtctgtggatcaattaactttaaacagtcacaagtgactaataaatgcgattctgtcatacgaaagatgttatggatggcccgggcagctaagatttggcgcatagtttcataaacaacatctggatggtcatctgatttcacctccattgaaccaaggaatcggacactaaataactgatgaagaataaatcttcagtttc

SEQ ID NO: 70987 - DNA, 621 bp, Homo Sapiens
  misc_feature (420)..(454): n is a, c, g, or t
catgaagccttggaaggcccgctggttcgtgctggacaagaccaagcaccagctgcgctactacgaccaccgtgtggacacagagtccaagggtgtcatcgactcggcgaaggtggaggctgtggcacctggcacgcccactatgggtgcccctaagaccgtggacgagaaggccttctttgacgtgaagacaacgcgtcgcgtttacaacttctgtgcccaggacgtgccctcggcccagcagtgggtggaccggatccagagctgcctgtcggacgcctgagcctcccagccctgcccggctgctctgcttccggtcgttaccgaccactaggggtgggcagggccgccccggccatgtttacagccccggccctcgacagtattgaggccccgagcccccagcacttgtgtgtacannnnnnnnnnnnnnnnnnnnnnnnnnnnnnnnnnntaacttattttggcgtcacagctgagcaccgtgccgggaggtggccaaggtacagcccgcaatgggcctgtaaatagtccggccccgtcagcgtgtgctggtccagccagcggctgcaggcgagtttctagaaccagagtctatataaagagagaactaacgccaaa

SEQ ID NO: 70988 - DNA, 748 bp, Homo Sapiens
  misc_feature (101)..(101): n is a, c, g, or t
  misc_feature (524)..(586): n is a, c, g, or t
accagagtagtgctcaaccacatccgctcccgtcaggtgcccgccgcagcaccagcaccctgtacagccagttccagacagcagagagtgagaacaggtcntacgagggcactctgtacaagaaggggccttcatgaagccttggaaggcccgctggttcgtgctggacaagaccaagcaccagctgcggtactacgaccaccgtgtggacacagagtgcaagggtgtcatcgacttggcggaggtggaggctgtggcacctggcacgcccactatgggtgcccctaagaccgtggacgagaaggccttctttgacgtgaagacaacgcgtcgcgtttacaacttctgtgcccaggacgtgccctcggcccagcagtgggtggaccggatccagagctgcctgtcggacgcctgagcctcccagccctgcccggctgctctgcttccggtcgttaccgaccactaggggtgggcagggccgccccggccatgtttacagccccggccctcgacagtattgaggnnnnnnnnnnnnnnnnnnnnnnnnnnnnnnnnnnnnnnnnnnnnnnnnnnnnnnnnnnnnnnntaacttattttggcgtcacagctgagcaccgtgccgggaggtggccaaggtacagcccgcaatgggcctgtaaatagtccggccccgtcagcgtgtgctggtccagccagcggctgcaggcgagtttctagaaccagagtctatataaagagaactaacgcc

SEQ ID NO: 70989 - DNA, 978 bp, Homo Sapiens
ggaggtcctccatgcgcagtcatgagtcgcttcaagtttatcggaagctgaagagggaactacccttttcattccgatcaattaatacgagagaaaacctgtatctggtgacagaaactctggagacggtaaaggaggaaaccctgaaaagcgaccggcaatataaattttggagccagatctctcagggccatctcagctataaacacaagagaaggatggtgcttcatcctgtttaggaaagtctttgggttcggaggattccagaaacatgaaggagaagttggaggacatggagagtgtcctcaaggacctgacagaggagaagagaaaagatgtgctaaactccctcgctaagtgcctcggcaaggaggatattcggcaggatctagagcaaagagtatctgaggtcctgatttccagggagctacacatggaggacccagacaagcctctcctaagcagcctttttaatgctgctggggtcttggtagaagcgcgtgcaaaagccattctggacttcctggatgccctgctagagctgtctgaagagcagcagtttgtggctgaggccctggagaaggggacccttcctctgttgaaggaccaggtgaaatctgtcatggagcagaactgggatgagctggccagcagtcctcctgacatggactatgaccctgaggcacgaattctctgtgcgctgtatgttgttgtctctatcctgctggagctggctgaggggcctacctctgtctcttcctaactacaaaagccctttctccccacaagcctctgggttttccctttaccagtctgtcctcactgccatcgccactaccatcctgtcaccagtgggacctctttaaaacaagcagccaaccattctttgatgtatcccattcgctccatgttaacatccaaaaccagcctggatttcatacatggacttctgattaaaagtggcaggttgtgcatgtt

SEQ ID NO: 70990 - DNA, 461 bp, Homo Sapiens
  misc_feature (278)..(278): n is a, c, g, or t
tctcttcgaaggaagaagaacaacttctgttgacatcggctacacccattgtcctttgaacaagacaaacaacccttgcaaatgggatttgatacataactagctcgcttactgcgtctccatcggttgccttggcagtggctgtaatccatgcagttcagaatgatgagggcaaaggagaaaaggcgaaactgcatctgggcggtcgggcgggggagagacgcctctcaaagtctaggaactggagggttcgcccaaagagccggcgccggccgcgnctgctggggaggactcaagagggagactcggccactcaacccccggccgcaccggtcagttcagcgcgatcagcatctctccgccacgaaccgtgcgcacgtctcgggcggcgcggcctccctaggcgcggtgctccatcccgggctcgggaagcgagccgcttggttagcacgtgggctggg

SEQ ID NO: 70991 - DNA, 847 bp, Homo Sapiens
  misc_feature (42)..(83): n is a, c, g, or t
  misc_feature (87)..(121): n is a, c, g, or t
ggaggaatgtatagactcactatagggcgctagcgcgttatnnnnnnnnnnnnnnnnnnnnnnnnnnnnnnnnnnnnnnnnnnccgnnnnnnnnnnnnnnnnnnnnnnnnnnnnnnnnnnncagtcgacggtaccggacatatgcccgggaattcggccattacggccgggggagctctgcccggctgcagggatggcggggaggggtaagctcatcgcagtgatcggagacgaggacacggtgactggtttcctgctgggcggcataggggagcttaacaagaaccgccatcccaatttcctggtggtggagaaggatacaaccatcaatgagatcgaagacactttccggcaatttctaaaccgggatgacattggcatcatcctcatcaaccagtacatcgcagagatggtgcggcatgccctggacgcccaccagcagtccatccccgctgtcctggagatcccctccaaggagcacccatatgacgccgccaaggactccatcctgcgcagggccaggggcatgttcactgccgaagacctgcgctaggggactcctcatagccctcagcccttccctcgtatccaggcactctccccaggcttgccatcaagccttctttacttttggagcctctgatttccaagttccctgctccgttcccactccatttaagaggctaggtgaggcgcttctaggttgctgggggctctgctggttaagggaacaggaagcctgaccatctccctcccactacctctttccctgtgctgttacacagtgtcatcgttgatgttaatttacagtcatattctggttctctctaaccaaaaagaattacac

SEQ ID NO: 70992 - DNA, 919 bp, Homo Sapiens
  misc_feature (729)..(735): n is a, c, g, or t
  misc_feature (737)..(741): n is a, c, g, or t
  misc_feature (743)..(743): n is a, c, g, or t
  misc_feature (746)..(747): n is a, c, g, or t
  misc_feature (750)..(750): n is a, c, g, or t
  misc_feature (753)..(755): n is a, c, g, or t
cagtcgacggtaccggacatatgcccgggaattcggccattacggccggggagtggcttctggtgctctagggtgagctctgcccggctgcagggatggcggggaggggtaagctcatcgcagtgatcggagacgaggacacggtgactggtttcctgctgggcggcataggggagcttaacaagaaccgccatcccaatttcctggtggtggagaaggatacaaccatcaatgagatcgaagacactttccggcaatttctaaaccgggatgacattggcatcatcctcatcaaccagtacatcgcagagatggtgcggcatgccctggacgcccaccagcagtccatccccgctgtcctggagatcccctccaaggagcacccatatgacgccgccaaggactccatcctgcgcagggccaggggcatgttcactgccgaagacctgcgctaggggactcctcatagccctcagcccttccctcgtttccaggcctctccccaggcttgccatcagccttctttactttttgagcctctgatttccaattccctgctccttcccactccattaagaggctaggtgaggcgcttctaggttgctggggctctgctggttaaggaacaggaagcctgaccatctccctccactacctcttccctgtgctgttacacagtgtcattgttgatgttaaattaaagtcatattcttgcttctctcccaaccnnnnnnncnnnnncnccnnaanccnnnccttgtcgggccgcctcgggccctcggagagcttttcctagaccatttcgctttggcgcggcgggccccagttagggtaagtgaaacatggggccataagctggttttccctaaggaggatccctgggccatggactaacggcctctgggattctccccaaatt

SEQ ID NO: 70993 - DNA, 1328 bp, Homo Sapiens
gctaggtagcgaggctgggtggtgaatcggcacgaggatttattgtcgcggggaagctgcggccgcctcgcacccggaacaacaaagcaaggaagacggagtccgagcctcgggggctcctagcaacgggccggggcgggagttccatggagactggggagcgcgcccgtctcatcctcatccttgtcctccagcttctccttcgcatccgacgcaaccggcagcagcgctgccgccgcgtcctcagccaccgctccctcttcccacggatgtgatcttcgtggtggaaagctaaattttaaaaccaccccaatggatgcagacagtgatgttgcattggacattctaattacaaatgtagtctgtgtttttagaacaagatgtcatttaaacttaaggaagattgctttggaaggagcaaatgtaatttataaacgtgatgttggaaaagtattaatgaagcttagaaaacctagaattacagctacaatttggtcctcaggaaaaattatttgcactggagcaacaagtgaagaagaagctaaatttggtgccagacgcttagcccgtagtctgcagaaactaggttttcaggtaatatttacagattttaaggttgttaacgttctggcagtgtgtaacatgccatttgaaatccgtttgccagaattcacaaagaacaatagacctcatgccagttacgaacctgaacttcatcctgctgtgtgctatcggataaaatctctaagagctacattacagattttttcaacaggaagtatcacagtaacagggcccaatgtaaaggctgttgctactgctgtggaacagatttacccatttgtgtttgaaagcaggaaagaaattttataattcaccacttaattggttagaatctctaactgagcaccttttaaacctgctgcacattggactcaaaaggaaaactggaccaacaataattgaggaaatagactcttttattcattcacggctacagtgtaagctccagtccctttggattttattccaaaccttgctgtaatataaaaggaagtttacaagacatgatattgctgcttttacaaaaggacattctatttattttcgcagtaattctcatgtccccataagcagagctgtcacagtgtgcactaccttagattgttttattgtcgtcattgttatttttttccattttgagctaatgtgttttatttgtgaatagtcttttacatttttgtatgctgaatatgggcaccaaagaacctgtaaaagttatctttttcaattgaatgtgcacaaataaaagtttggaaaagaaaaaa

SEQ ID NO: 70994 - DNA, 689 bp, Homo Sapiens
  misc_feature (19)..(19): n is a, c, g, or t
aactcttccgaacacagtntgaaaaccactgccccagacagcaatatgtttgacctgaatggcattccaatcttttctgtacctccactcagcacagttcatgttcagtagatgctgaacattcttagaaatactgtgtgtgaacttagaaaagtgcaagaagacaggcatgtctttgaccccaggaatgatcatttgctgaagatggtgtcaagtgaacctagattaacagccctccactccagatggatatccagtgattcctagaatgggatatagccagagaacaattctatgcaccctacactgacagactcccttaagcaacaccagatgctctactggtacttgaagtacatgactttgaagtcttgaccctccatgaatacctgaattatcagcaagcgggttttgaagctggtgcctcattgaggccatattagagcaacttgtacatttgacctcttgttatcagccatggtactctacttcgtgtgcaagagataactatgaaagccaaattcaaatactggcaacatttcctaaaggggctcaatatctatcattcgtcttcttttccaaactacacatcactgtatgactcaaccagtagcagttatattgccccttggtttttattcagtttaactactgtttccaagataaatgagctaataagctttaaaaaa

SEQ ID NO: 70995 - DNA, 427 bp, Homo Sapiens
ttgtgaaaaagtatatttctatgcaatacgatgaattttcctcccagaatatttagaaatgttgaagggataacagttcacatccaggtaaaatttaactggtggcttaatgactctgcacctttttctcaggaattatgcctaagttgtctgccttttctaccaccaaaaagacttttagttttctatgctttctcctgaattttggtagggtaaggtatttctatgtcaaaggcacagccttgatgatctcagggaaaaattttaatcactgtgtataatgatactgaaccttgattaataacagaaattcaggatgtaaagccacagaatgggatttattaatgtgggatacctcagactgtttgttttctttctgggaagaaaagtgtgttctataatgaataaatatagagtggtttttaaa

SEQ ID NO: 70996 - DNA, 1925 bp, Homo Sapiens
ggcgccggcgtcgcggttgctcgcgctctgggcgctggcggctgtggctctacccggctccggggcggagggcgacggcgggtggcgcccgggcgggccgggggccgtggcggaggaggagcgctgcacggtggagcgtcgggccgacctcacctacgcggagttcgtgcagcagtacgccttcgtcaggcccgtcatcctgcagggactcacggacaactcgaggttccgggccctgtgctcccgcgacaggttgctggcttcgtttggggacagagtggtccggctgagcaccgccaacacctactcctaccacaaagtggacttgcccttccaggagtatgtggagcagctgctgcacccccaggaccccacctccctgggcaatgacaccctgtacttcttcggggacaacaacttcaccgagtgggcctctctctttcggcactactccccacccccatttggcctgctgggaaccgctccagcttacagctttggaatcgcaggagctggctcgggggtgcccttccactggcatggacccgggtactcagaagtgatctacggtcgtaagcgctggttcctttacccacctgagaagacgccagagttccaccccaacaagaccacgctggcctggctccgggacacatacccagccctgccaccgtctgcacggcccctggagtgtaccatccgggctggtgaggtgctgtacttccccgaccgctggtggcatgctacgctcaaccttgacaccagcgtcttcatctccaccttcctcggctagccaaaacagctggcaggactgccggtcacacaccagcacgtcccacctcgtgctcacggattttattacacagatagtggcggcaatggcctcagcccagcccaccctcacctgcttttccagcccacaaagggggacgatcacggcccagcaaaagcgatgctgagaggggaaacagtccagagtccaacagcagaacttgggggaagcggtcggggtggccaggaacataaactatgtataggggccgggggcttctgcccagggctcccctggaccaggacgccaggtagggcagggaacctcagtagtcctccacccagccattctcagagatgaatgcgtcaataacctccttcatagccaagttggggatgagctgttcctgggtcagggggctccgggtcacggggtcaaaatgacccacacgctgcagtgacaagaagggcagagggcagtcatggggcccaggaccatgccactggccctgctcccccagccgcaggcctcacctgcaggtgctcctcgatgtccttgcggtcgtaggtgatgccactgggcgtgatgcacggctcccgcatcagctcaaagctgatcttgccacacaggtagtcggggatgtctcgcttctgtggcacaggggcacacggtcagaggctgaaaaggggcactgcacgagcacctgccagccatcggcagcaagcgacacacactcaccttcctcttctcatccacctgagaaaaaagctcgtccatgtccgccatgtacttgtcctgtgaagagttgagtgctgtgcttgggggagacaccccacctccctcctccatggggcacagacccaacacaaggcggggatgctcccacgccacgtgcacacacacagacccacatgtgggtggggggcaccctcacgtgcttggcctcaatgcaggcctgctgggcccggacgtggctgtcgtcctcatcaccctcgtggtttcgctggcactcttccagctccctgggggttgaccaggagccggtcagagatggacctggccagatgtctgaccacaccccaatctcagagctaacatccacacttccccacatttcctgcttgccagtaaagccttcgataaacaaaaaaaa

SEQ ID NO: 70997 - DNA, 1187 bp, Homo Sapiens
gaagggcaaggaggagaaggagggcggcgcacggctgggcgctggcggcggaagccccgagaagagcccgagcgcgcaggagctcaaggagcagggcaatcgtctgttcgtgggccgaaagtacccggaggcggcggcctgctacggccgcgcgatcacccggaacccgctggtggccgtgtattacaccaaccgggccttgtgctacctgaagatgcagcagcacgagcaggccctggccgactgccggcgcgccctggagctggacgggcagtctgtgaaggcgcacttcttcctggggcagtgccagctggagatggagagctatgatgaggccatcgccaatctgcagcgagcttacagcctggccaaggagcagcggctgaacttcggggacgacatccccagcgctcttcgaatcgcgaagaagaagcgctggaacagcattgaggagcggcgcatccaccaggagagcgagctgcactcctacctctccaggctcattgccgcggagcgtgagagggagctggaagagtgccagcgaaaccacgagggtgatgaggacgacagccacgtccgggcccagcaggcctgcattgaggccaagcacgacaagtacatggcggacatggacgagcttttttctcaggtggatgagaagaggaagaagcgagacatccccgactacctgtgtggcaagatcagctttgagctgatgcgggagccgtgcatcacgcccagtggcatcacctacgaccgcaaggacatcgaggagcacctgcagcgtgtgggtcattttgaccccgtgacccggagccccctgacccaggaacagctcatccccaacttggctatgaaggaggttattgacgcattcatctctgagaatggctgggtggaggactactgaggttccctgccctacctggcgtcctggtccaggggagccctgggcagaagcccccggcccctatacatagtttatgttcctggccaccccgaccgcttcccccaagttctgctgttggactctggactgtttcccctctcagcatcgcttttgctgggccgtgatcgtccccctttgtgggctggaaaagcaggtgagggtgggctgggctgaggccattgccgccactatctgtgtaataaaatccgtgagcacgaggtgggacgtgctggtgtgt

SEQ ID NO: 70998 - DNA, 1334 bp, Homo Sapiens
tcgcccaaggcgggggcggaaccccaggtggtcgggacaggctgttgcgggagcgcgccctcagcgaagcaagtgaggcatctcactgggaaagtcgaatgtgtgtggcggccgccgccgaggcgggttccgaagagacctcagcagggcaggccagggcctacgcgaacgcccacccttaagagcgcggggacaggggaactgggagggcgttcctcccagcccccgacgtcgcgggcccagtgtccccgtccaggctggttgggcgcacgcgcggccccactcgcccccacgcgtgcgtccccgctggtcccggcccccggccggaagttccggcggcggagctgggccgggcccgagcggatcgcgggctcgggctgcggggctccggctgcgggcgctgggccgcgaggcgcggaacttggggagcggagcccaggccgtgccgcgcggcgccatgaagggcaaggacggagaaggagggcggcgcacggctgggcgctggcggcggaagccccgagaagagcccgagcgcgcaggagctcaaggagcagggcaatcgtctgttcgtgggccgaaagtacccggaggcggcggcctgctacggccgcgcgatcatgcagcagcacgagcaggccctggccgactgccggcgcgccctggagctggacgggcagtctgtgaaggcgcacttcttcctggggcagtgccagctggagatggagagctatgatgaggccatcgccaatctgcagcgagcttacagcctggccaaggagcagcggctgaacttcggggacgacatccccagcgctcttcgaatcgcgaagaagaagcgctggaacagcattgaggagcggcgcatccaccaggagagcgagctgcactcctacctctccaggctcattgccgcggagcgtgacaaggatctggcacagtggcaacgaaaacacgaaggctgatgaggaacaccgcccacgcccgggccccagaaggccggctttgcacgcccacccctgacaacctaatggagggcccctgtacgcacctttcttctccgctcgggggccgagaacaacgggcgtaacctggaccgttcccctgaccctctacgccacgccaagcttctatccctccagccttcaatgcctccacccaccttctttccgctactcttaggtcatctccccaacctcaacccaaacggccacacgaagggaccacccttccacccgagtggcaatatcaaccatgttctcagtccggaccctgcgactatgatcctttaatccgcagcgctacactacccacaagcctcaattcccgccctcgag

SEQ ID NO: 70999 - DNA, 1004 bp, Homo Sapiens
aaagaagcgaggcctgggtggcgaatccggcacgaggatcgcgggctcgggctgcggggctccggctgcgggcgctgggccgcgaggcgcggagcttgggagcggagcccaggccgtgccgcgcggcgccatgaagggcaaggaggagaaggagggcggcgcacggctgggcgctggcggcggaagccccgagaagagcccgagcgcgcaggagctcaaggagcagggcaatcgtctgttcgtgggccgaaagtacccggaggcggcggcctgctacggccgcgcgatcacccggaacccgctggtggccgtgtattacaccaaccgggccttgtgctacctgaagatgcagcagcacgagcaggccctggccgactgccggcgcgccctggagctggacgggcagtctgtgaaggcgcacttcttcctggggcagtgccagctggagatggagagctatgatgaggccatcgccaatctgcagcgagcttacagcctggccaaggagcagcggctgaacttcggggacgacatccccagcgctcttcgaatcgcgaagaagaagcgctggaacagcattgaggagcggcgcatccaccaggagagcgagctgcactcctacctctccaggctcattgccgcggagcgtgagagggagctggaagagtgccagcgaaaccacgagggtgatgaggacgacagccacgtccggggcccagcaggcctgcattgaggccaagcacgacaagtacatggcggacatggacgagctttttttctcaggtggatgaaaagaggaagaagcgagacatcccccgactacctggtgtgggcaagatcagcctttgaacctgatgcggggagcccgtgcctccacgcccaggggcaataccctacgaacccaagggacattgtaggaagcccctggcggcggggggggtccattttgaaccccccgggacccgggaacccccctggaccagggaaaaagttcatcccccaac

SEQ ID NO: 71000 - DNA, 819 bp, Homo Sapiens
cacggagatcgtcctcgagcagcttgaagttgtcaacgcccttccactggtagaaccgcgccattgatgccattggggttgctggagtgctcaagcccaagcgcgtggcccagctcatgcactgcaaccagaaagaggttgtttccatgcaggtcagtgctggagaaggtccagggctcatctgcgtcaaaatgggtgtccccgcctaggccggggccagggaaataggcgtgggccagaaagccaccggtgccatcaaacggcgagctgtcgccgtggaagccagaggcaaagagtaccatgatgtcggcctccttctgtcgccgcagccggatgtcctcatagggcacctcctggaagaccaggggcgtggcctgctcccacacgcggaaggccctgcgcaccgcctccatcgagtggtaccagcccaacttctccgtgtagttctggatgctaaaggtcagatggtggttgttccacttcctcccggtgagggcgtagcgcttccgacgccgccgcaggttggctttcactcgtaccccgaactggtctggcaccccacagcggggccgcttcatccactccttggtctcttcgtcgagcacaccggtgactgggatcccgtagaagcgctgcatctctgcaagggccgaggccaagatctgggcggaacgcatggtggacatatggcggctgggctgaggcaggtagccataaagccgcagccagttctcggcatggacctccgcgtcttcggccgctacgccaaggcccaggcagcccagaagcaccaggagcagcggcagcagtcgcggccgc

SEQ ID NO: 71001 - DNA, 713 bp, Homo Sapiens
  misc_feature (34)..(34): n is a, c, g, or t
atctcaaacaaaaaaaagacagtatgtcattttnggggcaaagttgagggtccagtagtcaaggctgggacctgggaagcagaagctggctgctgatctctggcaggggtcacagaaggggaggcaccctgggtgggaaggcctggcttactgggtgggtgctgtgtgctggggagcagcaggaggaggctgggcggaggcagagggctgctgccccctcatcacagcatgacccagcctgtgctgggtggcaggaagtttcagtgccattgatggtgaagagagctgagccaccagggacttcagagcaaggaaggtaccttctcacagaggtgtttttgatgttgcaggagcacgtgcctctcagccacttctcagcccccttgttgtggtcagaatcaaatgtggtccagcaggagacggagcaaagtggagagggactgaagagagggggccaggagggtgggggtcttgtccctgttctgctgcttaccttccccagggggcttggacactggctctgtcccttcatttttgtatttgtgaagtggggtgttggattagattctatccaagcatgaccaagctgagtgaccattgtctctttctctcttttctcctactcccatcctcacccttcagcagccagaatgcgcttcaaaaacgtggattggggtcaggcacagtggcgcatgccaatcatcccagctact

SEQ ID NO: 71002 - DNA, 712 bp, Homo Sapiens
ccacccagccgcaggtcttccagctgctgcccagcttccccacactcacccggagcaagtcccatgagtctcagctggggaaccgcattgatgacgtctcctcgatgaggtttgcctgccttcttcctcatctggaaacatcacaggggcagctgactgagccatcctcagaggccaggagcaagctagaggaccaagcgaggcgaggggaaccacaccatgccactgggctagcctggcctgctcctgtgttgatggacatagatcagggagatgcttatataataaaccattgcgcccccctctagcctgtggtctctgaattaggaagtcatgggcaacgagctgtcgcctgcggagttcctcagcctgcccatccggcctcttttccctgcagatctctcgcatggatccccacagatggtacggagggatatcgggctgtcggtgacgcacaggttctccaccaagtcctgactgtcgcaggtctgccacgtgtgccagaagagcatgatatttggagtgaagtgcaagcattgcaggttgaagtgtcacaacaaatgtaccaaagaagcccctgcctgtagaatatccttcctgccactaactcggcttcggaggacagaatctgtcacctcggacatcaacaacccggtggacagagcaaccgaaccccattttggaaccctccccaaagcactgacaaagaagg

SEQ ID NO: 71003 - DNA, 278 bp, Homo Sapiens
  misc_feature (59)..(83): n is a, c, g, or t
gcctccatgtccacgcccttcctggcccatcaggtcctggtggcatctcagggtcctgnnnnnnnnnnnnnnnnnnnnnnnnnggctcctgcaggccgaccttattgctgtgctctgggcttgggggcggctgaggtgcccctctgtcctccagcagggcacgagtgacctgagaggcccactcaggcagaagagacgcaagctgggccgtccaactggtttcaactgccagctttaccaatgcagcatttattttaaaattaaattaaattaaaaaa

SEQ ID NO: 71004 - DNA, 926 bp, Homo Sapiens
  misc_feature (144)..(446): n is a, c, g, or t
ccgggcggcagctgggctcggagtgcagcggggttaggatggacgaggacgtgttgcaccctgaagagcctcatcatcgcctgctcttgaggttcacagatgatacctttgatccagaacttgcagcaacaatagacaatgcannnnnnnnnnnnnnnnnnnnnnnnnnnnnnnnnnnnnnnnnnnnnnnnnnnnnnnnnnnnnnnnnnnnnnnnnnnnnnnnnnnnnnnnnnnnnnnnnnnnnnnnnnnnnnnnnnnnnnnnnnnnnnnnnnnnnnnnnnnnnnnnnnnnnnnnnnnnnnnnnnnnnnnnnnnnnnnnnnnnnnnnnnnnnnnnnnnnnnnnnnnnnnnnnnnnnnnnnnnnnnnnnnnnnnnnnnnnnnnnnnnnnnnnnnnnnnnnnnnnnnnnnnnnnnnnnnnnnnnnnnnnnnnnnnnnnnnnnnnnnnntatcaaaatcatgacattatgtcacttggagcaacacagttgacccgccaaggcagcctcttcctccatagatggatgaacgctgtggccgctgctcctgcctgggccatgccctgatgctgccaacaccactgctcctctatttataagtcttagtagagttgctgacccagcaataactgaacagctgatatgtacctcacactaagccaggcgcttcatatgtatctaacttgaaaaatgctgagctagttaccttaacaccattaacttttacttaaaagtgtgtttcttttttaatcccagtgagctccaaacaagttttaggaggctccccaaaaccagtgaagacttaaactaaaagtagaatttcaaagtattagaaaagcaaagcccaaaattaaatgtgaagatcagtgtctgtactgagctggcccatctggtggacacaggattgggtgatcgactgcatgtttacca

SEQ ID NO: 71005 - DNA, 526 bp, Homo Sapiens
tcctcccgggatgacttcttccgcaccaagccgcgctatgccagccgcccggccgccgagcattcgggtgcccgcgggggcgagagcgccgggctcaagggcgctcgctcgaccgagggccccggcgggctggagcccggcatagaggagcaccggcgggggccctcgggggctgcggccttcctgcacgagccgccctcgccgccgccgcccttcgaccactacctgggccacaagggggcggccgagggcaagacccccgacttcctgctgtcgcagtcggtggaccagctggcgcggccgccgtcgctgggccaggcggggcagctcatcttctgcggctccatcgaccacctcaaggacaacgtctaccgcaacgtcatgcccaccctggtgatccccgcgcactacgtgcgcctcggcggcgaggcgggcgccgccggcgtgggcgacgagccggccccgccggagggcacggcacccggcccggcgcgcgcttttccccagcccgacccccagcgcccgc

SEQ ID NO: 71006 - DNA, 668 bp, Homo Sapiens
  misc_feature (474)..(482): n is a, c, g, or t
tgcggccgcagcccctgcactcgccttcctcactgctgggcagccttcccaccaccgcagcagcccctgaggccaggaggcagtgcagggcattctggacccggagggccagagaaacaggatttctggggtttggacttggggtgagtttgtaactgttgctgccacaccaccaggagcaccggctgcccctctgggtggcactaccaggtgccccacggtacccttgtcacactgttcacacctgcccggctgcccactctgggaccccgaggtaggagggtgctccctgagaccaaagcacaaaacagcatgcagggagctcctgcaagtgcccgtggtctcgtgccacaccaaggaagggccagcgggtggcctgtggccggaatgctcaacaactaggtgcctccggccggggcagtacccagcactgtgcactattttcagggccactcagggtggcgctgtggcccnnnnnnnnnccctgagccccagcccccagcctcctccctcagcctgggctacggcccacctcctggtgctggtgttttcatctggggagggtgctcgcgccgctcccgctgcaggcactgtccgcgatgagtgcgggtaggagccgtgaggtgcttctctgctgtgacaaacgaccctgtctgtccgtgaaaaaa

SEQ ID NO: 71007 - DNA, 853 bp, Homo Sapiens
  misc_feature (121)..(151): n is a, c, g, or t
  misc_feature (153)..(262): n is a, c, g, or t
  misc_feature (285)..(411): n is a, c, g, or t
cagtcgacggtaccggacatatgcccgggaattcggccattacggccgggggggaagtgtagaaatatattgatttgtgatttctggtgtcacctgtgttaccaaaaatcaaaacaaatcnnnnnnnnnnnnnnnnnnnnnnnnnnnnnnngnnnnnnnnnnnnnnnnnnnnnnnnnnnnnnnnnnnnnnnnnnnnnnnnnnnnnnnnnnnnnnnnnnnnnnnnnnnnnnnnnnnnnnnnnnnnnnnnnnnnnnnnnnnnnntgggtcctacaggcgcacacgannnnnnnnnnnnnnnnnnnnnnnnnnnnnnnnnnnnnnnnnnnnnnnnnnnnnnnnnnnnnnnnnnnnnnnnnnnnnnnnnnnnnnnnnnnnnnnnnnnnnnnnnnnnnnnnnnnnnnnnnnnnnnntgagctaccactcacggcccaaatcttcttgatcatatgtttaaatatattttttaatatttggagcatgagttgtcacttcttgtttgccttttttataaggaaatgttggagagttacatcattgctaatgtagaaatgttaagtggaaaaatatacagtttggtaaaataaactagattctacatttatttgtgggtttttttcccctcctttctttccacagcacttttgatatcaagcaagtggcttcctttttgagatattaacaccaacaacgacaggcaacacacgtaacttgaacgccaattatctaagccctttctaaatccggactacggcgtaccacatcggtaaaggtacgtgttaaaatagtacctacgctagaacattgcaacttgctgcgtaatccactcgctcttcaccttgttgccccttgacg

SEQ ID NO: 71008 - DNA, 507 bp, Homo Sapiens
  misc_feature (48)..(71): n is a, c, g, or t
cattgcacttttgatatcaagcaagtggctgggctttttgagatattnnnnnnnnnnnnnnnnnnnnnnnngtaaatgaagcccaactacctaaccctttcttatttgtatttgttttagtattgtgaagttgtgttaaatagtactagctagaaatacaaatttctggttatcatttctcttccctgtggcacttgacattttaattgtcttaaagtttttgaagtacatcttctggccccttgagtactgccagaggcaaaagatgtttgtttcttattcattccacttttgtctcctgggatcccttctgtagcctaaagtatggctgggaaatggacttgagaagattggcttgaattagatcataatcatgtgtgatcccatcatgaattcattggaatttgtgttgcatgtaaggcaatctttcctgttgtaaatcttccttttttaatgtacatatattttgaaaaatatgaataaacatgaaattttaaaagctgctga

SEQ ID NO: 71009 - DNA, 738 bp, Homo Sapiens
  misc_feature (18)..(18): n is a, c, g, or t
  misc_feature (198)..(238): n is a, c, g, or t
atgactttacagataganttacaaactaaatgatgtcttgtatttagaagcagagtacagacctaacgaactgttagattctccaccatcacttagggttgcccagaagcaacaccagagaattacagacaacgcgcttttgctgaactgtccattttggtggtttgtttttcagtcaaatataagcaggatgggcgnnnnnnnnnnnnnnnnnnnnnnnnnnnnnnnnnnnnnnnnnaatgcctaaatatgggtattaaagggaaaatttttaaagtctgattaaatccaatatgacatgaaattaaatatatggattagtaaggaaaaatgttaaaaagtagagaggataccaagaagattaaactggactagccttatttgcaagtgaaggatctggtgctgctttcagatgtttatcttttatttttttcccttaagctttaatcttcgtcattgtcttaaagtcaactggtgtttcttgttcattgactttggtacgatggtgctttgcaaggatgtatttatgttataatggccaacatttggtcagcccttgtccacttattcacttccctccttttgtaaaataagtgctttaattataaactgtataaaaataccttgtataaaccccttttttgattattacaataaataagctgaattgtaacaaatgaaatttgatttttgtaataaaacagtggaaaagtaaaaaaagtaagcacttgcggccgc

SEQ ID NO: 71010 - DNA, 573 bp, Homo Sapiens
  misc_feature (14)..(14): n is a, c, g, or t
  misc_feature (50)..(50): n is a, c, g, or t
  misc_feature (117)..(117): n is a, c, g, or t
  misc_feature (176)..(177): n is a, c, g, or t
  misc_feature (179)..(179): n is a, c, g, or t
  misc_feature (181)..(181): n is a, c, g, or t
  misc_feature (269)..(269): n is a, c, g, or t
tcacttggcttcangccaatgggtgaggttggagttggaagccaccgcgnactaaagctttgtttaaattcctgagaactggaaagagttacagcctccctggccaggcgcctcgcncgttcacccgcgctgatgaggagcaggcgagcttttaaggatttgaggaaagaagaacnntngngaggggcgggaagtgaaaaatccaagtgtgcctcttagacccgggggaaaggtggttaagctgggggttgcagtcactactgacaacntcccctcttccgcctgtcccagtcccaccaatcacctgcgtacagaacggccttcaggtacccatgaccgagacgtgttggaaaccctcctccacagctgcagccccatctcccggctccctcctagtctgtcctgcgtcctctgtccccgggtttcagagacaacttcccaaagcacaaagcagttttctcccctaggggtgggaggaagcaaaagactctgtacctattttgtatgtgtataataatttgagatgtttttaattattttgattgctggaataaagcatgtggaaatgacccg

SEQ ID NO: 71011 - DNA, 949 bp, Homo Sapiens
  misc_feature (440)..(459): n is a, c, g, or t
  misc_feature (854)..(879): n is a, c, g, or t
ttgtctcagggcggccctttaaaaaccccacgggcctttcaggtgtgcctttgtccgttggaccattttttcctcgtatccagggttttggaaacgcataccccctgggtggttgttccctttcccccccaaagaccgacccacgaggttttgggcggagaacggaagcgccccaataaacaaacgccttttcccggggtgtgccgattcattaattcagcttgcacgacaggtttccggattggaagcgggccggtggccccacccaattaattgggtttgctccctccttggcccccccaagctttacacttttgctcccgccttctattttttgtggaattttgagccggtaacaattttaaccaggaaaccgctttgacatggttacgaatttaatgcgactcccttttgggaattttgcccttggggccaaaggnnnnnnnnnnnnnnnnnnnngattgtactcgtttttatgtttgggtcatttccacatgctttattccagcaatcaaaataattaaaaacatctcaaattattatacacatacaaaataggtacagagtcttttgcttcctcccacccctagggggaaaaactgctttgtgctttgggaagttgtctctgaaacccggggacagaggacgcaggacagactaggagggagccgggaggatgggctgcagctgtggaggagggtttcagaggagagaggtcggagagcagaggcctgagaagccagaggcaggtggagagagggtggaaagtgagcagcgggctgggctggagccgcacacgctctcctcccatgttaaatagcacctttagaaaaattcacaagtccccatccacnnnnnnnnnnnnnnnnnnnnnnnnnntatcaaggaataaaaatagactttgaacaaaaaggaacatttgctggcctgggggggcatctcaatttct

SEQ ID NO: 71012 - DNA, 930 bp, Homo Sapiens
tggaggtggggtgttattgttgtactggggtttgtgctgggacttgcataacgtttttcttctccatggtgttgaattgtcgccgtttggtaaaaattgtcaacaggttccccaattccaccagatttggtgttcttcatttaaggaaaagaattattcaagggaatttaaaattagacctttgaatcaataaagggaacattttgtcttgtgctatggggcggcggcattctccaattttctatagcaccagtgattccctccccaccccacccatcacatagatgtagcacctttggtataaaatggggagccgcttccaccctgcccccatccccgcccccaggcagttgccccggtgacacatcaagacaagaacgaggtagtctttcagcaacacagttacacaaggaacagaacagtctctcccacccagccctgcggcacaagggattgacacgcgttccccaaatccgatgtttctgctttgtcgtggcccttcctgactctcctccgaacccagtgaggggctggtggctcccccggcatgaccccctcaaaaacgaaggggagatgttgcaagagccatgggagcgccagatggcaaggcttctttggcagtctgagaaccccaggtcccccagggcctgggggtgctgggcgggcaggagcgggctgagggtgggggccacttgggtgtttgagcattgcctttgattgctgggcagacaatacattgtttcctgtgtcttctggggagacagatttgggaaggagtggaggggaggccccaaggggggtgtggagaaaggagcagaaagggcagcattggggtttcataagcccaacgggcagaaagggacttacccccgcatgggtcttcaagcaagtggaccaagcttccttttttaaaaagttatttatttattc

SEQ ID NO: 71013 - DNA, 546 bp, Homo Sapiens
agcaactatcaaaagaaaaactccttcaagtctgatcagtagccttcccagatgaagaaagatattcctattacccaaacttgttaccagatgaagggggtcccaacaatgctaccttgaaaagaagctgcacagttttctggcttgtgcaggaagccaaggttagcgctggcattcatcaaacacatggctttatcttcatttgctctaatcactcagtgacagtcaagaaaaagttgctcatggtcattaaagcaggaaagagctataaaagactgtcaggagatccccaggctccctggaaagagggagtgataaaagatgctgacagacagacagacaggcaggcaggtagagcaaataaagatgatcaattaccctgactgccagaattctgaatagagttgaaataactgacaaatcaagcacacagggaaagccaaagagatgaaaaaacaaaaatcctactaagtcttaccagctgcagaacagctacaaagaacatagcagtgagtaagcagatatttattgtgaactcaccttgtg

SEQ ID NO: 71014 - DNA, 1540 bp, Homo Sapiens
  misc_feature (1496)..(1496): n is a, c, g, or t
  misc_feature (1501)..(1501): n is a, c, g, or t
  misc_feature (1518)..(1518): n is a, c, g, or t
  misc_feature (1528)..(1528): n is a, c, g, or t
cagtcgacggtaccggacatatgcccgggaattcggccattacggccggggagcggcggtgaaggtcctgggtgaggtaggggtggatggtgcttgccgcgtatcatggctgcctccggaaaactcagcacttgccgtctccctccgttgcccacgattcgagaaatcattaagttgttaagactgcaagcagcgaagcagctatcacagaatttcctcctggacttgaggctgacagataagattgtaaggaaagctggcaatctgacaaatgcttatgtttacgaagtgggccctgggccagggggaatcacaagatctattcttaatgccgacgtcgctgaacttctggtggttgaaaaggacactcgatttattcctggattacagatgctttctgatgcagcacctgggaaactgagaattgttcatggagatgtcttgacatttaaggtagaaaaggctttttcagaaagtcttaaaagaccctgggaagatgatcctccaaatgtacatattattggaaatctgccttttagtgtttcaactccactgattatcaagtggcttgaaaatatttcctgtagagatggaccttttgtttatggcagaactcagatgactttgacttttcaaaaggaagtggcagagagacttgcagccaatacaggaagcaaacagcgtagtcgcctctctgttatggctcagtacctctgcaatgttcgacacatctttacgattccaggacaagcttttgtccccaaaccagaggtggacgtgggcgtggtgcacttcactcccttgatacagcccaagatagagcagccattcaagctggtggaaaaagtggttcagaatgtatttcagttccgaaggaaatactgccatcgagggctcagaatgttattccctgaagcgcagcgcttggaaagcacgggcaggctgttagagttggcagacatagaccctactcttcggccccgccagctctccatctcacactttaagagcctctgtgatgtatacagaaaaatgtgtgatgaagacccacaactctttgcatataatttcagagaagaactcaagcgaagaaaaagcaaaaatgaagaaaaagaagaggatgacgcagagaattacagactctagctgctgcctgggggcgagcagcctaccagatgtcgatttgcactacgtggagcttcttatataggtactcttttgtctttacagaatgacgatacaaatgccaatgaccagatgtgacttattttccttttactatacagcttggcagagaaaataaatatcatcaaataagatacagtacaagctttcttttaatatatactgtatagatagttatgacatgtttagtataaacagcatctattacaatcttacaaaaatgaagtatctgcacattttgcccctaaaccacattaaaataacttaaatatgctttaaataaagcaaaaactaacaaacagctgaaaganaatgnccaagaggcccaggggnttttaaaaangggcccttggaa

SEQ ID NO: 71015 - DNA, 1596 bp, Homo Sapiens
  misc_feature (42)..(42): n is a, c, g, or t
  misc_feature (53)..(53): n is a, c, g, or t
  misc_feature (77)..(79): n is a, c, g, or t
  misc_feature (91)..(91): n is a, c, g, or t
  misc_feature (102)..(102): n is a, c, g, or t
  misc_feature (131)..(131): n is a, c, g, or t
  misc_feature (157)..(157): n is a, c, g, or t
  misc_feature (162)..(162): n is a, c, g, or t
  misc_feature (188)..(188): n is a, c, g, or t
  misc_feature (1466)..(1466): n is a, c, g, or t
  misc_feature (1519)..(1533): n is a, c, g, or t
tcatcaagagcagatacctttttgagtatgcaccttgcctgntggtctcggcntgtatctttccccttcactcagcnnntgggaaccagcncagttctgcanggagagcagagggagtcaatgccttgctntgggcttcttgagcaccagcagtgtngtctntggagaagatgaagtagagccctacnacgatggagttgaagaggcagagaaaaagatggaagaggaaggtgtgagtgtgagtgaaatggaagcaacaggagcacaaggacccagcagggtagaagaggctgagggacaccacagaggtgacagaagcagagggatcccaggggactgctgaggctgacgggccaggagcatcttcaggggatgaggatgcctctggcagggcagcaagtccagagtcggcctccagcacccctgagtctctccaggccaggcgacatcatcagtttcttgagccagccccagcgcctggtgctgcagtcttatcttcagagcctgcagagcctctgttggtcaggcatccccctaggccccggaccaccggccccaggccccggcaagatccccacaaggctggactgagccactatgtgaaactctttagcttctatgccaagatgcccatggagaggaaggctcttgagatggtggagaagtgcctagataaatatttccagcatctttgtgatgatctggaggtatttgctgctcatgctggccgcaagactgtgaagccagaggacctggagctgctgatgcggcggcagggcctggtcactgaccaagtctcactgcacgtgctagtggagcggcacctgcccctggagtaccggcagctgctcatcccctgtgcatacagtggcaactctgtcttccctgcccagtagtggccaggcttcaacactttccctgtccccacctggggactcttgcccccacatatttctccaggtctcctccccacccccccagcatcaataaagtgtcataaacagaaaacccaaacaccacccccctactacatccctgtcgggccgcctcggcccctcgaagaagcttttctaaaaccattccgttttggcggcccgggggccccagataggttaaggtgcacacctgggcccataagcgtgttttcccccaagggagaacccccgggggcccatggaccctaaggggccttggggcattttctctcccccaaaaataaacaaaaacaccccccgggggcgggcacaaccccggaaagcgggttccctgtgaaacaaaaattcccccgacaagggggagttttcctgggagggcgccctcttacctggggaactccccactcccacccgcgcggggttcccccaagagcgcgaagcccttccgagattattccaaaatttagatccgcccccccggcccccgtgcgcgcatttacaattgggccagaaaaaccaggagcggagaanaaattgccatataagagggcagttttcccgtgccccggaaatctggggaaaannnnnnnnnnnnnnnataaagcggcgtctattggtatgttacaccctgccgtaagttcgcggcccgcggccggtcaca

SEQ ID NO: 71016 - DNA, 1137 bp, Homo Sapiens
gggggcattgtgacagctgaggacctgaacactaccgtgctgagctgatcgagcacccgctgaacatcagcctgggagacgcggtgctgtacatgcccagtgcgccgctcagcgggcccgtgctggccctcatcctcaacatcctcaaagggtacaacttctcccgggagagcgtggagagccccgagcagaagggcctgacgtaccaccgcatcgtagaggctttccggtttgcctacgccaagaggaccctgcttggggaccccaagtttgtggatgtgactgaggtggtccacaacatgacctccgagttcttcgctgcccagctccgggcccagatctctgacgacaccactcacccgatctcctactacaagcccgagttctacacgccggatgacgggggcactgctcacctgtctgtcgtcgcagaggacggcagtgctgtgtccgccaccagcaccatcaacctctactttggctccaaggtccgctccccggtcagcgggatcctgttcaataatgaaatggacgacttcagctctcccagcatcaccaacgagtttggggtacccccctcacctgccaatttcatccagccagggaagcagccgctctcgtccatgtgcccgacgatcatggtgggccaggacggccaggtccggatggtggtgggagctgctgggggcacacagatcaccacggccactgcactggccatcatctacaacctctggttcggctatgacgtgaagcgggccgtggaggagccccggctgcacaaccagcttctgcccaacgtcacgacagtggagagaaacattgaccaggcagtgactgcagccctggagacccggcaccatcacacccagatcgcgtccaccttcatcgctgtggtgcaagccatcgtccgcacggctggtggctgggcagctgcctcggactccaggaaaggcggggagcctgccggctactgagtgctccaggaggacaaggctgacaagcaatccagggacaagatactcaccaggaccaggaaggggactctgggggaccggcttcccctgtgagcagcagagcagcacaataaatgaggccactgtgccaggctccaggtggcctccctgccctgtcaaa

SEQ ID NO: 71017 - DNA, 233 bp, Homo Sapiens
cgcctactactactactatacggctgcgagaagacgacagaagggcggggagcctgccggctactgagtgctccaggcagacaaggctgacaagcaatccagggacaagatactcaccaggacgaggaagaggactttgggggacgggcttcccctgtgagcagcagagcagcataataaatgaggccactgtgccaggctccaggtggcctccctggcctgtctccccaccc

SEQ ID NO: 71018 - DNA, 545 bp, Homo Sapiens
ggtggcgagaaaatagtactgttaaggcaaatcttaccccgtagcagttaccagcaggacaggcaattttcagtgggcttttcagaagctggttgccatgacaaagagcacaatttattcctcagtcccttatcacagctacgatcacagaccataaaaattaacaccgctcttttccatctgatttcagagttcctcatccttacctgaggccttttgttcccccaattaaatggaatgaatgtcagtcatttagcaattcaattaatgctgattcaaaattccggccaaaccagaatctataatcacaacttcctaatcacagttcagtcatgagaatgaaaagtaagcaggaaattgcactaattactcaattagactaatactgtatttctaagcaagggcttacgaggttgtcagacctgacaaaggacttcggagtcctcttccaccttgtgtgtccacagttgtccaaccaaagctggcggacgcgtgggcggacgcgtggtcgacgatatcccggggaaatccggaccgggtaccag

SEQ ID NO: 71019 - DNA, 905 bp, Homo Sapiens
  misc_feature (493)..(530): n is a, c, g, or t
agaaaattaggctaggtactgaggcctgggtttttaattcggcacgaggctgcgtcgctcctgtggagctgcctgacggacggagctgcccccgcccccgccctggctgcccgaccgccgccgccatgcccttctaccaacatgccacaacgcactgaagctgcgcttcccggccgaggacgagttccccgacctgagcagcccacaacaaccacatggccaaggatgctgacccaccgagcgtgtacgcggagcatgcgacgccaagagcacgccgagcggacttcacgcgtggacgacgtcaatccagacaggacgtggacaacccgggccaaccgtacagtcatgaccgtgggctgctgtggcgtggcgacgaggagtcctacgaagtgttcaaggatctcttcgaccccatcatcgagtaccgtgcacggctggctacaagcccagcgatgagcacaagaccgacctcaaccccgacaacctgaaggtnnnnnnnnnnnnnnnnnnnnnnnnnnnnnnnnnnnnnntcttcgggcgctcactcccgtctcgccatcccagaggcggcagacgacctggaccccaactacgtgctgagctcgcagggtgcgcacgggccgacagcatccgtggctatcatgcactccacaccgaacgtgaaggccgcggggagcgccggagccatcgagaagctcagcggctggaagccctgtccagacctggacggcgacctggcgggccgatactacagcgctcaagagcatgacggaggcggagcaagaagcaagctcatcgacgagcaattcctctacgacaagacccgtgatcgcccatgactgctggcctcgggcatggccgagaatggcccaacgcccgcagaatctgggcacatgacataaaac

SEQ ID NO: 71020 - DNA, 1894 bp, Homo Sapiens
  misc_feature (1478)..(1519): n is a, c, g, or t
  misc_feature (1769)..(1828): n is a, c, g, or t
ggcagtactatacggtcctaaggtagcgaggcctgggtggcgaattcggcacgagggcctgcgtgctccgggagctgccgacggacggagcgcccccgacccccggccggggcagccgcccgccggcgccaatgcccttctccaacagccacaacgcactgaagctgcgcttcccggccgaggacgagttccccgacctgagcgcccacaacaaccacatggccaaggtgctgacccccgagctgtacgcggagctgcgcgccaagagcacgccgagcggcttcacgctggacgacgtcatccagacaggcgtggacaacccgggccacccgtacatcatgaccgtgggctgcgtggcgggcgacgaggagtcctacgaagtgttcaaggatctcttcgaccccatcatcgaggaccggcacggcggctacaagcccagcgatgagcacaagaccgacctcaaccccgacaacctgcagggcggcgacgacctggaccccaactacgtgctgagctcgcgggtgcgcacgggccgcagcatccgtggcttctgcctccccccgcactgcagccgcggggagcgccgagccatcgagaagctcgcggtggaagccctgtccagcctggacggcgacctggcgggccgatactacgcgctcaagagcatgacggaggcggagcagcagcagctcatcgacgaccacttcctcttcgacaagcccgtgtcgcccctgctgctggcctcgggcatggcccgcgactggcccgacgcccgcggtatctggcacaatgacaataagaccttcctggtgtgggtcaacgaggaggaccacctgcgggtcatctccatgcagaaggggggcaacatgaaggaggtgttcacccgcttctgcaccggcctcacccagattgaaactctcttcaagtctaaggactatgagttcatgtggaaccctcacctgggctacatcctcacctgcccatccaacctgggcaccgggctgcgggcaggtgtgcatatcaagctgcccaacctgggcaagcatgagaagttctcggaggtgcttaagcggctgcgacttcagaagcgaggcacaggcggtgtggacacggctgcggtgggcggggtcttcgacgtctccaacgctgaccgcctgggcttctcagaggtggagctggtgcagatggtggtggacggagtgaagctgctcatcgagatggaacagcggctggagcagggccaggccatcgacgacctcatgcctgcccagaaatgaagcccggcccacacccgacaccagccctgctgcttcctaacttattgcctgggcagtgcccaccatgcacccctgatgttcgccgtctggcgagcccttagccttgctgtagagacttccgtcacccttggtagagtttatttttttgatggctaagatactgctgatgctgaaataaactagggttttggcctgccaaannnnnnnnnnnnnnnnnnnnnnnnnnnnnnnnnnnnnnnnnngggcggcccgctctagagtatccctcgagggggccccaagcttaacgcgtaccccagctttccttggtacaaagtggtcccctaatagtggagtccgtattataaagctaagccacctggcccgtcgtttttaccaacgctcgttgacctggggaaaactgcctagccttggggaatcctttggggaagaaacctttaactttctggtgggggtggacataaattggggacaaactaccctaccagaggnnnnnnnnnnnnnnnnnnnnnnnnnnnnnnnnnnnnnnnnnnnnnnnnnnnnnnnnnnnntaaaaactaaactgcaatatgcttggccgggcttgggaaaagttttgcctttaaccgggagtattt

SEQ ID NO: 71021 - DNA, 1155 bp, Homo Sapiens
  misc_feature (125)..(159): n is a, c, g, or t
cgtaatactgaacgccatcgaaattaagttgtggacgaccaaagtcccgcccccgtctcttttttttagttctctgggaaaaaacgcgaacgagcgcagcgagtcattgagcgaggaagcggcgnnnnnnnnnnnnnnnnnnnnnnnnnnnnnnnnnnncagtcgacggtaccggacatatgcccgggaattcggccattacggccgggggcctgagtgtgacgtcagaatcaccatggccagctatccttaccggcagggctgcccaggagctgcaggacaagcaccaggagcccctccgggtagctactaccctggaccccccaatagtggagggcagtatggtagtgggctaccccctggtggtggttatgggggtcctgcccctggagggccttatggaccaccagctggtggagggccctatggacaccccaatcctgggatgttcccctctggaactccaggaggaccatatggcggtgcagctcccgggggcccctatggtcagccacctccaagttcctacggtgcccagcagcctgggctttatggacagggtggcgcccctcccaatgtggatcctgaggcctactcctggttccagtcggtggactcagatcacagtggctatatctccatgaaggagctaaagcaggccctggtcaactgcaattggtcttcattcaatgatgagacctgcctcatgatgataaacatgtttgacaagaccaagtcaggccgcatcgatgtctacggcttctcagccctgtggaaattcatccagcagtggaagaacctcttccagcagtatgaccgggaccgctcgggctccattagctacacagagctgcagcaagctctgtcccaaatgggctacaacctgagcccccagttcacccagcttctgggtctcccgctactgcccacgctctgccaatcctggccatgcagctttgacgctttcatccagggtgtgcaccccagctgcaggtgctgacagaggccttccgggaggaaggacccagctgtacaagggcaacattcggctcacttcgaggacttcgtcaccatgacaggttctcggatgctatgaaccaacatctgtgcagagtgaggtccccagggaacctttcctgggctcctagaagtgga

SEQ ID NO: 71022 - DNA, 1644 bp, Homo Sapiens
  misc_feature (1560)..(1582): n is a, c, g, or t
ggtcctaagtagcgaggcctgggtggcgaattcggcacgagggccagctatccttaccggcagggctgcccaggagctgcaggacaagcaccaggagcccctccgggtagctactaccctggaccccccaatagtggagggcagtatggtagtgggctaccccctggtggtggttatgggggtcctgcccctggagggccttatggaccaccagctggtggagggccctatggacaccccaatcctgggatgttcccctctggaactccaggaggaccatatggcggtgcagctcccgggggcccctatggtcagccacctccaagttcctacggtgcccagcagcctgggctttatggacagggtggcgcccctcccaatgtggatcctgaggcctactcctggttccagtcggtggactcagatcacagtggctatatctccatgaaggagctaaagcaggccctggtcaactgcaattggtcttcattcaatgatgagacctgcctcatgatgataaacatgtttgacaagaccaagtcaggccgcatcgatgtctacggcttctcagccctgtggaaattcatccagcagtggaagaacctcttccagcagtatgaccgggaccgctcgggctccattagctacacagagctgcagcaagctctgtcccaaatgggctacaacctgagcccccagttcacccagcttctggtctcccgctactgcccacgctctgccaatcctgccatgcagcttgaccgcttcatccaggtgtgcacccagctgcaggtgctgacagaggccttccgggagaaggacacagctgtacaaggcaacatccggctcagcttcgaggacttcgtcaccatgacagcttctcggatgctatgacccaaccatctgtggagagtggagtgcaccagggacctttcctggcttcttagagtgagagaagtatgtggacatctcttcttttcctgtccctctagaagaacattctcccttgcttgatgcaacactgttccaaaagagggtggagagtcctgcatcatagccaccaaatagtgaggaccggggctgaggccacacagataggggcctgatggaggagaggatagaagttgaatgtcctgatggccatgagcagttgagtggcacagcctggcaccaggagcaggtccttgtaatggagttagtgtccagtcagctgagctccaccctgatgccagtggtgagtgttcatcggcctgttaccgttagtacctgtgttccctcaccaggccatcctgtcaaacgagcccattttctccaaagtggaatctgaccaagcatgagagagatctgtctatgggaccagtggcttggattctgccacacccataaatccttgtgtgttaacttctagctgcctggggctggccctgctcagacaaatctgctccctgggcatctttggccaggcttctgccctctgcagctgggacccctcacttgcctgccatgctctgctcggcttcagtctccaggagacagtggtcacctctccctgccaatacnnnnnnnnnnnnnnnnnnnnnnncatttggggccaaaagtccagtgaaattgtaagcttcaataaaaggatgaaactctggaaaa

SEQ ID NO: 71023 - DNA, 1222 bp, Homo Sapiens
ggggctaggtacgaggcctgggtgtgcgaatcggcacgaggtgacctgacctgacgccgttgtttggcttctgcagcctgggcagctacgccgcgctgcacggggagttctactgcaaaccccacttccagcagctgtttaagagcaaaggcaactacgacgaggggtttggccgcaagcagcacaaggagctctgggcccacaaggaggtggaccccggcaccaagacggcctgaggcctctgtaaccttccaccccctctgcggaaggcctggagccggcagggggaaggtgggaaggaggtcgagctgggcttgcgtgggggccaggtgggaaggggatgaggcttgctcaggcgtaggggaccagggcagggctctgctccaggactccttccttcttccttctcccgcagccggtgagggtttggaaaccaggattggggtctgcccaccaccctgcttcctgcttcgttcagcctccctccccacctcaccccaggaccccctgggaggcccccaagcccagctcccctatctaggtgccttttctccagcaaggagtcagcatgcccccctcagggtcccaagctccctcactgccaccggagactgtgtggcccccacgtctccccatctacctctacccttaacctgtttctgagccacggagacagggaggaaggagcgcgacagtgccacctgttgggcatcataaatgcccctgcagcccatgggggaggagatggggaagtggagccaccctgcctctgcagggcaaggcagggcctgccccagtggggcttgggaccatctcgaaccaccagcgtggagaagcagaagcaaaagcactcgccaggctgcagcctcaggcactggcaggggctggtgcggccccactcccctcccccgctcccatttgtgcccatcctgttgtgaccaaccccgttttaaacatgtttcaatagatccagattctctattgtgtggcctgctgggggatctgtcacaggaagggtgcagactcaccatggggcgggcatggggggacagggtcagccccgactacctcggccctgatgggggcagggagctagaagtgggtgtcagttccctgacacaccattgagaaatgggagggctcctcttcacagcgagggcttcatgctgttacacccacagtggttttggaactgaaactccaccccaccactggctcgtgc

SEQ ID NO: 71024 - DNA, 953 bp, Homo Sapiens
  misc_feature (35)..(35): n is a, c, g, or t
  misc_feature (150)..(150): n is a, c, g, or t
  misc_feature (161)..(161): n is a, c, g, or t
  misc_feature (186)..(186): n is a, c, g, or t
  misc_feature (190)..(190): n is a, c, g, or t
tgtctccgtgctcagaaacagttaagggtagagtnagatgggagacgtggggccacacagtctccggtggcagtgagggagcttgggaccctgaggggggcatgctgactccttgctggagaaaaggcacctagataggggagctgggcntgggggcctcnccagggggtcctggggtgaggtggngagngaggctgaacgaagcaggaagcagggtggtgggcagaccccaatcctggtttccaaaccctcaccggctgcgggagaaggaagaaggaaggagtcctggagcagagccctgccctggtcccctacgcctgagcaagcctcatccccttcccacctggcccccacgcaagcccagctcgacctccttcccaccttccccctgccggctccaggccttccgcagagggggtggaaggttacagaggcctcaggccgtcttggtgccggggtccacctccttgtgggcccagagctccttgtgctgcttgcggccaaacccctcgtcgtagttgcctttgctcttaaacagctgctggaagtggggtttgcagtagaactccccgtgcagcgcggcgtagctgcccaggctgagcttggtgtgacagtgcttgcagcagaagcaagagttgtggaaaatgagcttgtcggccaccagccgctccatggggtacacggtcttctggcaggcggcgcaggtctccttcacctgggcccgcaggctgaaggacttggagcgctgcaccgtgctgctgccgccgcctttggcgtcatgagagggggtggcctgggcggctcctgcagcctggaacatggctcgttggaggtggaagcctcgggtggagaagcggcacccgctgggttcaggcccggcctgggccgcggggcgggatcggtctccgggggcgcacgggtacgaggagggcgcgggcgcgagctgctgccgc

SEQ ID NO: 71025 - DNA, 934 bp, Homo Sapiens
ccacgccccggtcactgcaaggggatgctgcaccccctcaaggtgaagagctgattgaggctgccaagaggaacgacttctgtaagctccaggagctgcaccgagctgggggcgacctcatgcaccgagacgagcagagtcgcacgctcctgcaccacgcagtcagcactggcagcaaggatgtggtccgctacctgctggaccacgcccccccagagatccttgatgcggtggaggaaaacggggagacctgtttgccaccaagcagcggccctgggccagcgcaccatctgccactacatcgtggaggccggggcctcgctcatgaagacagaccagcagggcgacactccccggcagcgggctgagaaggctcaggacaccgagctggccgcctacctggagaaccggcagcactaccagatgatccagcgggaggaccaggagacggctgtgtagcgggccgcccacgggcagcaggagggacaatgcggccaggggacgagcgccttccttgcccacctcactgccacattccagtgggacggccacggggggacctaggccccagggaaagagccccatgccgccccctaaggagccgcccagacctagggctggactcaggagctgggggggcctcacctgttcccctgaggaccccgccggacccggaggctcacagggaacaagacacggctgggttggatatgcctttgccggggttctggggcagggcgctccctggccgcagcagatgccctcccaggagtggaggggctggagagggggaggccttcgggaagaggcttcctgggcccctgtcttcgcccggggtccccgcccgcgtctgccacccattcctccgggtttctccggaaactcgcctgctccatggctgccttccttgctggccccgtccgcacctcccgcc

SEQ ID NO: 71026 - DNA, 665 bp, Homo Sapiens
  misc_feature (549)..(606): n is a, c, g, or t
ctcaccctgctcacccacgccccggtcactgcaaggggatgctgcaccccctcaaggtgaagagctgattgaggctgccaagaggaacgacttctgtaaggtactagctccaggctccagttccttcccccagcagctccctcgggccctggggagcgaggcctctgggttgggccaagagctgacctgctcaggtgctgtcatctgtcatcgtctggccctctgtgggatctccagtgatcgtcccattccacttcactgtatctctgtctaggccacaatagatggctcctagtaggggcttcctagctcagtccacctgtccctggtgcttagaaagggagcaggtcagaggaagcactgctccagggcttggtcaccagtggctggccaagagagcccacaggctgtggggtgagaggcccctcctccggtgtgctccagaaaaacccccgaggccactcccgagtaaaatgggtgaccgcacctcgttccaggcggggctggggtacccccggttggggcccaccgtgggggaactccgggaannnnnnnnnnnnnnnnnnnnnnnnnnnnnnnnnnnnnnnnnnnnnnnnnnnnnnnnnnttaaggtctccggaaacctcccccccaaactttgtggggcggacccttttgtgcccccg

SEQ ID NO: 71027 - DNA, 937 bp, Homo Sapiens
  misc_feature (899)..(899): n is a, c, g, or t
cgccgagccatggcggacgaggagcttgaggcgctgaggagacagaggctggccgagctgcaggccaaacacggggatcctggtgatgcggcccaacaggaagcaaagcacagggaagcagaaatgagaaacagtatcttagcccaagttctggatcagtcggcccgggccaggttaagtaacttagcacttgtaaagcctgaaaaaactaaagcagtagagaattaccttatacagatggcaagatatggacaactaagtgagaaggtaagcttagacagccttgaggaactttactgttacctgctttatcaaaacatggcttcaaaaggtcagctgcatcttcactggattacagaattcttgctgactctcagaagaaattgttggagagaatagtcatacctactttaaaagagaataaattgcctttcctaaattcctctgcttcgctcctttcctggcgttgctctggaaccttgttggtgtctgtgacccaatgactgttagggtcagctagcttcaattgcccctgcactggaagcaaggtttgtcagtaacaccaattaaaatactaccagtgtaagtagaaggtgtgttttgcagatgagaaggtgctaagatgccttgcttatgttctctgtgttgctgtaataccatgaggggtatgttgtggcaaacctggcctttgagatcaagacgaaccccacctgccctgagaagccgtctgctaccaccacagcctacccgaattggtcctgtcccctaaacccctcacactgagaactgcttgtgtgggagagagctggttgggttgatcttttccgagtgtgacttacctccttcaaggggatgtttaagcttctcggggcagagtggtgtgtctattcctgacacanacaccgtggtatatgtggttgtcacactcagctagtga

SEQ ID NO: 71028 - DNA, 800 bp, Homo Sapiens; identical to SEQ ID NO: 15515
  misc_feature (579)..(579): n is a, c, g, or t
  misc_feature (582)..(582): n is a, c, g, or t
  misc_feature (586)..(639): n is a, c, g, or t
  misc_feature (647)..(647): n is a, c, g, or t

SEQ ID NO: 71029 - DNA, 1730 bp, Homo Sapiens
  misc_feature (916)..(916): n is a, c, g, or t
aaaaacttacggctaggtacgaggctcggtgttaaattcggcacgaggctcggagctgattcccgggactaggttgcgggagaaagcctgttgcgtggaagataaggcggcgcgggaagtggacacagggtgggctggagctcagatctaactggactctcgctcctgctggctggacatggaggatttggaggaagatgtaaggtttattgtggatgagaccttggactttggggggctgtcaccatctgacagccgtgaggaggaagacataacagtgttggtgactccagagaaaccacttcgacggggcctctcccaccgaagtgacccaaatgcagtggcacctgccccccagggtgtgaggctcagcctaggccccctcagtccagagaagctggaggagatcctcgatgaggccaaccggctggccgctcagctggagcagtgtgccctgcaggatcgggagagcgcaggcgagggcctggggcctcgccgagtgaagcccagtcctcggcgggagacctttgtgctgaaggatagtcctgtccgagacctgctgcccactgtgaactctttgacgcggagcaccccctccccaagcagcctgacgcctcgactccggagtaatgataggaaggggtcagtcagggctctccgggctacatctggaaagaggccctccaacatgaagagggagtcacccacttgcaatctgttccctgcatccaaaagcccagcatcttctcctcttacccgatcgactcccccagtccgggggagagccgggcccagtgggagagcagcagccagtgaggagaccagagcagccaagttgcggggagcagctgctaaatcttccagtcaactgcccattccctcggccatccccaggcctgccagccgaatgccactncaccagccggagtgtgccacctgggcagaggtgccctacctccggattctctgtcaactcgaaaagggctcccaagaccaagcactgcaggacacagagtgcgggaaagtggacacaaggttcctgtttcccagcgactaaatcttcctgtcatgggtgccactcgcagcaatctgcagccccccaggaaagtggcagtcccaggacctaccaggtaaagagatcaggacagcaagcaagacttcagtagcaaaccactacagtcagtacctggactcgcctctacccagcagaccctgactccagcagattctggcccagggacaggaggaagagatgccaccagggctggtctcccaggagtagagaccatgggaaatggggtggattaggattgagctggagaagacttaaactctctgggttgaaagaagattaggggaaaagaggtcaccttccagcagtgaaatgaacaaatagaagatgagaagtacaggcaagtggtttgtctttatccacccccactgttgtggtcagccccagagaattttatcttcttccttggcattggttcactggacatttccacgtgagcggcctccgtagctaacctccctgccctctgaggagccatcttcctgaatcgcattctctactggactctggcctgcttggagaggtggcagcaggcacctggtcttcagaaattgtttcctgtgaattctgtgactcctaataggccagtttgtgataagcttactctatgagtcttcatttttctaaaataaagtgaatgtatttttatattctcggt

SEQ ID NO: 71030 - DNA, 1031 bp, Homo Sapiens
  misc_feature (122)..(122): n is a, c, g, or t
  misc_feature (212)..(212): n is a, c, g, or t
  misc_feature (267)..(267): n is a, c, g, or t
  misc_feature (273)..(273): n is a, c, g, or t
  misc_feature (940)..(969): n is a, c, g, or t
atagtccctgagttgctatctgtcagcagacggaagcataagagttggagtgggtacccagacagagactgatccactagtagccacagtcatcgaccaggacacggccgcatttcccagtncagttgtcagctcagctcagccagctcagcagtatctgctgctggaagctctgctcagctccgctccagtccagtccagctcaggacctngccaatgagtctccagctccaggcaatgtgcagctagcaaatctatgccaagtcntatccntaagcccccaagggcaaacagtgccctgactccaccgaagccagagtcagggctgactctccaggagagcaacacccctggcctgagacagatgaacttcaagtccaacactctggagcgctcaggcgtgggactgagcagctacctttcaactgagaaagatgccagccccaaaaccagcacttctctgggaaagggctccttcttggacaagatctcgcccagtgtcttacgtaattctcggccccgcccggcctccctgggcacggggaaagattttgcaggtatccaggtaggcaagctggctgacctggagcaggagcagagctccaagcgcctgtcctaccaaggacagagccgtgacaagcttcctcgccccccctgtgtcagtgtcaagatctccccaaagggtgtccccaatgaacacagaagggaggccctgaagaagctgggactgttgaaggagtagactctgcgaccagtacagaccctgtcctggctgaacaagaagagacacatgctccacttgggagcctttgccaccacgcaactcagggctcaagatgaatgggagggagagatttgagtccaagcatacatttatattcagtgttgtgccattgagttcccatgtggatcattctgaaggtgatctccaccaagaggnnnnnnnnnnnnnnnnnnnnnnnnnnnnnngagggggggccgctggatacatcactgaagctattgatataacacaatgagtcactgttcag

SEQ ID NO: 71031 - DNA, 600 bp, Homo Sapiens
gcggccgctccaacatcagaatggtaactgctcagtcccacgcctgagcgctccagagtgttggcgtgggactgagcagctacctttcaactgagaaagatgccagccccaaaaccagcacttctctgggaaagggctccttcttggacaagatctcgcccagtgtcttacgtaattctcggccccgcccggcctccctgggcacggggaaagattttgcaggtatccaggtaggcaagctggctgacctggagcaggagcagagctccaagcgcctgtcctaccaaggacagagccgtgacaagcttcctcgccccccctgtgtcagtgtcaagatctccccaaagggtgtccccaatgaacacagaagggaggccctgaagaagctgggactgttgaaggagtagactctgcgaccagtacagaccctgtcctggctgaacaagaagagacacatgctccacttgggagcctttgccaccacgcaactcagggctcaagatgaatgggagggagagatttgagtccaagcatacatttatattcagtgttgtgccattgagttcccatgtggatcattctgaaggtgatcctcgtgcc

SEQ ID NO: 71032 - DNA, 2866 bp, Homo Sapiens
  misc_feature (2781)..(2799): n is a, c, g, or t
gtgacagctgcatctggagcactgagaaacctggctgtggctgctcgcaacaaagaattaattggtagacatgctattcctaacttggtaaggaatctgccaggaggacagcagaactcctcttggaatttctctgaggacactgtcatctctattttgaacactatcaacgaggttatcgctgagaacttggaggctgccaaaaagcttcgagagacacagggtattgagaagctggtgttgatcaacaaatcagggaaccgctcagaaaaagaagttcgagcagcagcacttgtattacagacaatctggggatataaggaactgcggaagccactggaaaaagaaggatggaagaaatcagactttcaggtgaatctaaacaatgcttcccgaagccagagcagtcattcatatgatgatagtactctccctctcattgaccggaaccaaaaatcagataagaaacctgatcgggaagaaattcagatgagcaatatgggatcaaacacaaaatcactagataacaactattccacaccaaatgagagaggagaccacaatagaacactggatcgatcgggggatctaggcgacatggagccattgaagggaacaacacccttgatgcagaagatttagcaccactatctccgttccatctgggcttatatgtacttttattttttggtggtgaaattgactgatgattttcctttttcttcgctggactattgtgccaactgccaggctgcctcctgcccttacagccctaagtggctgccttctttccatcaactcccaacttcttcctgtgaagtttaattgtctcaacgcctccccctcccccattccctccatttttctcccaagaaacctgactcaattatttgcatattttgagaaactgctgcagattagttctttttgccagttttccctggaactcctggccttttgtggaggggagggatggagagaataggaatcttcactagaagccgtgggaagaattggaagttacatgctgtatatgcaatgtccagcagtctgataaactgacgattcttaatcaagatttttttcctgatggggaagggacttttattttcttttagagaggggaaagtgtgagctcttcccttattcctaatggctatttttgaagcaaagaaggccagcaacattggcacatgccacctggcaaaggacccttgagtaagtgaaggtctcctaaaactgggattaagaaaccttgctctcctcatctccaaggcagggaccatcaagaacctacagactccatctcttctgcaagcctcatgccaaccctgggctattgctgctgccccttaaacacaggctgtccttaacccacctctcctgccctgtgatatgtctgctgagttggcctggccatttccaagaggctgtagaaaggggagaatgtcaaggaagacttttggtagagaaggagcagaaagatgtgtttttgggaagaagaagacctctaggaggagctagtaggaatgtacatgaagcaattagtctgaaactggcttccccactcccccgtttctccttttcctatccttataggcctgtcccttgcctctgccctggattggttggcaaactaaaggacttgatgtacataactcctgtcccttttcccttacaaggtggggattgcccctggctttgcctcttctttgtgcctttggcctggggtgcatctcctcccgcccttccatgtgcctttctttgcctctgcagtctcatttctcataattttgcaaattatattttgttgctttcttacctactattggccctaaatagcagaaagaagagaagtgaccgagagaacctcagattcttcattgaggattggtatagccatgacttcagtcatagcaagcttttgctcaacagcatatgggtgggattttgcaaaaatcctattctgatgaatctcaaagtaaggctggtaagagaagtgagtggtgtgactcttactccttaggtgcccagaatttaccatcatctctgaaggagttacagggaagtggtctccccaattctcccctccctccagtattgccccctctcactttagcatatattaattagcaggttgggctagagaaatcagctgctatgcgggttgattattattattatttctaatccttttccttatttgccttctactccccttaatctaatctaaaagctctgttccatgcaactggagttccttatccctctcttccccttcccttatatattgaggctatggggtaggagaaaagtgcacaacccaccaccccctttactcgtgcattaaaatttcttatttacccttttcccccttcccatttcttcccactttcatctaccttttctggcaaaaaggagccttttgctctctgtgaccctaagagcacactgcacagggaaaattgccccatccagacctggctccactcttgatctctcttgtcctcttctgctcttttcctggtgctcttttttctcggtggggtgtgggtaatagaacagccgtgggcttttggggacctttaacttttttttctctcttttgtttataaaaaacactaaacattcaattccagagaaccaaaaatcccaccttcccaccgaacactactaaggggcttgtgttctgctccataccttttctcttttctttctgtcttgttaatgcttttaaaaacaaatgagttttttatataaataaagtttttaaagtgtgtnnnnnnnnnnnnnnnnnnncctgagcagcggccgcaagctttttccctttagtgagggttaatttgagcatggcactggccgtcgt

SEQ ID NO: 71033 - DNA, 1452 bp, Homo Sapiens
gtgggggccaggcagcacagatgaagcatttacctatctaggtaagtcaggaggagctcaaaaggagaagaaaacagtaggaggcaggtgaagcagcctctgtctccatctctgccctttgaaacaaaagggtatttcttttctctcttcagcccccaacccagtggaggcccggcttgggacattgttcacttcccctcgcttcccctctagaagccccctttgccatccctgcaccttgtttcgggtgatgcccgagagggagctgtggccagcggggactggctcagaacccgtgacccgtgtcggcagctgtgacagcatgatgagcagcacctccacccgctctggatctagtgatagcagctacgacttcctgtccactgaagagaaggagtgtctgctcttcctggaggagaccattggctcactggacacggaggctgacagcggactgtccactgacgagtctgagccagccacaactcccagaggtttccgagcactgcccataacccaacccactccccggggaggtccagaggagaccatcactcagcaaggacgaacgccaaggacagtaactgagtccagctcatcccaccctcctgagccccagggcctaggcctcaggtctggctcctacagcctccctaggaatatccacattgccagaagccagaacttcaggaaaagcaccacccaggctagcagtcacaaccctggagaaccggggaggcttgcgccagagcctgagaaagaacaggtcagccagagcagccaacccaggcaggcacctgccagcccccaggaggctgccttgacttggacgtggtgctcatccctccgccagaagctttccgggacacccagccagagcagtgtagggaagccagcctgcccgaggggccaggacagcagggccacacaccccagctccacacaccatccagctcccaggaaagagagcagactccttcagaagccatgtcccaaaaagccaaggaaacagtctcaaccaggtacacacaaccccagcctcctcctgcagggttgcctcagaatgcaagagctgaagatgctcccctctcatcaggggaggacccaaacagccgactagctcccctcacaacccctaagccccggaagctgccacctaatattgttctgaagagcagccaaagcagtttccacagtgacccccagcactggctgtcccgccacactgaggcctgggctggagctgcaggctgagccagacctggagctggggacagatgctgggcccgtgtctccttgggtctgatggagctggtgggcttacttaagtggagtccaggctcatcttgatcctggggtagccccagcttctctagagcttctttacgtgcttttctctgctccttgcagtgaacaggagatcaggccagaatctccaggggaagtcctcgt

SEQ ID NO: 71034 - DNA, 1134 bp, Homo Sapiens
tgcgatgaaggcctgcgggcatgtggtttgtgggaagtgctccgagttccgggcccgcctcgtctatgacaacaaccgctccaaccgtgtgtgcactgattgctatgtggccttgcacggggtgcctgggagcagtccagcctgcagccagcatacaccccagcgccggaggtccatcctggagaaacaggcctcagtggctgcagagaacagcgtcatctgcagcttcctgcactacatggagaagggtggcaaaggatggcacaaggcatggttcgtggtccctgaaaatgaacccttggtgctgtatatctacggagcccctcaggatgtgaaagcccagcgcagcctgcccctcattggcttcgaggtgggaccgcccgaggcaggggagcggcctgacagaaggcatgtcttcaagatcacccagagccacctcagctggtacttcagccctgagacagaggaactacagcgacgctggatggctgtgcttggccgggcgggccgaggggacacgttctgcccggggcccacactgtctgaggacagggagatggaggaggcaccggtggctgctttaggagccactgctgaaccccccgaatccccccagacccgagacaagacctagagggtttgggacaaactgggagcccccaccccacactctagttgcccatgtctgattgggggctctagccccttccctcccagctcagtcaatacttgaactcccatcacgggcactttcaatcccgaatgctgggtcttgggttttttaattcatcttttcacaaaacgtgggcttttaaaaaatatattcctacagtgatgtcaatttttattaatccctgtccccagggagggtgggagccgttgccagtcctacctgaattaggtcgtttttctccctcatccctcaataccctaccacagatcctgcctccacccagttccccacaaagcaccagaggtaggagacctggattcaagtgccagctctgccactgaccctggggccccgacccagccctgcctcctcagccagtgtcttcacacgtacaactccacgtggggtggcaactagacctctcctgcctctcccatggcttacagcttctacccggcccc

SEQ ID NO: 71035 - DNA, 456 bp, Homo Sapiens
gatgcccggtgtctctggccacagaaacaagcctcaatgactgcagagaacagcgtcatctgcagcttcctgcataacatggagaagggtggcaaaggatggcacaaggcatgggtcgtggtccctgaaaatgaacccttggtgctgtatatatacggagcccctcaggtatgcatcctactccttcgggtcctttcacccacctggcaaagccagatccagtccttgacctctccttggccttggaagataaggtgacccttggaagataaggtgagcctatctctaagaggaaatcagaaccccaacccttgagagacaaagactggctagagacaaggagtggttgtggtatgtagggaaaaccaggatgagttgtgggcctggcttcctggaaggagtagagatggggaactgctaggcccaatttggagtgggtaagagtatgcagatggg

SEQ ID NO: 71036 - DNA, 573 bp, Homo Sapiens
tgagctcccacgcctggctctatcaaggttttcaaagccctttgcagatctgccaggtatggggatgggcacgagtggatggactgtctgaagcgaacactcccatctcccaggtactcgggaggcctggccccacctaataacatagtgtccatctcccaggtggcctccgacaaaggtgaactctgcaactctcagctgcctttgctcggagaagagcacctcacagcatggccagaagctcagggctgcccacgtcaagccctcaccagcacgtccttcagcgccccgggaacaacgcttccccctgcaggcggggagcagccacgcacaaatgcttggcactgcagggcacacacaggagccgcagccacggagcgcagagcaccctgctcacctgcctccaccagggccatgccagctggtgctatcgcaatcacctcactgcctgatttaaacttggagaccacaggctaagtgccagtcccctgccttcaggcaggacactcattcctgaaaactaatccctttcccaaaaatctctagagaagaaaatcttcccagttctcccct

SEQ ID NO: 71037 - DNA, 2892 bp, Homo Sapiens
  misc_feature (1938)..(2003): n is a, c, g, or t
  misc_feature (2038)..(2078): n is a, c, g, or t
taggtctaggtgcgaggctgggtggcgaattcggcacgaggggcgaaggaggtggtggctgcgttgggctccgggaagccgttcgggctggggctgtcggccgcggggcggaggcactcgcgcgggggatggcccactgcgtgaccttggttcagctgtccatttcctgtgaccatctcattgacaaggacatcggctccaagtctgacccactctgcgtccttttacaggatgtgggagggggcagctgggctgagcttggccggactgaacgggtgcggaactgctcaagccctgagttctccaagactctacagcttgagtaccgctttgagacagtccagaagctacgctttggaatctatgacatagacaacaagacgccagagctgagggatgatgacttcctagggggtgctgagtgttccctaggacagattgtgtccagccaggtactgactctccccttgatgctgaagcctggaaaacctgctgggcgggggaccatcacggtctcagctcaggaattaaaggacaatcgtgtagtaaccatggaggtagaggccagaaacctagataagaaggacttcctgggaaaatcagatccatttctggagttcttccgccagggtgatgggaaatggcacctggtgtacagatctgaggtcatcaagaacaacctgaaccctacatggaagcgtttctcagtccccgttcagcatttctgtggtgggaaccccagcacacccatccaggtgcaatgctccgattatgacagtgacgggtcacatgatctcatcggtaccttccacaccagcttggcccagctgcaggcagtcccggctgagtttgaatgcatccaccctgagaagcagcagaaaaagaaaagctacaagaactctggaactatccgtgtcaagatttgtcgggtagaaacagagtactcctttctggactatgtgatgggaggctgtcagatcaacttcactgtgggcgtggacttcactggctccaatggagacccctcctcacctgactccctacactacctgagtccaacaggggtcaatgagtacctgatggcactgtggagtgtgggcagcgtggttcaggactatgactcagacaagctgttccctgcatttggatttggggcccaggttccccctgactggcaggtctcgcatgaatttgccttgaatttcaaccccagtaacccctactgtgcaggcatccagggcattgtggatgcctaccgccaagccctgccccaagttcgcctctatggccctaccaactttgcacccatcatcaaccatgtggccaggtttgcagcccaggctgcacatcaggggactgcctcgcaatacttcatgctgttgctgctgactgatggtgctgtgacggatgtggaagccacacgtgaggctgtggtgcgtgcctcgaacctgcccatgtcagtgatcattgtgggtgtgggtggtgctgactttgaggccatggagcagctggacgctgatggtggacccctgcatacacgttctgggcaggctgctgcccgcgacattgtgcagtttgtaccctaccgccggttccagaatgcccctcgggaggcattggcacagaccgtgctcgcagaagtgcccacacaactggtctcatacttcagggcccagggttgggccccgctcaagccacttccaccctcagccaaggatcctgcacaggccccccaggcctaggttcccttggaggctgtggcaagtcctcaatcctgtgtcccagaggtccctctgggccacaacccaacccttctcactctcctcagtgctagcactttgtattttttgatacttttatacttgtttctgcttttgctgctcttgatcccacctttgctcctgacaaccctcattcaataaagaccagtgaagaccnnnnnnnnnnnnnnnnnnnnnnnnnnnnnnnnnnnnnnnnnnnnnnnnnnnnnnnnnnnnnnnnnngagagagagggggggcgcgcgcccaaaaatatatnnnnnnnnnnnnnnnnnnnnnnnnnnnnnnnnnnnnnnnnngacttttgtgctgcgaacaagaaggggcgccccacaagaagggaggcccgcttattatacccgaccgagcgagcgcggagcgggcgccgcgttaaaaacaagcgcgcgcacaggggaaaaacacgcgcccacagcgcggcagcaacctccgtgggagaagagaaccacccccacacgcggggggggaggcgcgaccaccaacctatgtgggggcgccccactcctcctcctcaccagacagagatttatttacaccccccactagggggagaacaatatctacaacactctcttctacacgggggtactacataaggggtggtgtacaacaccaaggcgcccgataatatccccctccttcgcgcctagcgaaaacatttttcgccccccaaccgacgagtcatctagatatcgcgaggaggacacaaatatttttttaacccacgggggggtcttgttttttatataataaaaatctcgcgcagtgacgacccagtcagaactacagagcaaccaggcccacagacacacgccagcgcgacgaggactgaccactcacaaacagaccgaaccaaccgagcacacaagagtgctacgacgccgattgacgtacctaggaccaagaagcaaagaccgctctacccacctcacagctcgctaagccaagggacacagagtcggagcactgagacgggatgacagcggagaacactacgcagcacgtcaggcacacgaaaacccacaaagccacacaaactacaacacacacgaggcacagaaaaagccaacagcaaaacaacacccacagaaccca

SEQ ID NO: 71038 - DNA, 940 bp, Homo Sapiens
ttaggctaaggtacgaggcctgggtgttgaattcggcacgagggaggtggtggctgcgttgggctccgggaagccgttcgggctggggctgtcggccgcggggcggaggcactcgcgcggggggtaattcggggtctgggttctggtgccgcgcagctttccccgatggcccactgcgtgaccttggttcagctgtccatttcctgtgaccatctcattgacaaggacatcggctccaagtctgacccactctgcgtccttttacaggatgtgggagggggcagctgggctgagcttggccggactgaacgggtgcggaactgctcaagccctgagttctccaagactctacagcttgagtaccgctttgagacagtccagaagctacgctttggaatctatgacatagacaacaagacgccagagctgagggatgatgacttcctagggggtgctgagtgttccctaggacagattgtgtccagccaggtactgactctccccttgatgctgaagcctggaaaacctgctgggcgggggaccatcacggtctcagctcaggaattaaaggacaatcgtgtagtaaccatggaggtagaggccagaaacctagataagaaggacttcctgggaaaatcagatccatttctggagttcttccgccagggtgatgggaaatggcacctggtgtacagatctgaggtcatcaagaacaacctgaaccctacatggaagcgtctctcagtccccgttcagcatttctgtggtgggaacccaagcacaccaatccaggtgcaatgctccgattatgacagtgaaggggtcacatgatctcatcgggaccttccacaccagcttggccccagctgcagggaagtcccgggctgagtttgaatgcatccacccctggaaaaacagcagaaaaaagaaaagctaccaa

SEQ ID NO: 71039 - DNA, 916 bp, Homo Sapiens
gacggtcagtacctatacgtgtctaaggtagcgaggcctgggtggcgaattcggcacgagggaggtggtggctgcgttgggctccgggaagccgttcgggctggggctgtcggccgcggggcggaggcactcgcgcggggggtaattcggggtctgggttctggtgccgcgcagctttccccgatggcccactgcgtgaccttggttcagctgtccatttcctgtgaccatctcattgtacaaggacatcggctccaagtctgacccactctgcgtccttttacaggatgtgggagggggcagctgggctgagcttggccggactgaacgggtgcggaactgctcaagccctgagttctccaagactctacagcttgagtaccgctttgagacagtccagaagctacgctttggaatctatgacatagacaacaagacgccagagctgagggatgatgacttcctagggggctgctgagtgttccctaggacagattgtgtccagccaggtactgactctccccctgatgctgaagcctggaaaacctgctgggcgggggaccatcacggacttcctgggaaaatcagatccatttctggagattcttacggccagggtgatggggaaagggcaacctggtgtacaggatctgaggtcatcaagaagcaaccctgaaaacctacctggaaccgtttctcagtacccggtacaagcattacaggggggagggaaaccccgaagcagaacgacagtccagggtgcacaatggctcaggaccaggaccaggggacgggggtccacatgagtctcaatcggataacctaaccaaaacaagggatggcccaaatgacaggcagccccgagatcgagttgcgaatcgcatccagcctgagaaaggcaggagacacaagagaa

SEQ ID NO: 71040 - DNA, 269 bp, Homo Sapiens
ccgaggggcctgccaagaaaagggaaaagtcagtggtggcccagaacagctgcccaaagtctgtatttcatgcccaagaacccaaccatatcccaggcttagaggaaaaggtgagcatcccttgggcctcaaccctactcacatcagggaaaggtgaaagggtaaactcccagatcaaatttgcacctactcacattctggaaccggcggtagggtacaaactgcacaatgtcgcgggcagcagcctgcccagaacgtgtatgcagggg

SEQ ID NO: 71041 - DNA, 1311 bp, Homo Sapiens
  misc_feature (494)..(494): n is a, c, g, or t
ttttagataaaaatttataccagtatgatttagtactgcattttatgttttaataagatcatccatgtaaaccttagtcatattataacatgtctatcattaatagtaaatactgttttaaaatattaatatttacctttataattttatacttaatttgcatttttataaataaatacattgttatcaagttcaattaagtggatctaatcattaacactttgttataaagaaaataatctttaaatagtttgttcttgtgattgtcatttggctacattaaattgattttagttttttacagaaccttaatacttagataaagctgaaaatgtacaaatatataaataaaaatattaacatagttacttatatattgttgcatctctgaattgacttgtaggaaatctagtgatttacagcagataatgtgattgttcatacttctaacacttgtcaggtcacaaaggctgtcatctcattattactgaatngacacatatcaagttaacatagtaacacagagaactagaaatgcttacattcatttatctttaggtaaaatgattaattgaattaatctatgcactaccagctaggatgtcatacagttcacactagcttatcatctttttttcagaacaatatttttatttgccaggttttgtataatttttgtatctatggatatgtaatactatgctactatttcttgccttagggtagaaaccctgaagaaagccattatttcattccatctgccataaatgaatgctacaatagtagatccagacatccattttaagacctgaacaaccaatataaattattttcattgtaccgtatgtcaagttggtatactatgtttttatttacctaatgtagttttatcaagcacaagttaattcctcatgtttgagtttcattattttaaaaggttatatatgaaactcactcaaaataaatttaaaaaatagtaataagatgaaaacaatatttgtatatagtagaaatgaaacatgcagattattttgaaaataatatattaacatttcacattgttattggcagaattgtgttctgtcccccacatttatatatattaagagtcctaagctgtattatctcagaatgtggctgtatttggagatagggtccttaaagaggtaattaagttaaagtaaggctattagggtgagccctaattcaacatgactggtgtctttatttaaaaaaaggaaattagaatacagacaaatacagagggaagtccatgtgaagacaccagggaaaagatagccgcaagcttat

SEQ ID NO: 71042 - DNA, 987 bp, Homo Sapiens
  misc_feature (14)..(14): n is a, c, g, or t
  misc_feature (73)..(73): n is a, c, g, or t
  misc_feature (82)..(82): n is a, c, g, or t
  misc_feature (92)..(92): n is a, c, g, or t
  misc_feature (118)..(118): n is a, c, g, or t
  misc_feature (130)..(130): n is a, c, g, or t
  misc_feature (141)..(141): n is a, c, g, or t
  misc_feature (171)..(171): n is a, c, g, or t
  misc_feature (200)..(200): n is a, c, g, or t
  misc_feature (351)..(351): n is a, c, g, or t
tgagacagctagcntgaacataagaacagctggagtgagggacacagagaccctcatatctgcatgcaacccnaccactgcntcccttcccnttggattagctcgtgtctccagctcntagtcctgtatncaggacccatnagcgaggatcaggaaagcagagcagctctncagaaaggaggaaaatccctgcctctccnagagagactcccccattgctgtctcttgtgtgtgtcatgcacaaggaaggcttggttgtgtgccaggataaggggcacaagggcctcgggtgtggccagagaccccatgcttaagcttttatggtataggtcagtttctgtaatcactttnaggtgtgtcagggccttgtgcagtaacagtgcacacagaagttagtgtttctgtgggctaagggttgtagctctgtatcaggattctgggagtgggtctggatttctggtgtgtggacttaagaagctgtgtctccctatgtgcaggagacaagcagcccaagaaacaggagaaaaacccagtgttggtgtccccagagtttgtggatgaagctctgtgtgcgtgcgaggagtaccttagcaacttggcccacatggacatcgacaaggacctggaggccccgctgtacctcacccccgagggctggtccctcttcctccagcgctactaccaagtggtccagtgagtcccctgcagctgggactttgggctgtgggcaggtgcttagggatagaccctttctgtctcgtgcagcccctaccccttccccaagcctcccgctcgtttaccccgctgttttgctcaggaaccctcgaggactcccactgcctccgtgatagggtctgggccacttttcttggttcttggcatagcatagtcactaagagcatggactgtgccaccaaatggacagcacattacccaaagtgtgtgttgtgtggatgttaattctacaggaagtaaatagattttatg

SEQ ID NO: 71043 - DNA, 574 bp, Homo Sapiens
gcggccgccaatatacttctgcaccacccacttgccgtccttcatcaccacggggttgccgttcaccagcttcagcatctcctccaggtggtccatgcacatgatgcctcgtccgcgggacttggctcctggcttcacgatccagatgttgcgatccccttccatgtctatctggggtaccacggcctgcagctgctgcaggatgtcctcacagcgctggacctgagtgtcgaggtgcctgagttctgccccttcgtggaccacttggtagtagcgctggaggaagagggaccagccctcgggggtgaggtacagcggggcctccaggtccttgtcgatgtccatgtgggccaagttgctaaggtactcctcgcacgcacacagagcttcatccacaaactctggggacaccaacactgggtttttctcctgtttcttgggctgcttgtctcctgcacatagggaggggcctgtcacgatcccatatcaaggcaggtaacctgacgcatgccacagcccccattgtcctaaggcctgtcacttacctgaggcccagcacgaacctagatagatc

SEQ ID NO: 71044 - DNA, 685 bp, Homo Sapiens
cgatatttgtggttctggcgttgatctcaatcagccagggctggaagtcctccccgaacacgaagtcagcgccatagagctcaaagctggccttccgacactgcacggtgtccagggaggtctgaagtgcgtggatcacagcatccttcatgccaggcacgatgatagtggaccaagcatttggggcacccatctcctgcaggtgggcctggaacctctggctagaccacatgttgtctggcggaagcagtggatgccgatggcatgagttctccaggtgcttctggatggagttgttgcacaggtgcactgagctggggcagagaacagaaaactgaggtccaggcccttgtgtctctcccatccaaactcagggaggacaggcaagtcctggaagcagccctgggccaccctgcactattcaacttgagatggggccctactgggaaggacaaaaaggacagaggcctgggccccaccacattcttctagggccagaaccacaaatatcgcgatatttgtggttctggccttccttccccaccttagactcggagcctgtatcaggtgtaagccgggacaccgattcccagggttcccgtgatgaagaactgtgatccttgatggcatttcccccctccccagatccgtagccagaaccacaaatatcggggtacggagctgc

SEQ ID NO: 71045 - DNA, 1524 bp, Homo Sapiens
  misc_feature (37)..(37): n is a, c, g, or t
  misc_feature (41)..(41): n is a, c, g, or t
  misc_feature (113)..(113): n is a, c, g, or t
  misc_feature (155)..(156): n is a, c, g, or t
  misc_feature (161)..(161): n is a, c, g, or t
  misc_feature (210)..(210): n is a, c, g, or t
  misc_feature (213)..(213): n is a, c, g, or t
  misc_feature (251)..(251): n is a, c, g, or t
  misc_feature (303)..(303): n is a, c, g, or t
  misc_feature (325)..(325): n is a, c, g, or t
  misc_feature (342)..(343): n is a, c, g, or t
catggtccagatgacacagaggcgttgatgagacatntggntgctcacatctgccagccttgccatccagtgtgtgtgcatatgagttcatgcacagctcctggtgtgagccnaagtgcagtgggagttgacccctccagtgctagcagaaaggnntgagnaggagagcatgaccttggaccacgtgcgttgaccctggcccccacgccntgntgccccacgggcttgagaccattcgtgttctccagtcnccggccgaggctccagccttgccagaaagctggggtgagctgacccagaatncctgccgtgctctccccagcgntaggagaccagccagcnncaggaaccagggaggtgaccctgctctctggcctcctggctgatgtcacagcactgagctcagcccaggccttcgtccactcatgtccaagaggcggggcatcccccacccagccagagcccctgacatgggctgcactcgctgaggccaggcagcgctgcggagaggagcggcagagtgggttgtctgccgcaggcaaccaggcaagtgtgtcggggctggggtgtgaatgccagcctgtgagtcccggaactatgtgggtacccctacccctcacagaagccaagggcatggaggaggtccctccacagtgacaacggtgtggggtaggggaggtgcattcaggacaccacccagggacagtgcctatgtgatcacctcttaaaggctaagcttaggggcatttcccaaagtggggacagagggcaggacgcccaggctgggggctctcctcgcccgccctggtgtctgacagcctcaaggaaggagcagtgcctgtgtcagccatggggcccttggagctgccgctggtgcctagggggcctgggtttctgcccaggcagccagtggctgttgggagcctctgtttcccctgtgctgggggccttgagtgctatgctagcaggggcctggccccaagtgtgagtgatgagcaataaacgtaccgtccccctcaaaaaaaggcacacggctttcctcaaacatcagagactgcatgctggagagaaacttgaagaatgtgagaaaaccttcagcaaggatgaggagcttagaaaagagcagagaactcaccaggaaaagaaagtttattggtgtaatcagtgtagtaggaccttccagggcagctcagatctcatcagacatcaggtaactcatacaagagagaaaccatatgaatgtaaagaatgtgggaaaactcaatcagagctcagaccttctgagacatcatagaattcacagtggagaaaaaccttacgtatgcaataaatgtggggaatcttttaggagcagctcagatcttattaaacaccatcgtgtgcatactggagagaaacctcatgaatgtagtgaatgtgggaaagtctttagccagaagtcccaccttgtcgacacacccagaaaatccacactggagagaagccctatcagtgcactgaatgtgaaaaagccttcaggcgggg

SEQ ID NO: 71046 - DNA, 724 bp, Homo Sapiens
  misc_feature (49)..(49): n is a, c, g, or t
tttagacggcatatggagcgttcagccaacggtggctacgattctgacnggtagtagaacatcatttggagcacggtgaacctggagtaggagaagcagcagcaggattcctctgcttcctccaccaccatcctggacgaggaaccgatcgtgaatagggggctggcagctgccctgctcctgtgtcagaacaaagggctgctggagaccacagtgcagaaggtggcccgggtgaaggcccccaacaagtcgctgccctcagccgtgtactgcatcgaggataagatggccatcgatgacaagtacagccggagggaggaataccgaggcttcacacaggacttcaaggagaaggacggctacaaacccgacgttaagatcgaatacgtggatgagacgggccggaaactcacacccaaggaggctttccggcagctgtcgcaccgcttccatggcaagggctcaggcaagatgaagacagagcggcggatgaagaagctggacgaggaggcgctcctgaagaagatgagctccagcgacacgcccctgggcaccgtggccctgctccaggagaagcagaaggctcagaagaccccctacatcgtgctcagcggcagcggcaagagcatgaacgcgaacaccatcaccaagtgacagcgccctcccgccccggccctgcctcaaccttcatattaaataaagctccctccttattttttcctcc

SEQ ID NO: 71047 - DNA, 1565 bp, Homo Sapiens
gcacgaggggcgcccaagccgccgccgccagatcggtgccgattcctgccctgccccgaccgccagcgcgaccatgtcccatcactgggggtacggcaaacacaacggacctgagcactggcataaggacttccccattgccaagggagagcgccagtcccctgttgacatcgacactcatacagccaagtatgacccttccctgaagcccctgtctgtttcctatgatcaagcaacttccctgaggatcctcaacaatggtcatgctttcaacgtggagtttgatgactctcaggacaaagcagtgctcaagggaggacccctggatggcacttacagattgattcagtttcactttcactggggttcacttgatggacaaggttcagagcatactgtggataaaaagaaatatgctgcagaacttcacttggttcactggaacaccaaatatggggattttgggaaagctgtgcagcaacctgatggactggccgttctaggtatttttctgaaggttggcagcgctaaaccgggccttcagaaagttgttgatgtgctggattccattaaaacaaagggcaagagtgctgacttcactaacttcgatcctcgtggcctccttcctgaatccttggattactggacctacccaggctcactgaccacccctcctcttctggaatgtgtgacctggattgtgctcaaggaacccatcagcgtcagcagcgagcaggtgttgaaattccgtaaacttaacttcaatggggaagggtgaacccgaagaactgatggtggacaactgggcgcccagctcagccactgaagaacaggcaaatcaaagcttccttcaaataagatggtcccatagtctgtatccaaataatgaatcttcgggtgtttccctttagctaagcacagatctaccttggtgatttggaccctggttgctttgtgtctagttttctagacccttcatctcttacttgatagacttactaataaaatgtgaagactagaccaattgtcatgcttgacacaactgctgtggctggttggtgctttgtttatggtagtagtttttctgtaacacagaatataggataagaaataagaataaagtaccttgactttgttcacagcatgtagggtgatgagcactcacaattgttgactaaaatgctgcttttaaaacataggaaagtagaatggttgagtgcaaatccatagcacaagataaattgagctagttaaggcaaatcaggtaaaatagtcatgattctatgtaatgtaaaccagaaaaaataaatgttcatgatttcaagatgttatattaaagaaaaactttaaaaattattatatatttatagcaaagttatcttaaatatgaattctgttgtaatttaatgacttttgaattacagagatataaatgaagtattatctgtaaaaattgttataattagagttgtgatacagagtatatttccattcagacaatatatcataacttaataaatattgtattttagatatattctctaataaaattcagaattctaaaa

SEQ ID NO: 71048 - DNA, 1096 bp, Homo Sapiens
  misc_feature (826)..(961): n is a, c, g, or t
  misc_feature (973)..(984): n is a, c, g, or t
  misc_feature (1011)..(1020): n is a, c, g, or t
ggcctgggtggcgaattcggcacgagggcggccggagcgggacgggcccggcgcgggagggagcgaagcagcgcgggcagcgagcgagatgcagcaccgaggcttcctcctcctcaccctcctcgccctgctggcgctcacctccgcggtcgccaaaaagaaagataaggtgaagaagggcggcccggggagcgagtgcgctgagtgggcctgggggccctgcacccccagcagcaaggattgcggcgtgggtttccgcgagggcacctgcggggcccagacccagcgcatccggtgcagggtgccctgcaactggaagaaggagtttggagccgactgcaagtacaagtttgagaactggggtgcgtgtgatgggggcacaggcaccaaagtccgccaaggcaccctgaagaaggcgcgctacaatgctcagtgccaggagaccatccgcgtcaccaagccctgcacccccaagaccaaagcaaaggccaaagccaagaaagggaagggaaaggactagacgccaagcctggatgccaaggagcccctggtgtcacatggggcctggcccacgccctccctctcccaggcccgagatgtgacccaccagtgccttctgtctgctcgttagctttaatcaatcatgccctgccttgtccctctcactccccagccccacccctaagtgcccaaagtggggagggacaagggattctgggaagcttgagcctcccccaaagcaatgtgagtcccagagcccgcttttgttcttccccacaattccattactaagaaacacatcaaataaactgactttttccccccnnnnnnnnnnnnnnnnnnnnnnnnnnnnnnnnnnnnnnnnnnnnnnnnnnnnnnnnnnnnnnnnnnnnnnnnnnnnnnnnnnnnnnnnnnnnnnnnnnnnnnnnnnnnnnnnnnnnnnnnnnnnnnnnnnnnnnnnccctgggggcgnnnnnnnnnnnntaaaaaattttttaaaccctttttttnnnnnnnnnnccccaaaggtaaaggaaaatgggcaatacttttctccaaaaaaacccgggacataaaaggggttggtttccccccc

SEQ ID NO: 71049 - DNA, 797 bp, Homo Sapiens
  misc_feature (516)..(524): n is a, c, g, or t
gcggcggccggagcgggacgggcccggcgcgggagggagcgaagcagcgcgggcagcgaggcgagatgcatgcaccgaggcttcctcctcctcaccctcctcgccctgctggcgctcacctccgcggtcgccaaaaagaaagataaggtgaagaagggcggcccggggagcgagtgcgctgagtgggcctgggggccctgcacccccagcagcaaggattgcggcgtgggtttccgcgagggcacctgcggggcccagacccagcgcatccggtgcagggtgccctgcaactggaagaaggagtttggagccgactgcaagtacaagtttgagaactggggtgcgtgtgatgggggcacaggcaccaaagtccgccaaggcaccctgaagaaggcgcgctacaatgctcaggtgccaggagaccatccgcgtcaccaagccctgcacccccaagaccaaagcaaaggccaaaggtcagcgaaaggagaagggggtggggctgtcgcggggggctgnnnnnnnnntcaccacccgctgtataaagggcacatatttcaaggttaacacacctaaattttgtgaatcctctggcccaagtggattccccgagtaatttctcgcccctctaccacttggggggacctatcacggctgcctgggcacaatagtttctttcagaaaaatttggcgcctacattatattgattaatgttcgtctccaagtgtgttacagagcacgggcgggaaccaattaattattcttcccccattgggtcccacataattggttgacccaa

SEQ ID NO: 71050 - DNA, 942 bp, Homo Sapiens
gcggccgcggcagcacgctggatcaatgccgatgaaagccaggcccagggcgtggtcctggcctggcgagacgcaagggtgttcgactggaagggcagcgccttggcgggcgttgagcatcagatactgccggacccggcaggcgactttgcctggtgcccgctggctaaaaacggtttcagcggctggttgccggtgccttgaggttctggcgaacccattgggtgacactgtggctccagaacgatcatcgtcactgtggcgagcaggcttgccctgcgttgggctgcgcagcagccctcgctctttcttacgggctgaccgcgccgcctacaagagcgtcccattatctcgtaggaaacggcctgatgttccgtgcgggcatcctcatcaattctatttttttgccgggaatgccatcttcacggtctttgtaatgcacagactaataagaggctgagatgacgaaaacttctgatgagatgccccattccttctgcgcgagcgaccgctacgacccggtcagtcgggccttgcattggttgatggcaattgtgtttgcctggagttattgctcggcggttgtccacttcctgtcctccgattctgcgctggacaagtggctatggccgtatcacaagtcggcgggcctgcttttgctggtgctgctgatactgcgagccggctggaacctgctgaaccggcacaaccgcccgccgagtttcaaccgtgcggctgctgtcgggcatgctgtgctgtatgcgctgatgttccttatccctgttatcgggctggtacgccagtacggctccggtcgtgagttttcggcgtttggcctgccgataatggcgggtttcgagggcgataaaatccagtggatgattgacctggggcgcaattttcatagcttgctgggctggacaatgctggtgttgatcgtcg

SEQ ID NO: 71051 - DNA, 210 bp, Homo Sapiens
aattaaaaactgaagtaggcactcaaggaaacaatgactaataagactgaggaagactgaaaacagaacagaactaagctccccagggctccccaccgagacctacacaagcagacccaagccaattacaatgccttcgtcatctcatttttgggcttctgcttgatccaagagagtttcctttttaaaaaagtaagcacttgcggccgc

SEQ ID NO: 71052 - DNA, 1521 bp, Homo Sapiens
  misc_feature (693)..(871): n is a, c, g, or t
  misc_feature (873)..(873): n is a, c, g, or t
  misc_feature (876)..(876): n is a, c, g, or t
  misc_feature (889)..(904): n is a, c, g, or t
  misc_feature (913)..(913): n is a, c, g, or t
  misc_feature (925)..(941): n is a, c, g, or t
  misc_feature (1016)..(1025): n is a, c, g, or t
  misc_feature (1039)..(1052): n is a, c, g, or t
  misc_feature (1106)..(1131): n is a, c, g, or t
  misc_feature (1160)..(1170): n is a, c, g, or t
  misc_feature (1321)..(1321): n is a, c, g, or t
  misc_feature (1324)..(1324): n is a, c, g, or t
  misc_feature (1369)..(1369): n is a, c, g, or t
attagatcacatcccttaccccagaacaaatgcttcactgtcttctgattgccagtactcctgtggctttgtgccttgactcattgtgttgtcttcagccttgaaggccccttcccacatggactgacatccactcatgtgcctgatccctgaagcctcccagcacccattcagttgcatccccagggcacaggactttgatctcttctgttgccctcgctaggttctccctggtgggttagtgctttgtatctgtctctctgcccctcactaattctacacccatgagaattagacattattctccttaaatatataaggaccatataatctgtatctttttggtgtgtgtatatggtatctggcacatggatctctgattaccagcctgacatcaacaaatcccctcagttacaacgtataggttaaacaaagcttttaaaagctcatgtggtatgacctcaaggttgctaacctggtcactcatggtaattagaaactctgattggcagctttgtatttcttgactaaaaacctaaataaactgattaggttttaggcgttctttcaaagaggttcttgagaagattgagaactatcctatttggtgcttagtgaaaagattttgaattactgtacgtaccagttgttgccatttctttattaaattcagaagtttttttgccaaataannnnnnnnnnnnnnnnnnnnnnnnnnnnnnnnnnnnnnnnnnnnnnnnnnnnnnnnnnnnnnnnnnnnnnnnnnnnnnnnnnnnnnnnnnnnnnnnnnnnnnnnnnnnnnnnnnnnnnnnnnnnnnnnnnnnnnnnnnnnnnnnnnnnnnnnnnnnnnnnnnnnnnnnnnnnnnnnnnngnggngagaaggggccgnnnnnnnnnnnnnnnnaaaagaatnctccaaacaccnnnnnnnnnnnnnnnnnccccccccacggagaagaaagaaaggcgacacacgacgggcgccccaaggaaaacgcccggcgcgggcaaagacnnnnnnnnnnctactcccccaccnnnnnnnnnnnnnncggcggaccggggcacaaccaaagagggggcgtccgaagaacaagcctctgaannnnnnnnnnnnnnnnnnnnnnnnnnctctccgtggtggcggcccctccaccccnnnnnnnnnnnacggcgacccgaagcggcccgcggatgaacaataatatcgcgcgccgcccccgccgcgccgaccgctccgagaaggaggacgcgggtggggctcgatccaccaatagaacgcctccctgccccgggggagatgcgcggcgcgccccccagnggngcgggggatcgggatagcgtctgggggggtcccgcccgcggcggngagacccgcaaggcgctgggtggcgccctgctaaacaaagaaaaactattcggccccgccgcgccgccgaaaaaagcgggagggaggcgcagcacagacgggagcctgcctcactgcgggggtggccccctcgttatcaataacaacaagag

SEQ ID NO: 71053 - DNA, 599 bp, Homo Sapiens
tgatataaaaatattgatcacagtgagttttaccaattgttgttgctataaaaatgaatgcagaaacaatatttttagtggaaataaattatatagtcattcttttaaagaaatcacaagaggaaaatcttggctgtttggtcattggcagaaaaccagtctttacaagaggccttttgcagatgagctccagtccatttctgtaaagttatccacatggttcaggaaagacagacttttgtctttgttagcatggacccacaagggtctctctgttcacagacagttctactgtggcaacacagttttccataatagaaaatcgatgaactggaaaacagtacaatcttagctcatttgtggtcttttccaatatgaagggacacaacgacacacttcttcactatatgaaaatcctggctcacaagccttctggcggttcgtacatggccgtctgtaacagctaggagaacaaacaagaacacacttacgttaaagatcaaggcaatggattcatcatgctaccaaggtatttctgtgtttttaaatttcagactgaaataaaattactaattttatgacgaaattgttaaaaggtt

SEQ ID NO: 71054 - DNA, 1275 bp, Homo Sapiens
agaaagactcaatgcatgccacgggaggtgtgtatagatgtggggaaggagtttggagtcgcgacaaacaccttctttaaacctccatgtgtgtccgtctacagatgtgggggttgctgcaatagtgaggggctgcagtgcatgaacaccagcacgagctacctcagcaagacgttatttgaaattacagtgcctctctctcaaggccccaaaccagtaacaatcagttttgccaatcacacttcctgccgatgcatgtctaaactggatgtttacagacaagttcattccattattagacgttccctgccagcaacactaccacagtgtcaggcagcgaacaagacctgccccaccaattacatgtggaataatcacatctgcagatgcctggctcaggaagattttatgttttcctcggatgctggagatgactcaacagatggattccatgacatctgtggaccaaacaaggagctggaagaacagaccggtcagtgtgtctgaagacaggggcttcggcctgccagctgtggaccccaccaaagaactagacagaaactcatgccagtgtgtctgtaaaaacaaactcttccccagccaatgtggggccaaccgagaatttgatgaaaacacatgccagtgtgtatgtaaaagaacctgccccagaaatcaacccctaaatcctggaaaatgtgcctgtgaatgtacagaaagtccacagaaatgcttgttaaaaggaaagaagttccaccaccaaacatgcagctgttacagacggccatgtacgaaccgccagaaggcttgtgagccaggattttcatatagtgaagaagtgtgtcgttgtgtcccttcatattggaaaagaccacaaatgagctaagattgtactgttttccagttcatcgattttctattatggaaaactgtgttgccacagtagaactgtctgtgaacagagagacccttgtgggtccatgctaacaaagacaaaagtctgtctttcctgaaccatgtggataactttacagaaatggactggagctcatctgcaaaaggcctcttgtaaagactggttttctgccaatgaccaaacagccaagattttcctcttgtgatttctttaaaagaatgactatataatttatttccactaaaaatattgtttctgcattcatttttatagcaacaacaattggtaaaactcactgtgatcaatatttttatatcatgcaaaatatgtttaaaataaaatgaaaattgtattataagctg

SEQ ID NO: 71055 - DNA, 1956 bp, Homo Sapiens
  misc_feature (1651)..(1652): n is a, c, g, or t
  misc_feature (1672)..(1673): n is a, c, g, or t
gcacagagaacacccctagcatgaacagtgtgaggattccaccagctttttcaccatgaaggagacagaccgggaggccgtgtgcgacagcagtgcaaagggttgctgggatgctccagcgcccggaccagctggacaaggtggagcagtatcgcaggagagaagcgcggaagaaggcctccgtggaggccagattgaaggccgccatccagtcacagttggacggggtgcgcacaggcctcagccagctccacaacgccctgaatgacgtcaaagacatccagcagtcgctggcagacgtcagcaaggactggaggcagagcatcaacaccattgagagcctcaaggacgtcaaagacgccgtggtgcagcacagccagctcgccgcagccgtggagaacctcaagaacatcttctcagtgcctgagattgtgagggagacccaggacctaattgaacaaggggcactcctgcaagcccaccggaagctgatggacctggagtgctcccgggacgggctgatgtacgagcagtaccgcatggacagtgggaacacgcgtgacatgaccctcatccatggctactttggcagcacgcaggggctctctgatgagctggctaagcagctgtggatggtgctgcagaggtcactggtcactgtccgccgtgaccccaccttgctggtctcagttgtcaggatcattgaaagggaagagaaaattgacaggcgcatacttgaccggaaaaagcaaactggctttgttcctcctgggaggcccaagaattggaaggagaaaatgttcaccatcttggagaggactgtgaccaccagaattgagggcacacaggcagataccagagagtctgacaagatgtggcttgtccgccacctggaaattataaggaagtacgtcctggatgacctcattgtcgccaaaaacctgatggttcagtgctttcctccccactatgagatctttaagaacctcctgaacatgtaccaccaagccctgagcacgcggatgcaggacctcgcatcggaagacctggaagccaatgagatcgtgagcctcttgacgtgggtcttaaacacctacacaagtactgagatgatgaggaacgtggagctggccccggaagtggatgtcggcaccctggagccattgctttctccacacgtggtctctgagctgcttgacacgtacatgtccacgctcacttcaaacatcatcgcctggctgcggaaagcgctggagacagacaagaaagactgggtcaaagagacagagccagaaaccgacccaggacgggtactaccagaccaaacatcaccgccattggctgccgaaagcgctggagacagaaaagacaagactgctgctcagataagagacagagccagaaaacaaccaggtacgagtactaccagaccacaccacatgacattctctcctaagcagatataaagatgaagcgcagctgtataaagaagagcacctgaggaatcggcagcaccctcactgctacgttcagtacatgatcgccatcatcaacaactgccagaccttcaaggaatccatagtcagtttaaaaagaaagtatttaaagaatgaagtggaagagggtgtgtctccgagccagcccagcatgnngacgggcattttacgacgcnncatcgcgaacggagggctgcagcaggtttgctggaggaggtcttcctggacctggagcaacatctgaatgaattgatgacgaagaagtggctattagggtcaaacgctgtagacattatctgtgtcaccgtgggaagactatttcaacgattttgccaaaattaaaaagccgtataagaagaggatgacggccgaggcgcaccggcgatggatggtggagtacctgcgggcggtcatgcagaagcgcatttccttccggagcccggatgagcgcaaggaaggg

SEQ ID NO: 71056 - DNA, 1539 bp, Homo Sapiens
  misc_feature (98)..(271): n is a, c, g, or t
gtggaccggtccggaattcccgggatatcgtcgacccacgcgtccggcgcaacggcggcgacggcggcgaccccaccgcgcatcctgccaggcctccnnnnnnnnnnnnnnnnnnnnnnnnnnnnnnnnnnnnnnnnnnnnnnnnnnnnnnnnnnnnnnnnnnnnnnnnnnnnnnnnnnnnnnnnnnnnnnnnnnnnnnnnnnnnnnnnnnnnnnnnnnnnnnnnnnnnnnnnnnnnnnnnnnnnnnnnnnnnnnnnnnnnnnnnnnnnnnatgggagtggagggctgcaccaagtgcatcaagtacctgctcttcgtcttcaatttcgtcttctggctggctggaggcgtgatcctgggtgtggccctgtggctccgccatgacccgcagaccaccaacctcctgtatctggagctgggagacaagcccgcgcccaacaccttctatgtaggcatctacatcctcatcgctgtgggcgctgtcatgatgttcgttggcttcctgggctgctacggggccatccaggaatcccagtgcctgctggggacgttcttcacctgcctggtcatcctgtttgcctgtgaggtggccgccggcatctggggctttgtcaacaaggaccagatcgccaaggatgtgaagcagttctatgaccaggccctacagcaggccgtggtggatgatgacgccaacaacgccaaggctgtggtgaagaccttccacgagacgcttgactgctgtggctccagcacactgactgctttgaccacctcagtgctcaagaacaatttgtgtccctcgggcagcaacatcatcagcaacctcttcaaggaggactgccaccagaagatcgatgacctcttctccgggaagctgtacctcatcggcattgctgccatcgtggtcgctgtgatcatgatcttcgagatgatcctgagcatggtgctgtgctgtggcatccggaacagctccgtgtactgaggccccgcagctctggccacagggacctctgcagtgccccctaagtgacccggacacttccgagggggccatcaccgcctgtgtatataacgtttccggtattactctgctacacgtagcctttttacttttggggttttgtttttgttctgaactttcctgttaccttttcagggctgacgtcacatgtaggtggcgtgtatgagtggagacgggcctgggtcttggggactggagggcaggggtccttctgccctggggtcccagggtgctctgcctgctcagccaggcctctcctgggagccactcgcccagagactcagcttggccaacttggggggctgtgtccacccagcccgcccgtcctgtgggctgcacagctcaccttgttccctcctgccccggttcgagagccgagtctgtgggcactctctgccttcatgcacctgtcctttctaacacgtcgccttcaactgtaatcacaacatcctgactccgtcatttaataaagaaggaacatcaggcatgctaccaggcctgtgcagtccctcagaaaa

SEQ ID NO: 71057 - DNA, 899 bp, Homo Sapiens
  misc_feature (745)..(753): n is a, c, g, or t
tagtcggtcctcgcgaacgtgtatctgcatcaacacattagaggtacaggagcggctcagtcatgaaaaaagaaggtcttttgccccatttctttatttcagagatgtgggctttcagtgggaatttgctgactcctactttataggctgagtcaatgagggaagatgactggcgtttcctctgtctaaatgggaggttgccagagcgctggctgggactaggatgtgtaactaagatttcagtttgaaatcttagatttcagttcacggcgataaagaagtaggtgctgcacacaaatatgtaaagcaattgtaggaaatttgaaaggaaaaaaagaaaccgaagccagtattttaataattgctttttctgtgtattttgtattgggctgggggatagcatcaaaggttgaactttttgagctttctatgaaaaaccccaggaccttctttctttggccatttctatggaaatgcgatgtcagatggatggtaatggtgccctccagtggctgtgagacctcattgcgcattgtctactggagctttagtcttctgagacggaggaaaactgctgaatactctggattcatctatgtctacaatgttgcatttatgaaaaactacactgtgctaggcgcattctaggacatgaatatgaccacaccctctttcaccgggtgtttctgtagcaagttttcatattcttttcaaacaatggtttctctgcgttaattattgaggnnnnnnnnngatggggtaagaaaactacccatgcatgatgtagagagctgttgatttgtttctgtttttttaaaggaaaactatttgtaagatgttgcactaaaacattttatatacacttcagagacctgtagtaaattatgttgaaaataaaa

SEQ ID NO: 71058 - DNA, 1282 bp, Homo Sapiens
  misc_feature (41)..(41): n is a, c, g, or t
  misc_feature (115)..(115): n is a, c, g, or t
  misc_feature (148)..(148): n is a, c, g, or t
  misc_feature (1046)..(1067): n is a, c, g, or t
  misc_feature (1069)..(1070): n is a, c, g, or t
  misc_feature (1072)..(1074): n is a, c, g, or t
  misc_feature (1076)..(1088): n is a, c, g, or t
  misc_feature (1094)..(1094): n is a, c, g, or t
  misc_feature (1107)..(1123): n is a, c, g, or t
  misc_feature (1130)..(1130): n is a, c, g, or t
gcagcgcaaggtttatcaccggtttgaggaccctctgatcntgctcagatgagacagatctgcagtgacgctggactgacatgtcacacagccaggccgcagcggtcaccagcgntcgaggagtgtgctctgctgtgacgcgcagtcntgcagagccgtgcagcatccatgcttcctagcagccaccaccattgcgatcctgccgccgccctctgtacagtacgccacttcccacactcttccccatctgcttctgctgaccgctgggccccagctcagaagggctatagctggtcccagaggcctggcctggccttccttcccttctcccatccctggcctggggcctctgggaccagctttctctcctggacaccgaggattggaaataagggcctggagctgagtagtagccagtctgctgtgaccacaggctcaggtccgaccctgctgcttggccacagcagtggctgggcaagtgggaaccactatctcttgggagcccccaaaagctgggaaatgctggaggaaccaggcctttcccgcttttgcctggctgcagggttcggctccgcccctgccccccagccctcgtgtgtccacaccgcagtgcctctgcccctcgggggactggacacacatcctgccagaggcgctacgaagctttgcccagatgaagccaggtgggctccgcgttcactcccactctcccgaggggtgctggcctccccagggtttgccttcttacggatttagacgaggttcgaggctcacctatcagggcagctctcaggattgtcattttcctctttgcctgtgggtttaacttttgtatttttttaatcacaagtttgatacaaaatgtttttatcgtactctttggagatgcccattctacttttgaatttagcttttactaattcgcatctggaagctcagcaagtgcacaagccttactttggttaccgtggaaaccactgccgcccctccccgatgtggtgcgctcaataaaaatgctggaattcaaaaccaaacaaacaacaacnnnnnnnnnnnnnnnnnnnnnnanncnnnannnnnnnnnnnnnttttcncacaaaaacaacnnnnnnnnnnnnnnnnncttgtgnggccgcctccggcccttaaaaaacttttcataacaccattcgttttgggcgcggcggcccccagaaggaaaaggggaaacagtggccatagcttggtttccaaagggaaaaccccgggcacaaggacaaaaggggctggggaatcctccccc

SEQ ID NO: 71059 - DNA, 1037 bp, Homo Sapiens
  misc_feature (82)..(116): n is a, c, g, or t
caactgtatcgatcactataggggctccgctgtattagacgaacgacgagcgcagcgagtctgtgagcgaggaagcggccgnnnnnnnnnnnnnnnnnnnnnnnnnnnnnnnnnnncagtcgacggtaccggacatatgcccgggaattcggccattacggccggggactctgctgccggcttctcggagcggcgctgggcgaccagagcagggtcgagatgtcctacatcccgggccagccggtcaccgccgtggtgcaaagagttgaaattcacaagctgcgtcaaggtgagaacttaatcctgggtttcagcattggaggtggaatcgaccaggacccttcccagaatcccttctctgaagacaagacggacaagggtatttatgtcacacgggtgtctgaaggaggccctgctgaaatcgctgggctgcagattggagacaagatcatgcaggtgaacggctgggacatgaccatggtcacacacgaccaggcccgcaagcggctcaccaagcgctcggaggaggtggtgcgtctgctggtgacgcggcagtcgctgcagaaggccgtgcagcagtccatgctgtcctagcagccaccaccatctgcgactcctgcctgccgcctctctgtacagtaacgccacttccacactctgtccccatctggcttctgctgaccgctgggccccagctcagaagggctatagctggtcccagaggcctggcctggccttccttcccttctcccatccctggcctggggcctctgggaccagctttctctcctggacaccgaggattggaaataagggcctggagctgagtagtagccagtctgctgtgaccacaggctcaggtccgaccctgctgcttggccacagcagtggctgggcaagtgggaaccactatctcttgggagcccccaaaagctgggaaatgcttggaggaaccaggcctttcccgcttttgcctggctgcgggttcggtccgcccctgccccccagcctcgtgtgtccacaccgagtgctctgcc

SEQ ID NO: 71060 - DNA, 1096 bp, Homo Sapiens
  misc_feature (85)..(85): n is a, c, g, or t
gatgcgaattagtaaaagctaaattcaaaagtagaatggcatctccaaagagtacgataaaaacattttgtatcaaacttgtgantaaaaaaatacaaaagtaaacccacaggcaaaagaggaaaatgacaatcctgagagctgccctgataggtgagcctcgaacctcgtctaaatccgtaagaaggcaaaccctggggaggccagcacccctcgggagagtgggagtgaacgcggagcccacctggcttcatctgggcaaagcttcgtagcgcctctggcaggatgtgtgtccagtcccccgaggggcagaggcactgcggtgtggacacacgagggctggggggcaggggcggagccgaaccctgcagccaggcaaaagcgggaaaggcctggttcctccagcatttcccagcttttgggggctcccaagagatagtggttcccacttgcccagccactgctgtggccaagcagcagggtcggacctgagcctgtggtcacagcagactggctactactcagctccaggcccttatttccaatcctcggtgtccaggagagaaagctggtcagcagaagccagatggggacagagtgtggaagtggcgttactgtacagagaggcggcaggcaggagtcgcagatggtggtggctgctaggacagcatggactgctgcacggccttctgcagcgactgccgcgtcaccagcagacgcaccacctcctccgagcgcttggtgagccgcttgcgggcctggtcgtgtgtgaccatggtcatgtcccagccgttcacctgcatgatcttgtctccaatctgcagcccagcgatttcagcagggcctccttcagacacccgtgtgacataaatacccttgtccgtcttgtcttcagagaagggattctgggaagggtcctggtcgattccacctccaatgctgaaacccaggattaagttctcaccttgacgcagcttgtgaatttcaactctttgcaccacggcggtgaccggctggcccgggatgtaggacatctcgaccctgctctggtcgcccagcgccgctccgacctcgtgccgaattcgccacccaggcc

SEQ ID NO: 71061 - DNA, 1016 bp, Homo Sapiens
  misc_feature (742)..(742): n is a, c, g, or t
cctgggtggcgaattcggcacgagggcgaccgcgggtactctgctgccggcttctcggagcggcgctgggcgaccagagcagggtcgagatgtcctacatcccgggccagccggtcaccgccgtggtgcaaagagttgaaattcacaagctgcgtcaaggtgagaacttaatcctgggtttcagcattggaggtggaatcgaccaggacccttcccagaatcccttctctgaagacaagacggacaagggtatttatgtcacacgggtgtctgaaggaggccctgctgaaatcgctgggctgcagattggagacaagatcatgcaggtgaacggctgggacatgaccatggtcacacacgaccaggcccgcaagcggctcaccaagcgctcggaggaggtggtgcgtctgctggtgacgcggcagtcgctgcagaaggccgtgcagcagtccatgctgtcctagcagccaccaccatctgcgactcctgcctgccgcctctctgtacagtaacgccacttccacactctgtccccatctggcttctgctgaccgctgggccccagctcagaccagctttctctcctggacaccgaggattggaaataagggcctggagctgagtagtagccagtctgctgtgaccacaggctcaggtccgaccctgctgcttggccacagcagtggctgggcaagtgggaaccactatctcttgggagcccccaaaagctgggaaaatgctnggaggaaccaggcctttcccgcttttgcctggcttgcagggttcggctccgcccctgccccccagccctcgtgggtccaccacgcagtgctcctgcccctcgggggactggacacacatcctggcagaggcgctacgaagctttgcccgaatgagccaggttgggctccgcgttcactccacctctcccgaggggtgctggccctccccaggggttgccttctttacggatttaaaccaggttcgaaggctcacctatcagggccgcctctcag

SEQ ID NO: 71062 - DNA, 2319 bp, Homo Sapiens
  misc_feature (103)..(205): n is a, c, g, or t
  misc_feature (507)..(515): n is a, c, g, or t
ggagaggagtttctttccttctaagtaggcagaaatggtatcattatgttgccgctctccaatctcccagagctcgctctctagagaatcaccttctttcgcnnnnnnnnnnnnnnnnnnnnnnnnnnnnnnnnnnnnnnnnnnnnnnnnnnnnnnnnnnnnnnnnnnnnnnnnnnnnnnnnnnnnnnnnnnnnnnnnnnnnnnncgaactatagttgcaccactgcagctggcaagaatcaccttttttataaagcgtcagtcatgcttccagcaagaggcagcatcagtcatggctttataacagcttcatggtgcctcaaagactgttgaggttaatgagagcctagattagacagtttggctgtccttccctaaaacttgttttctcctattcactactccccaccgcacttaaaatctatgagtttttactttttactgggaatggaaagtgtggtgaagatcattcaacacttatgttgtcatttctcccattttctgaannnnnnnnnaaatttccccccttttaaaattgttcgaaagcccacagttatggaaagaattactgtctagatggtctgcagaacgtgtttggggtgagtgggagtgaggggcaatgttactttttctccttgtagtttggagtccattatgagctgctgctttttcttctcatcttgtcatcttctggggatgtttgaaggctgagttccaacagaattcacaaagggaataaaacaggattgagattttgaggtgtgcacaaggtggtaagataaagggcatatgagcttcaaaactaatgctgttgcatacatgaagccttttgttttttgaggagctatttttgttattcttgtaacgctccaccttacatgccacgtctgtgtgagtcaacagggatcaggtttggtcaccacacatgtctgaagctgggcagcgtctgctctgtgttctgtgtggaatggagaaaaaaacgcctgccctgctgccttccatgttcataggcccagcccaagagagtgacacacagtgctggccctgagacatttccacaaagtggtcaactctgccttgcatcctaaaactttttgggcatctattttgaaaactataggagcctttggaaggcctcttatgtttggaggggaagggtgttgagattgtcaccatccttcaagctgagactcctggtgagcctttgccaccatgaaaaccacatagctgaccagggctgtgcttgaggtacagaggacacacattgtagacaggcctgtgtcatgtttccttacagtcgttttttacagagaaaaggggcattgttttttcactgctttctcaacagttcctgtgaataaatgaaacatttcggagctccctgagagcaagagccttcacttcttcttgcggtgccgggaccatgtgttggtgaagctggtgctgtgggggccactcactcgaatgacacctggaggcctgttcctcccttaccactcccttccccagcccgacttcttggcctcctgcccaaccagacacctcaaactctgtcagtgccctggcattctggcagagaatcctcaccagttctcaccaaccttccccccaggcaagggcagctgccagcatggtgctctgccaggacaggtttccctgaaggaagctgctcacactgagatgagcctctcagggcaggacctcttcccaagccctgcacacccacccctgcagcccttttggctccccttttccctgtgcctcagcactcctttcctggttgcagataacgaactaaggttgcctaaagggcagatctgccctctccatgtcttcgtcctggcaaacagggtcgtcttaaaattatgcgctaattctgtatgggagcactcaaaaggcattacttagagattgaaatttcaaactatctctagtttttcaatggaaatatatcagctagggaaaaaccatcaagctcattattattttttgatcttcagttgtatttttgtgaatattttaatacatctttttcaatttctgaaaaaaaacacaacaaggggcggccgctctagcagtatccctcagagggggcccaagtctaacggcgtaccccggtttcctcgtcacaagaggggtccccttatagtgagtcgaattatacgctcggcactgggccgtccgttacacaacgttccgtgacggggaacaatgtagctggaggatcttggcgaagggccctaacatcctcgcggggtacctattggaccaactactaacagagattaagtctagggtcttttcattcccgtgttacgt

SEQ ID NO: 71063 - DNA, 913 bp, Homo Sapiens
tgtttggtgtaacagaatattgatatgcagcttggtggatttcaccagttaatgcacattcttcttccctcctccccccattaatatgtatactgaaaaatgtgcatttgtctgaggaattattttgtttgctaccacttaatgaatctcaaaattttgagtaaatgtacctcagtctaatcagactttttatgacctttataactacatttaaaacccttaattcctatttctgggtgtttgcgagcctgattgctatcatgaagtaaaaatttattactctaggtattcactagctaaataaacatagttcttgtttagcaagcatatgttgttcctcagctcttttctccagcttttgcagtgtcctggcatccttaaaatactgtgaaaatatggccttgatccatggattaaatcagtatctaagtgaatgtgttgatgttttattgatcagatctatataagtgggaatacagcatatatctggatattcttatagttatctttttaacatcttatttttttcattaattacatatcaacattaattttgtatcttgaagcaaattgattttgtataattaaatgtgtcaagcatctgtattaattgatttgatggcataaggttatgaaaataatgtactgccccatgtattactgttccaaaaggagaaagctatgtagaaagatacattaagggtgaaaatagcaatacagtagatttgaataccttgatgttttgcattacttcatttatgtttacatcatgtttagaaatgttttcatttactgtggtctttggtcacttcagctcaaagacctagtgatggatatttctttgaggctttcatttatataattttattttgtacaatgttttttttaaatgtgcaaatactgtattcaagtg

SEQ ID NO: 71064 - DNA, 1789 bp, Homo Sapiens
  misc_feature (1692)..(1720): n is a, c, g, or t
ttcaagctcgcaccaaggagatccacaaggataggcagggtggtggaggtcactgggcagcgcctccggatcccccgaaagggggcggggtcaaaactcagatctcgagctcccgaaagggggcggggttaaaactctcagatctaattccgcctccctctgtcgtcgccccttcccaattctcgcgagacctcaaggagcacagcttctgcgcaccgcacgatactgggagtccaggcgccaagggagggggaagggaaaaggggaaacggtgcaaacggcgtggccgccatcttgcttgtgcccccgcttcgcgcgcgctccgttctccgtgacgcacacttccccctcccctccgccgcgcctgggcctctgcattgcccgactccgtaggagcgcgggggcggctcctgctcttcctggactcctgagcagagttgtcgagatgtccacagaaggaggatttggtggtactagcagcagtgatgcccagcaaagtctacagtcgttctggcctcgggtcatggaagaaatccggaatttaacagtgaaagacttccgagtgcaggaactcccactggctcgtattaagaagattatgaaactggatgaagatgtgaagatgatcagtgcagaagcgcctgtactctttgccaaggcagcccagatttttatcacagagttgactcttcgagcctggattcacacagaagataacaagcgccggactctacagagaaatgatatcgccatggcaattacaaaatttgatcagtttgattttctcatcgatattgttccaagagatgaactgaaacctccaaagcgtcaggaggaggtgcgccagtctgtaactcctgccgagccagtccagtactatttcacgctggctcagcaacccaccgctgtccaagtccagggccagcagcaaggccagcagaccaccagctccacgaccaccatccagcctgggcagatcatcatcgcacagcctcagcagggccagaccacacctgtgacaatgcaggttggagaaggtcagcaggtgcagattgtccaggctcagccacagggtcaagcccaacaggcccagagtggcactggacagaccatgcaggtgatgcaccaaatcatcactaacacaggagagatccagcagatcccggtgcagctgaatgccggccagctgcagtatatccgcttagcccagcctgtatcaggcactcaagttgtgcagggacagatccagacactgtgccaccaatgctcaacaggggcaaagaaatgcaagtcaggggaagcctcgaaggtgcctgaaagaaaccttacagattacacagacagaggtccagcaaggacagcagcagttcagccagttcacagatggacagcagctctaccagatccagcaagtcaccatgcctgcgggccaggacctcgcccagcccatgttcatccagtcagccaaccagccctccgacgggcaggccccccaggtgaccggcgactgagggcctgagctggcaaggccaaggacacccaacacaatttttgccatacagccccaggcaatgggcacagccttcctccccagaggacccggccgacctcagcgcctcctgcaggctaggacactggtgcactacaccccatgcctgggggccgagattctccagcagaaagatgcaatannnnnnnnnnnnnnnnnnnnnnnnnnnnnctctaaggaatcaatatttcaatatgttgagtgtgtgtccaatgctatgaaattaaaatattaaataac

SEQ ID NO: 71065 - DNA, 1975 bp, Homo Sapiens
  misc_feature (459)..(487): n is a, c, g, or t
  misc_feature (610)..(624): n is a, c, g, or t
  misc_feature (1051)..(1078): n is a, c, g, or t
  misc_feature (1485)..(1579): n is a, c, g, or t
  misc_feature (1783)..(1829): n is a, c, g, or t
tgctccaacccagcagagctccactcccctcctccttctgacgccttgcagtgggtggtggttgaggtatctgggaccccaaccagctcgagacccatagggagctgcatgcccctctcccagggatgacctcactctctcctctccacccctcgcagcagctctaccagatccagcaagtcaccatgcctgcgggccaggacctcgcccagcccatgttcatccagtcagccaaccagccctccgacgggcaggccccccaggtgaccggcgactgagggcctgagctggcaaggccaaggacacccaacacaatttttgccatacagccccaggcaatgggcacagccttcctccccagaggacccggccgacctcagcgcctcctgcaggctaggacactggtgcactacaccccatgcctgggggccgagattctccagcagaaagatgcaatannnnnnnnnnnnnnnnnnnnnnnnnnnnnctctaaggaaccaatatttcaatatgttgagtgtgtgtccaatgctatgaaattaaaatattaaataacatatttatggaattttcttgaaaagtggggttgaaaaaaaatttcccctttggnnnnnnnnnnnnnnngtttgttactgccacttctttttaggagcaaatctccccaggggtgtacggtatttcttgactctgggaacagctgctacccccaagacttgccacgttgttctgccctcagatggaattaggtgaatgtgtgtagctgctttttcactcgtggtcctctccccatcccttgctctgaccccagagctctgtgtatttgcatccagaggccatggaaacattctttgcatttaagagacagatttattccctgtggagagtgggtggattcattgccacactcttttctcccagggacccaggaaactaggactttgtgtgtttgctgcccacctcccttttattttttaaatgcattaaaaactgtgctagtctcctttgcatggacttcaagctgcatgaaatgcaataaatctcattttagacnnnnnnnnnnnnnnnnnnnnnnnnnnnncctgtgttgcggcgcgcgcctgtgggcccctgcgaaaagactttcgtaaacaacttcgcgttgtgggacccacgcgcggaccccccgagagcggtgacgtgaacactgtgcgccaagagcgtgtgtacccaagagagaaacaatcgaggaacaacagagcaacgacgagcgttgtgaggatttctcttccccgcagttatagaaagaaagcgctccccagtggggaacaaccacgagcgtgttcttctctggaaccagaatcaccgcaaaattaggggatactcaggaggagcacaataaagggggagtctttaataccagcggtggagtcccaaagcgcaagagcctccgaattatcaccaattataagccccccgccggccgacggtggggaaacaaccagcagnnnnnnnnnnnnnnnnnnnnnnnnnnnnnnnnnnnnnnnnnnnnnnnnnnnnnnnnnnnnnnnnnnnnnnnnnnnnnnnnnnnnnnnnnnnnnnncaacacgagagacgaagaaaacaagaggaagaagacgaaaaacaaacacaggcaagaacaacacgacacgagacagaaagaaagaaacaaaacagggagcaggggaggggggcgagcagagagagacgagcgacaggaaagggaaagaggacaagaagggcgctgagacgagacggagacgcgagcaaagagaaagaaggaacnnnnnnnnnnnnnnnnnnnnnnnnnnnnnnnnnnnnnnnnnnnnnnncagcgcgaaggccgatccgacgagagagggacggagacggaggcgacaagccgacacggcgacgggggagcccgagagacacggagccgagcagcacgagacagagagacgggcggacgaggagcggggggagcggacgagaagag

SEQ ID NO: 71066 - DNA, 725 bp, Homo Sapiens
agaagaagagaaagtgaaaagcaggacaaagagaaacttgagaaagacaaggaaattagtcctagtgttaccaagaaaaataccaacaagaaaaccaaaccaaagtctgacattctgaaagatcctcctagtgaagcaaacagcatacagtctgcaaatgctacaacaaagaccagcgaaacaaatcacacctcaaggccccggctgaaaaacgtggacaggagcactgcacagcagttggcagtaactgtgggcaacgtcaccgtcattatcacagactttaaggaaaagactcgctcctcatcgacatcctcatccacagtgacctccagtgcagggtcagaacagcagaaccagagcagctcggggtcagagagcacagacaagggctcctcccgttcctccacgccaaagggcgacatgtcagcagtcaatgatgaatctttctgaaattgcacatggaattgtgaaaactatgaatcagggtatgaaattcaaaacctccacctgcccatgctgcttgcatccctggagaatcttctgtggacatcgacctcttagtgatgctgccaggataatttctgcttgccatgggcatctggccaccaaggaatttcgcaccctgacgattactcttgacacttttatgtattccattgttttatatgattttcctaacaatcatttataattggatgtgctcctgaatctacattaaataaaaa

SEQ ID NO: 71067 - DNA, 2128 bp, Homo Sapiens
  misc_feature (729)..(729): n is a, c, g, or t
  misc_feature (1203)..(1215): n is a, c, g, or t
  misc_feature (1585)..(1585): n is a, c, g, or t
  misc_feature (1737)..(1748): n is a, c, g, or t
  misc_feature (1806)..(1808): n is a, c, g, or t
  misc_feature (1819)..(1838): n is a, c, g, or t
  misc_feature (1869)..(1878): n is a, c, g, or t
  misc_feature (1938)..(1973): n is a, c, g, or t
ccagcctcctcagaccccgcctgcctgtcctgtgcccaccacgcagcagtcaggggagaaaatggtggctatcccttctgcttagagaaagaaatggcctttagctggtttaatgtttgttttttgactggagggagtagaccctatctataaggtgccaccccatcatccaagctgccacactgcccggagcagcctgttcctgcactccaccctgctggccccaggacttctgatctcagtcctctgggagggaggttcgcctaggaggtgccccccacattggtgtccccatgggcagcaggcagacagctcacccccaccagcatgatggccccagctgggggcagtggcaggagccttacttttgtcacagccttgcccacaaaccctgcctctgaggggagactgaggaagggcagagccagaagcaagccgtgccaggccatctgcctgctcatggggtcctaaagcgcgggctaagcctgcaggaaagccggggcggtggggggggcttagtgccacatgcaccccactcattccaaagccaccaaactgccaggggctgccgtccacccgtggggcccaggggctggggccacagccttgccattttcgttgccataccctcttgccttactcgcggtggaggccggatttgcacgggcagacgtgcacctgggcccgtggggagcttgttctgaccagacgtacagattttcattctcnagaaagccttacttttcaaccaaatttttgtagccagttttggtgaatttgtacactgaaagaaaatttaaataaaggggaagtccacataaaaaagaaaacaaaacaaaccctaactaacttccaaatgggtctcctggtgcgggggcgtgagtggccgtgccctgggtgtgctgcctgtctgagcaagcttccctagctgtggaaccccgggccccctgctgcgggctctgccttggtgtcatgcctgctgcacccccgtttccactgacgtgccgtctgtggctatgggggtggtcactggaatgacggtcactccagacgtcagccggcagggatgcagcaggctggccgcgcaccggggctcgggcaccctctggccccacactggcaatgatgccacaccttgccatgtccacgctgttggtcaaacccctctgtcatgcctctttaaagagaaaagaagagaaagannnnnnnnnnnnnaatggcagaccgaagtggagatcttgtagcctagataggatagtctgaccttctagcatagtctttttggcaaatgatttgtgttttcagtgtgtggggaagctgtcctgggggctggggcgacagatagcacataggctgtttctggggctgcaggggcttccctgagctggatgttgtgggtgttgccgtgcttcaggaagtgtggcgaccagaaagcgtagacccggggcccagggtctgcccgcccctgcagcctggcctccccgcacaggctgtggcttgcactccagccgctctagtctctcaggaatttgcttgttacttgtactgtgtaaataaagcttcctggttcaatacccaaaacganaaaggcggagacgaagggcgcgtagggggggccagggcaggacagcggcggaccggagggaggagggagagcgcgccgaacgcggcgggggtgcgggccacccagggtcggcaataactcagcgccgcgtcggcgggtgggcccggccggcnnnnnnnnnnnntgcgaacttaagcacgaccgcgcgcgccgggtgagacaggtcactttgggatgagacnnncctcctggggnnnnnnnnnnnnnnnnnnnncggagagggcgttgttcggggtcccctgttnnnnnnnnnncggcgggcgcccctggggatgggcaggacgccggttcgccccgtggggcgccggcgagannnnnnnnnnnnnnnnnnnnnnnnnnnnnnnnnnnnacgcgcccccggcaaaacgaaagaaggcggcggttgggcagccgcagccgggcgccgatgagcgcgccccctgcgggcgctgcgccgcgggcgggcctctctgcgtggcttatctcctccgacaagagtctccggaagccccgttcttatatagt

SEQ ID NO: 71068 - DNA, 852 bp, Homo Sapiens
ctgtgataaagtggacaaaaagcaggctggtacggtccggaatcccgggatatcgtcgaccacgcgtcgccacgcgtcgccacgcgtcgaaaaacttaattactctcaggcctcatcccaagcttgacacatgctctgtaggttgaaaacaaaatcacgaaatatgctagcaaatgctgccttggttgcagcctgcactgtagacccaagggttttgctgtggctcttcttatctcccttggctcataaagcccccgatgatgccagagcttcaattagagccatcatcatcccaggcagggatatctttgagaaatgactcaagttcagccccaggcccctgtgactctgcttaaagcacacatttctgctgactcttgtacctggggcagcaggataatcaccaacacactcttaacgagaaacaacacaccaagcacagtggagctgtcctaggcaacactcgcggtctcaggctgcggtgggcgtctgtcctgcatgtggcccagaccaccctgacccccgggcctgcctgcctggccctgcatgctgcacgctcactgtatttgtgcagatcctggccagtacaaagtcgttgctcttgtcttatcttctcttacagagtctccctccctttatagaatgtcaaccaaagagtgccctcctcccctctcagcctcctctttagctagcctccccatctcatcacaacgcatgtctgtgacctttggtaatcatttacagtgccacacggaaccctgtattttgcacacagcaaaacaaacaatgtttagctttatttatggtatttgatgctgtaaatggaaataaatattgttctttataaagctc

SEQ ID NO: 71069 - DNA, 1090 bp, Homo Sapiens
  misc_feature (409)..(424): n is a, c, g, or t
ggtatggcatgagaaaagtactgacattaaccaaagccgacaaaccctatttccagttcctgtgatctcactgtgtagccacaactgttggctatttttactctaaaaccaacaagctgaatcatttccttacagaaaaatttctacaaaagggaagagaatgcaaaacaatacacagtctcatatgcaagatacagttcacactaatttacaaatttttatttacattttttatatacattccaggcagacctacttgatgagttttgtgctcatattgatctcagatgatcgtgtgtactgtatgatttactaccacatctctttgatttccagaaaatggtggtagcatggggttaggaggaaaagaaatcactggtcaggtgagatcatacaagtatgaaggggnnnnnnnnnnnnnnnnttgcggaatttggcttgttaaagccatccagcccactatggtctattgactaacattgaatatacatgaatgccacttcttacagccattttcatatttacaaaatgagcttactactagttgagttattaggtaaggcattcaagttccttagcttaacataaaaaggcaacagacatcttagcacaccacaggacagattttagagggatgatttcagagcactttgagatttaccctcctttagaatcccttacatggtcgatataaaagggaagcaattctgaatcctattactagcctgcaccatgatcccaaaaacctatacaggaagtaggagcatcacaacaaccaaaatctagccagaatggggaaaatagattagatatcttattttgttcccaagatccactgcatagtcccagagctaaagtgagagcctttattcctggttacattcacttccctatgaatctctccaaaaaacctacatagtgtgacagctagtagctatgcacagtctatcagcaatggctcagtgaacctctattcaaaatagtttgaagtaagacggacgcgtggcgacgcgtggcgacgcgtggtcgacgatatcccggaattccggaccgtaccagcctgctttttttaccactgttatattcacaa

SEQ ID NO: 71070 - DNA, 444 bp, Homo Sapiens
tcttgatctgcttctaaaagaagaagtagagaagataaatcctgtcttcaatacctggaaggaaaaacaaaataacctcaactccgttttgaaaaaaacattccaagaactttcatcagagattttacttgacaggaaaggccatgtgaggacatagggagaaagcagccaccattggcaagccaagagagagccctcaccaggaacgattggaccagcaccttgatcttggattttctagcctccagaactgtgagatacaaatttctgttgtttaagccacacagtctgtgatattttgttacagcaaccctaatagactgagagagctcctgagagcttcactcacagaatcaattgtattcttacctggtgaagatccattctaagacttattggctgtttggaagtgatagcaaataaaagccaccttgaactgggaaa

SEQ ID NO: 71071 - DNA, 1481 bp, Homo Sapiens
  misc_feature (41)..(85): n is a, c, g, or t
  misc_feature (89)..(123): n is a, c, g, or t
ccaaatgtatcgactcactatagggcgccccggcttagttnnnnnnnnnnnnnnnnnnnnnnnnnnnnnnnnnnnnnnnnnnnnnccgnnnnnnnnnnnnnnnnnnnnnnnnnnnnnnnnnnncagtcgacggtaccggacatatgcccgggaattcggccattacggccggggctctttgctctaacagacagcagcgactttaggctggataatagtcaaattcttacctcgctctttcactgctagtaagatcagattgcgtttctttcagttactcttcaatcgccagtttcttgatctgcttctaaaagaagaagtagagaagataaatcctgtcttcaatacctggaaggaaaaacaaaataacctcaactccgttttgaaaaaaacattccaagaactttcatcagagattttacttagatgatttacacaatgaagaaagtacatgcactttgggcttctgtatgcctgctgcttaatcttgcccctgcccctcttaatgctgattctgaggaagatgaagaacacacaattatcacagatacggagttgccaccactgaaacttatgcattcattttgtgcattcaaggcggatgatggcccatgtaaagcaatcatgaaaagatttttcttcaatattttcactcgacagtgcgaagaatttatatatgggggatgtgaaggaaatcagaatcgatttgaaagtctggaagagtgcaaaaaaatgtgtacaagagataatgcaaacaggattataaagacaacattgcaacaagaaaagccagatttctgctttttggaagaagatcctggaatatgtcgaggttatattaccaggtatttttataacaatcagacaaaacagtgtgaacgtttcaagtatggtggatgcctgggcaatatgaacaattttgagacactggaagaatgcaagaacatttgtgaagatggtccgaatggtttccaggtggataattatggaacccagctcaatgctgtgaataactccctgactccgcaatcaaccaaggttcccagcctttttgaatttcacggtccctcatggtgtctcactccagcagacagaggattgtgtcgtgccaatgagaacagattctactacaattcagtcattgggaaatgccgcccatttaagtacagtggatgtgggggaaatgaaaacaattttacttccaaacaagaatgtctgagggcatgtaaaaaaggtttcatccaaagaatatcaaaaggaggcctaattaaaaccaaaagaaaaagaaagaagcagagagtgaaaatagcatatgaagaaatttttgttaaaaatatgtgaatttgttatagcaatgtaacattaattctactaaatattttatatgaaatgtttcactatgattttctatttttcttctaaaatgcttttaattaatatgttcattaaattttctatgcttattgtacttgttatcaaca

SEQ ID NO: 71072 - DNA, 835 bp, Homo Sapiens
  misc_feature (750)..(782): n is a, c, g, or t
ggggcctcccagaatggaaagtcccagtggtccccacaggaggctcgggagcccacaagccattgaggaggctgccagctcctcctcagcaggccccaacctaggtcagtctggagccacagaccccatccctcctgaaggttgctggaaggcccagcacctccacacccaggcactaacagcactttctcccagcacttcgggactcacccccaccagcagttgctctcctcccagctccacctctgggaagctgagcatgtggtcctggaaatcccttattgagggcccagacagggcatccccaagcagaaaggcaaccatggcaggtgggctagccaacctccaggatttggaaaacacaactccagcccagcctaagaacctgtctcccagggagcaggggaagacacagccacctagtgcccccagactggcccatccatcttatgaggatcccagccagggctggctatgggagtctgagtgtgcacaagcagtgaaagaggatccagccctgagcatcacccaagtgcctgatgcctcaggtgacagaaggcaggacgttccatgccgaggctgccccctcacccagaagtctgagcccagcctcaggaggggccaagaaccagggggccatcaaaagcatcgggatttggcattggttccagatgagcttttaaagcaaacatagcagttgtttgccatttcttgcactcagacctgtgtaatatatgctcctggaaaccnnnnnnnnnnnnnnnnnnnnnnnnnnnnnnnnngtaagcacttgcctcgtgccgaattcggcacgaggtgatgttggagcggccgc

SEQ ID NO: 71073 - DNA, 1396 bp, Homo Sapiens
  misc_feature (1095)..(1169): n is a, c, g, or t
  misc_feature (1175)..(1205): n is a, c, g, or t
  misc_feature (1282)..(1282): n is a, c, g, or t
aaaccacggagagagaaggcactgtaatatgaacagtgggaaaaaaagcaggctggtacggtccggaattcccgggatatcgtcgacccacgcgttccgccgctaccggtgaaccagcgcgggtttttcggacttgggggtcgtgcagatctgctggatctaggtccaggagtctcagtgatggtctgagcctggccgcgccaggctggggtgtcccagaagagccaggaatcgaaatgcttcatggaacaaccaccctggccttcaagttccgccatggagtcatagttgcagctgactccagggctacagcgggtgcttacattgcctcccagacggtgaagaaggtgatagagatcaacccatacctgctaggcaccatggctgggggcgcagcggattgcagcttctgggaacggctgttggctcggcaatgtcgaatctatgagcttcgaaataaggaacgcatctctgtagcagctgcctccaaactgcttgccaacatggtgtatcagtacaaaggcatggggctgtccatgggcaccatgatctgtggctgggataagagaggccctggcctctactacgtggacagtgaagggaaccggatttcaggggccaccttctctgtaggttctggctctgtgtatgcatatggggtcatggatcggggctattcctatgacctggaagtggagcaggcctatgatctggcccgtcgagccatctaccaagccacctacagagatgcctactcaggaggtgcagtcaacctctaccacgtgcgggaggatggctggatccgagtctccagtgacaatgtggctgatctacatgagaagtatagtggctctaccccctgaaagagggtggatgcagctgcttgtgtttcttggggtgactgtcattggtaatacggacacagtgacccatcctccatcctatttatagtggaagggccttcaattgtatcagtacttttttttaagctctggcacattgacctctatgtgttaccagtcattaatgagctgctgcagaggtgactatttgttttactttcttggatgttaacattacactactcactactcnnnnnnnnnnnnnnnnnnnnnnnnnnnnnnnnnnnnnnnnnnnnnnnnnnnnnnnnnnnnnnnnnnnnnnnnnnncccccnnnnnnnnnnnnnnnnnnnnnnnnnnnnnnntttgggggggcgccttggggccctcttaaaaaaattttctaaaaccactttctttttgggcccccgcgcgccccccnggggggaaaggggaaaccgggggcaaaaagcgttgtttccaaaagaaaaacaccccgggaacaaagaaaaaaagaggctttggggatatcccccccacccaaataaaaaaacgc

SEQ ID NO: 71074 - DNA, 868 bp, Homo Sapiens
  misc_feature (800)..(800): n is a, c, g, or t
cagtcgacggtaccggacatatgcccgggaattcggccattacggccggggacactagacatggcgcttgccagcgtgttggagagaccgctaccggtgaaccagcgcgggtttttcggacttgggggtcgtgcagatctgctggatctaggtccagggagtctcagtgatggtctgagcctggccgcgccaggctggggtgtcccagaagagccaggaatcgaaatgcttcatggaacaaccaccctggccttcaagttccgccatggagtcatagttgcagctgactccagggctacagcgggtgcttacattgcctcccagacggtgaagaaggtgatagagatcaacccatacctgctaggcaccatggctgggggcgcagcggattgcagcttctgggaacggctgttggctcggcaatgtcgaatctatgagcttcgaaataaggaacgcatctctgtagcagctgcctccaaactgcttgccaacatggtgtatcagtacaaaggcatggggctgtccatgggcaccatgatctgtggctgggataagagaggccctggcctctactacgtggacagtgaagggaaccggatttcaggggccaccttctctgtaggttctggctctgtgtatgcatatggggtcatggatcggggctattcctatgacctggaagtggagcaggcctatgatctggcccgtcgagccatctaccaagccacctacagagatgcctactcaggaggtgcagtcaacctctaccacgtgcgggaggatggctggatcccgagtcntccagtgacaatgtggctgatctacatgaagaaagataattgcctctaccccctgaaaagagggggga

SEQ ID NO: 71075 - DNA, 986 bp, Homo Sapiens
  misc_feature (917)..(917): n is a, c, g, or t
ttaggtgacctatagaacaagttgtacaaaaagcaggctggtaccggtccggaatccccgggatatcgtcgacccacgcgtccgcgcttgccagcgtgttggagagaccgctaccggtgaaccagcgcgggtttttcggacttgggggtcgtgcagatctgctggatctaggtccagggagtctcagtgatggtctgagcctggccgcgccaggctggggtgtcccagaagagccaggaatcgaaatgcttcatggaacaaccaccctggccttcaagttccgccatggagtcatagttgcagctgactccagggctacagcgggtgcttacattgcctcccagacggtgaagaaggtgatagagatcaacccatacctgctaggcaccatggctgggggcgcagcggattgcagcttctgggaacggctgttggctcggcaatgtcgaatctatgagcttcgaaataaggaacgcatctctgtagcagctgcctccaaactgcttgccaacatggtgtatcagtacaaaggcatggggctgtccatgggcaccatgatctgtggctgggataagagaggccctggcctctactacgtggacagtgaagggaaccggatttcaggggccaccttctctgtaggttctggctctgtgtatgcatatgggggtcatggatcggggctattcctatgacctggaagtggagcaggcctatgatctggcccgtcgagccatctaccaagccacctacagagatgcctactcaggaggtgcagtcaacctctaccacgtgcgggaaggatggcttggatcccagtctccagtggacaatggtggctgatctacatggagaagtatagtgggctctacccccctgaaagagggtggatgcagctgccttgtggttctcttggnggtggactgggtcattgggtaatacgggacacagttggaccccatccctccaatcctatttttataggc

SEQ ID NO: 71076 - DNA, 892 bp, Homo Sapiens
  misc_feature (763)..(763): n is a, c, g, or t
taggggcgagagagtatgaagtcgaggcgcgccgaattcggcacgagggcagggggtggctctggggctgacccgggaagtcggggtctccttcgccttctgtctttctgcgtcctactagcaggtttgtgcaggggaaactcagtggagaggaagatatatatccccttaaataaaacagctccctgtgttcgcctgctcaacgccactcatcagattggctgccagtcttcaattagtggagacacaggggttatccacgtagtagagaaagaggaggacctacagtgggtattgactgatggccccaaccccccttacatggttctgctggagagcaagcattttaccagggatttaatggagaagctgaaagggagaaccagccgaattgctggtcttgcagtgtccttgaccaagcccagtcctgcctcaggcttctctcctagtgtacagtgcccaaatgatgggtttggtgtttactccaattcctatgggccagagtttgctcactgcagagaaatacagtggaattcgctgggcaatggtttggcttatgaagactttagtttccccatctttcttcttgaagatgaaaatgaaaccaaagtcatcaagcagtgctatcaagatcacaacctgagtcagaatggctcagcaccaaccttcccactatgtgccatgcagctcttttccacatgcatgctgtcatcagcactgccactgcagcggcgcagctcatccaagcacttcagcatcaccnagaatcgtctgtgacccctgctgatacatgtgtgagcagctaagctatatacactggacataagctgacacaggtgtgtgcgcaccgctgaatcgtctttctgatggcccagctgagcatgctctgcca

SEQ ID NO: 71077 - DNA, 874 bp, Homo Sapiens
tcctgaaagcacaactgcgcagggcctcgtgcttgcaagtcacgcgcagtgggcaagaagcatggcttcaccctgggcacatcagaaaggacgatatcagccggtgcagcaacacaccctgtcgtcagcttaaagtcccagttgaattatagctttagcatgctccacacatttaatcagacagggggtcacagacgatttctgggttgatgctgaaggtgctttggatggagctgcgccgcatgcaggtggcagtgctgatgacagcatgcatgtgtgaaaagagctgcatggcacatagtgggaaggttggtgctgagccattctgactcaggttgtgatcttgatagcactgcttgatgactttggtttcattttcatcttcaagaagaaagatggggaaactaaagtcttcataagccaaaccattgcccagcgaattccactgtatttctctgcagtgagcaaactctggcccataggaattggagtaaacaccaaacccatcatttgggcactgtacactaggagagaagcctgaggcaggactgggcttggtcaaggacactgcaagaccagcaattcggctggttctccctttcagcttctccattaaatccctggtaaaatgcttgctctccagcagaaccatgtaaggggggttggggccatcagtcaatacccactgtaggtcctcctctttctctactacgtggataacccctgtgtctccactaattgaagactggcagccaatctgatgagtggcgttgagcaggcgaacacagggagctgttttatttaaggggatatatatcttcctctcccctcgtgccgaattcggcgcgccgtcgacttcatactctctcgccat

SEQ ID NO: 71078 - DNA, 871 bp, Homo Sapiens
ggggggagagtatgaagtcgacggcgcgccgaattcggcacgaggcgggaagtcggggtctccttcgccttctgtctttctgcgtcctactagcaggtttgtgcaggggaaactcagtggagaggaagatatatatccccttaaataaaacagctccctgtgttcgcctgctcaacgccactcatcagattggctgccagtcttcaattagtggagacacaggggttatccacgtagtagagaaagaggaggacctacagtgggtattgactgatggccccaaccccccttacatggttctgctggagagcaagcattttaccagggatttaatggagaagctgaaagggagaaccagccgaattgctggtcttgcagtgtccttgaccaagcccagtcctgcctcaggcttctctcctagtgtacagtgcccaaatgatgggtttggtgtttactccaattcctatgggccagagtttgctcactgcagagaaatacagtggaattcgctgggcaatggtttggcttatgaagactttagtttccccatctttcttcttgaagatgaaaatgaaaccaaagtcatcaagcagtgctatcaagatcacaacctgagtcagaatggctcagcaccaaccttcccactatgtgccatgcagctcttttcacacatgcatgctgtcatcagcactgccacctgcatgcggcgcagctccatccaaagcaccttcagcatcaaccagaaatcgtctgtgacccctgtctgattacatgtgtggagcatgctaagctataatacactgggaattagctgagacaggtgtgttgctcaccgctgaaacttctttttgatgtgccaggctaagccatg

SEQ ID NO: 71079 - DNA, 3521 bp, Homo Sapiens
  misc_feature (2860)..(3290): n is a, c, g, or t
  misc_feature (3313)..(3313): n is a, c, g, or t
  misc_feature (3335)..(3335): n is a, c, g, or t
  misc_feature (3337)..(3337): n is a, c, g, or t
  misc_feature (3363)..(3363): n is a, c, g, or t
  misc_feature (3394)..(3394): n is a, c, g, or t
  misc_feature (3396)..(3396): n is a, c, g, or t
  misc_feature (3451)..(3451): n is a, c, g, or t
  misc_feature (3456)..(3456): n is a, c, g, or t
taggtgcgaagagtatgaagtcacggcgcgccgaattcggcacgaggagacaggagccgaacgggggcttccgctcagcagagaggcaagatggctacggcagggggtggctctggggctgacccgggaagtcggggtctccttcgccttctgtctttctgcgtcctactagcaggtttgtgcaggggaaactcagtggagaggaagatatatatccccttaaataaaacagctccctgtgttcgcctgctcaacgccactcatcagattggctgccagtcttcaattagtggagacacaggggttatccacgtagtagagaaagaggaggacctacagtgggtattgactgatggccccaaccccccttacatggttctgctggagagcaagcattttaccagggatttaatggagaagctgaaagggagaaccagccgaattgctggtcttgcagtgtccttgaccaagcccagtcctgcctcaggcttctctcctagtgtacagtgcccaaatgatgggtttggtgtttactccaattcctatgggccagagtttgctcactgcagagaaatacagtggaattcgctgggcaatggtttggcttatgaagactttagtttccccatctttcttcttgaagatgaaaatgaaaccaaagtcatcaagcagtgctatcaagatcacaacctgagtcagaatggctcagcaccaaccttcccactatgtgccatgcagctcttttcacacatgcatgctgtcatcagcactgccacctgcatgcggcgcagctccatccaaagcaccttcagcatcaacccagaaatcgtctgtgaccccctgtctgattacaatgtgtggagcatgctaaagcctataaatacaactgggacattaaagcctgacgacagggttgtggttgctgccacccggctggatagtcgttcctttttctggaatgtggccccaggggctgaaagcgcagtggcttccttttgtcacccagctggctgctgctgaagctttgcaaaaggcacctgatgtgaccaccctgccccgcaatgtcatgtttgtcttctttcaaggggaaacttttgactacattggcagctcgaggatggtctacgatatggagaagggcaagtttcccgtgcagttagagaatgttgactcatttgtggagctgggacaggtggccttaagaacttcattagagctttggatgcacacagatcctgtttctcagaaaaatgagtctgtacggaaccaggtggaggatctcctggccacattggagaagagtggtgctggtgtccctgctgtcatcctcaggaggccaaatcagtcccagcctctcccaccatcttccctgcagcgatttcttcgagctcgaaacatctctggcgttgttctggctgaccactctggtgccttccataacaaatattaccagagtatttacgacactgctgagaacattaatgtgagctatcccgaatggctgagccctgaagaggacctgaactttgtaacagacactgctcaaggccctggcagatgtggccacggtgctgggacgtgctctgtatgagcttgcaggaggaaccaacttcagcgacacagttcaggctgatccccaaacggttacccgcctgctctatgggttcctgattaaagccaacaactcatggttccagtctatcctcaggcaggacctaaggtcctacttgggtgacgggcctcttcaacattacatcgctgtctccagccccaccaacaccacttatgttgtacagtatgccttggcaaatttgactggcacagtggtcaacctcacccgagagcagtgccaggatccaagtaaagtcccaagtgaaaacaaggatctgtatgagtactcatgggtccagggccctttgcattctaatgagacggaccgactcccccggtgtgtgcgttctactgcacgattagccagggccttgtctcctgcctttgaactgagtcagtggagctctactgaatactctacatggactgagagccgctggaaagatatccgtgcccggatatttctcatcgccagcaaagagcttgagttgatcaccctgacagtgggcttcggcatcctcatcttctccctcatcgtcacctactgcatcaatgccaaagctgatgtccttttcattgctccccgggagccaggagctgtgtcatactgaggaggaccccagcttttcttgccagctcagcagttcacttcctagagcatctgtcccactgggacacaaccactaatttgtcactggaacctccctgggcctgtctcagattgggattaacataaaagagtggaactatccaaaagagacagggagaaataaataaattgcctcccttcctccgctcccctttcccatcaccccttccccatttcctcttccttctctactcatgccagattttgggattacaaatagaagcttcttgctcctgtttaactccctagttacccaccctaatttgcccttcaggacccttctactttttccttcctgccctgtacctctctctgctcctcacccccacccctgtacccagccaccttcctgactgggaaggacataaaaggtttaatgtcagggtcaaactacattgagcccctgaggacaggggcatctctgggctgagcctactgtctccttcccactgtcctttctccaggccctcagatggcacattagggtgggcgtgctgcgggtgggtatcccacctccagcccacagtgctcagttgtactttttattaagctgtaatatctatttttgtttttgtctttttccctcgtgccgaattcttnnnnnnnnnnnnnnnnnnnnnnnnnnnnnnnnnnnnnnnnnnnnnnnnnnnnnnnnnnnnnnnnnnnnnnnnnnnnnnnnnnnnnnnnnnnnnnnnnnnnnnnnnnnnnnnnnnnnnnnnnnnnnnnnnnnnnnnnnnnnnnnnnnnnnnnnnnnnnnnnnnnnnnnnnnnnnnnnnnnnnnnnnnnnnnnnnnnnnnnnnnnnnnnnnnnnnnnnnnnnnnnnnnnnnnnnnnnnnnnnnnnnnnnnnnnnnnnnnnnnnnnnnnnnnnnnnnnnnnnnnnnnnnnnnnnnnnnnnnnnnnnnnnnnnnnnnnnnnnnnnnnnnnnnnnnnnnnnnnnnnnnnnnnnnnnnnnnnnnnnnnnnnnnnnnnnnnnnnnnnnnnnnnnnnnnnnnnnnnnnnnnnnnnnnnnnnnnnnnnnnnnnnnnnnnnggcgcgtgctggctttttcatangctccgcccctgacgagcacananatcgacgctcagtcagagtggcgaancgacagacataagatacaagcgttcccctgnanctcctcgtgcgcctctgttcgacctgcgcttacgaactgtcgcttctccctcggncgtgngctccaactcagcgtagaccattcggtagtctcgtcactggtgttagacccgtcacacgtgctac

SEQ ID NO: 71080 - DNA, 653 bp, Homo Sapiens
  misc_feature (83)..(91): n is a, c, g, or t
  misc_feature (122)..(214): n is a, c, g, or t
cagacagtgtctcactctgtcacctatactggagtatggtggcacaatctcagcctgggggacaagagtgaaactccgtgtcnnnnnnnnnggtctctcagcttagtgctcgggccaccagnnnnnnnnnnnnnnnnnnnnnnnnnnnnnnnnnnnnnnnnnnnnnnnnnnnnnnnnnnnnnnnnnnnnnnnnnnnnnnnnnnnnnnnnnnnnngtaagacctattttgtggggttgtggttggggttgtattgagatgcacatgtaaaaagcttggtatgcagcatttactaaatgttagttcttattaattatcttgcctagcttgacagacggttatctgtaactgcctacatacagtccaatataagtgtcaaatctcctaagcaggacatggatgttacttagtatctagggcacagacaaatatcaatgtccacaaacatgaatccatctcaactcacactggcagccaatctgatgagtggcgttgagcaggcgaacacagggagctgttttatttaaggggatatatatcttcctctccactgagtttcccctgcacaaacctgctagtaggacgcagaaagacagaaggcgaaggagaccccgacttcccgggtcagccccagagccaccccctgccgtagcca

SEQ ID NO: 71081 - DNA, 407 bp, Homo Sapiens
  misc_feature (316)..(316): n is a, c, g, or t
  misc_feature (321)..(321): n is a, c, g, or t
aacgggtgatgcggttgctgccacccggctggatagccgtacctttttctggaatgtggccccaggggctgaaagcgcaggggcttcctttgtcacccagctggctgctgctgaagctgtgcaaaaggcacctgatgtgaccaccctgccccgcagatgtcatgttcgacttctttcaaggggaaacttttgactacattggcagctcgaggatggactacgatatggagaagggcaagattcccgagcagctagagaatgtcgactcatttgtggagctgggacaggtggccttaagaacttcattagagcttgngactntacttggatcctggcactgctctcgggtgaggttgaccactgtgccagtcaaaattgccaagcatactgtacaaacataagtgtgt

SEQ ID NO: 71082 - DNA, 1115 bp, Homo Sapiens
  misc_feature (159)..(184): n is a, c, g, or t
gcagcttccagtcctcctcctggaccatccctgcactcagaccttctccccggcccaccttccttcctcctctgggatcagacttcggtactgtgtcctcagagaccttcctctgtggccggggagaagggctgggtgacagagtgagatattgtctcnnnnnnnnnnnnnnnnnnnnnnnnnngagaaagggagtaactgcaaaatggcagagctgtctgatcccaaatgacacttgttctctctgctgctgggcaccttcacgctttcctatgggtgtcacccacctcccaccctgaggtattccacctcctacctggatgcgagcagcagtttccctgcggaaatcctccttcagggcagcttcacggcggctcactagcccctccagcagcgccagggtgtcctcgtggctcaggccaccaccacctccctggccaggagccccttgccgcagctccagacgttccagccgcatggcctccttctgccagttggaggaaaattcagcagcaagagcttccagacgccgctccagagagtgtacccgggacataacacgctgctcagcctggaagggcagagagagagccacggagtgagggacccttggatgatagtgcttcccaaagaccaccccgacacagccaacacagaaagaaagggaaaagattccagagacgttccagcataaggccatgcagggccgtctggagctcgtgggcaggggctgccgacctctgagctgggtgtgctgggagccagggatcactgggtgccggccacagaggaaggtccctgaggacacagtaccgaagtctgatcccagaggaggaaggaaggtgggccggggagaaggtctgagtgcagggatggtccaggaggaggactggaagctgcaggatggctgcagggggccgtggaccctcctggcctgaagctcactccttccccgcctcctgcaggggcaggggagccagggctgcgagttctgtctgtggactctcaatggctttcactccttccctaggtaactatggctaagagacagaataatttgaaaatacgttctttttcctctttagctggatgtcccacagagaaacatggaataa

SEQ ID NO: 71083 - DNA, 2874 bp, Homo Sapiens
ggagagagtatgaagtcgacggcgcgccgaattcggcacgaggcttgctgctgaattttcctccaactggcagaaggaggccatgcggctggaacgtctggagctgcggcaaggggctcctggccagggaggtggtggtggcctgagccacgaggacaccctggcgctgctggaggggctagtgagccgccgtgaagctgccctgaaggaggatttccgcagggaaactgctgctcgcatccaggaagaactgtctgccctgagagcagagcatcagcaagactcagaagacctcttcaagaagatcgcccgggcctcccaggagtccgaggctcgcatccagcagctgaagtcagagtggcaaagcatgacccaggagtccttccaggagagctctgtgaaggagctgaggcggctggaggaccagctggccggcctgcagcaggagctggcggctctggcactgaagcagagctcggtggcggaagaagtgggcctgctgccccagcagatccaggccgtgcgggacgacgtggaatctcagttcccggcctggatcagtcagttccttgcccgaggtggagggggccgcgtggggctccttcagaaagaggagatgcaagctcagctgccagaactggagagcaagatcctcacccatgtggcagagatgcagggcaagtcggccagggaagccgcggcctccctgagcctgacgctgcagaaagaaggtgtgattggagtgacagaggagcaggtgcaccacatcgtgaagcaggccctgcagcgctacagtgaggaccgcatcgggctggcagactacgccctggagtcaggaggggccagcgtcatcagcacccgatgttctgagacctacgagaccaagacggccctcctcagcctcttcggcatccccctgtggtaccactcccagtcaccccgagtcatcctccagccagatgtgcacccaggcaactgctgggccttccaggggccacaagggcttcgccgtggtccgcctctctgcccgcatccgccccacagccgttaccttagagcatgtgcccaagggccttgtcacccaacagcactatctccagtgcccccaaggacttcgccatctttgggtttgacgaagacctgcagcaggaggggacactccttggcaagttcacttacgatcaggaccgcgagccctattcagacggttcactttcaggcccctacgatggccacgtaccaggtggtggagctgcggatcctgactaactggggccaccccgagtacacctgcatctaccgcttcacagtgcatggggagcccgcccactagccctgcttactggtgcctgctgccagccatctgggagtgggtgaacagcaccccgccgcttcccccacacgcttgctcggcgctctgacttctaggagcacaagagaggagcctgtggccccatgcagatgaaaaggacgggcagggtctcctgagcagcaggtggctcgaggcggttagcaggctccagcagctcccttcttccttccctctgtgcccgtggcgtctgcttcccatcctgggagtgtgtatatatgtagcatatcatgggggactgggaagttgggagaggtaggacctgactggtcttggctggggtcaggggctggtgcctgggagctgatgaagcaggtgccagggctgtgggaggggcaagctacggcctgggctaggtgagctgcctctgcccctgggcaaggaagcgaggccctctgggaggagggtgcttagctccagagcaggatgggacttccccaggcaggaagcacttgatggagagctgcccagctctcctacaaggttagtgccctccacctagggaagcctgaaccacagggtccctgagggccttcgacaaaagtgtgtatttgtcccggggagggtagcagtgggccatggggcttcttgtgccctaaaggggactggctgctgtgatcttctaaggggcccagggccaaccctgtaggcttcccctctgctggggacggtagttgcttttctctctcctgatgctaggttggggcccaccctgctccctgttcctgctagggcctgccagtgcccctgagcttgctttccacattctcccagggtatggagacctagacctgtctttggggccattagcatctggggttatagcaagaagagtggggagcatggaactcctgggctcttgtggggacgttcagggtatcggggtgcgaggtctgtctgcaccggcccccacatctaaccaggccctgatgtaggggtcgtccgctcaggctgcccccttgggctcttgcagctcttgttcaggtagtcgcccttctggtttgttctctgtggggcagttggtgggggctgggggaagaggctggcagaagttaccctggatagggaagggggaggaggggacttttagagccagcaggccccactgtattatgtatatatttttcaaggtctgtttttctaactgaaaagctaagggcttgattcctagccccgttctgtggggcactgggtgatactcagtttcttgttcctggccgtggagaggggcctggggcactggttccggctgtgtctggtggtctggctgcggggaaggggcaagaaggcgggcaggccttcactgcagcactgagcctcaaatccgctctggagcatgaggctggatgcagtggtggtgaggccgccccgctccatcccgaggcagccagggtttgttttgcgctctcctgtcacaaatgctgcactattggttcttaagttttttatctccagatcctaatttatgcctatgcaaaaaataaatgacgcccaagagctgaaaa

SEQ ID NO: 71084 - DNA, 800 bp, Homo Sapiens
  misc_feature (16)..(16): n is a, c, g, or t
  misc_feature (733)..(733): n is a, c, g, or t
gcaaatcagtggtatntcaattcataaaactggctgcgagctcccaaggaataagtacagagcgagaagagggcccaggtctgaactatgtgctctcccatgtgcaggagataagaacgaggagtgccctgcagaggacaggcagtggtgggggcggaggacaacagagaaggcccagctatcatgcagagactgtgccaggtggagcagggggaagacccctgtcatcatgtcaagcataatgaagactgaaaactgaccactggtttaagcaaccagaggaccaacagtggcctggacaaggcagcttttgtggaacaagtgactggggcaaaaactagagtgggttcaaaagagaatggctgagggtgaaaacagcgagctccaatggccctgtgaaagagagcttacacacagaggagccaggggaaggtggcagctggtgagatgaacatggtcactgagtgtctgtttcttttcagaggatggacatgtgtatcctgatggagcaatccagcagaaagacaaatcaggtgacacaggcgggagagaggtggagtgatggcctggaaaaggctggagggtaggacccaggatgcgctcagcattgcctttagacagcagccaaacagttcgaacagctcatctgtgggaggcagtgggcacagaccctggcagatgagaagtcggtgaaaattatctcctggtggagtgaaactccaaggatttcctntagtgaaagtagaaagtaaggttatcgctgagaaatgacatccaaaaaagtaagcacttgcggccgc

SEQ ID NO: 71085 - DNA, 1383 bp, Homo Sapiens
  misc_feature (905)..(1044): n is a, c, g, or t
  misc_feature (1055)..(1067): n is a, c, g, or t
  misc_feature (1178)..(1186): n is a, c, g, or t
ttacattttccgaaggtggaattgggcaaacgtcaggtttccatcctttaggtcctggtagtaccggcatccaattacccaatgtcgtttttcaatgagctaaagagttaccaagtcttcgggctttgtcggctaaagaacgccctgcacaaagaggacaaagaagcagagacggcgcgactacctcattatcgccagcattgggcagctaaagacgctgaacaaatgtgagattctccccgaggagaggcggagagctgagcttgactaccgaaaagcttttggaaatgagtggaaacaggctggtggacataaggatccggaaaaaaacagactcagcgaagaattcctcacagcccatcccagataccagttcctctgcctgaaatatggtgcacctgaagattgggaactcaaaacacagcaaccacttatgctgaaaaaccagctactaacactgaagataaaataccctcatcaacttgatcagaaagtcctggagaaacaactgccgggctccatgacaattcaaaaggtgaagggattgctgtcacgtcttctcaaagttcctgtgtcagaccttctgttgtcctatgaaagtcccaaaaagccgggcagagaaatcgagctggaaaatgacctaaagtcattacagttttattctgtggaaaatggagattgtctattagtgcgatggtgacaaccaactaataaaatttaaagaccacactgcttatcgtgtctggggttcaccggaaataaatgattcactggaacaattctactgtcaaaacaaagggggtttacaacttgtcctaagtataacaagggatgtattttttgttgggaagtgaccatttctaggcttatacataatagcaataataaaggctttgaacctactnnnnnnnnnnnnnnnnnnnnnnnnnnnnnnnnnnnnnnnnnnnnnnnnnnnnnnnnnnnnnnnnnnnnnnnnnnnnnnnnnnnnnnnnnnnnnnnnnnnnnnnnnnnnnnnnnnnnnnnnnnnnnnnnnnnnnnnnnnnnctttgggcgcnnnnnnnnnnnnnaaaaaatttttaaaaccttttttttgggccgcgggccccaaaggaaaaggaaaatgggccaaacttttccccaaaaaaaccggggccagaaaaagggttggatcccccccnnnnnnnnncccccgggggaaaccgaaggttttaaaaaaatcccaaggggctttcgggggttttaggggattcttcaaagggggccccggggggtcccatttcaaattccccccccgcccgggacattattagaagaggggttgaatttaataaaggttctccccccagggggaagccctcccaaaggggggtggtagaaccttaa

SEQ ID NO: 71086 - DNA, 767 bp, Homo Sapiens
atacccaaaatgaccaaccaaatcatttctagtaaccctttaaaatagtagtttcaatgagagaattccattaaaactagtcttatgacagatattaactgtgttcagattttattaggctagctagtttctttctatttaatatttaaatcttatcatgaaatgcaggatgagctgtaaaaataaatatgaaataagatcagaaaatcattagtaggttcaaagcctttattatgctattatgtataagcctagcaaatggtcacttcccaaccaaaaaatacatcccttgttatacttaggacaagttgtaaaccccctttgttttgacagtagaattgttccagtgaatcatttatttccggtgaaccccagacacgataagcagtgtggtctttaaattttattagttggttgtcaccatcgcactaatagacaatctccattttccacagaataaaactgtaatgactttaggtcattttccagctcgatttctctgcccggcttctaaaattagaacgaaggtggggaaggatgtgattaagacagatccgataaagcatgctacacatactcttcccccaccccgtccccaggcagtagcttacccttaaaatcaaacaaacagacccatggtctccatttagaatcaaactgttgctatctagagacagtttaatgtcataatacgaggactaagcttgactttgacttgtatttgctgggcaacttactttggggactttcataggacaacagaaggt

SEQ ID NO: 71087 - DNA, 1657 bp, Homo Sapiens
  misc_feature (1502)..(1502): n is a, c, g, or t
cggtccggaattcccgggatctttgggccaccgcgtgcggcgccgtgctgggctcctaggatcggcagcgagtccagtgactcccaccgcacccccagtaatcacagggcggccggcgaccgcgggcaggggagggggtctgggaaggcccctggagaaggtggcatttcctcgaggtcggtggaatttggctacgcgaaaggaacagcgcctgtttcaggccagcagagccttcgctggctcttgacgtccttgcgaggtgatctctgcgaccaccagacaggagagaagacccattttacagatgaggtgaccagaagtcagcagcttcccagaagccccgaagccggggcatcctccactcactcttctgctgtgtctgccgggatgatggggaggccctgcctgctcacagcggggcgcccctgcttgtggaggagaatggcgccatccctaagaccccagtccaatacctgctccctgaggccaaggcccaggactcagacaagatctgcgtggtcatcgacctggacgagaccctggtgcacagctccttcaagccagtgaacaacgcggacttcatcatccctgtggagattgatggggtggtccaccaggtctacgtgttgaagcgtcctcatgtggatgagttcctgcagcgaatgggcgagctctttgaatgtgtgctgttcactgctagcctcgccaagtacgcagacccagtagctgacctgctggacaaatggggggccttccgggcccggctgtttcgagagtcctgcgtcttccaccgggggaactacgtgaaggacctgagccggttgggtcgagacctgcggcgggtgctcatcctggacaattcacctgcctcctatgtcttccatccagacaatgctgtaccggtggcctcgtggtttgacaacatgagtgacacagagctccacgacctcctccccttcttcgagcaactcagccgtgtggacgacgtgtactcagtgctcaggcagccacggccagggagctagtgagggtgatggggccaggacctgcccctgaccaatgatacccacacctcctcccaggaagactgcccaggcctttgttaggaaaacccatgggccgccgccacactcagtgccatggggaagcgggcgtctcccccaccagccccaccaggcggtgtaggggcagcaggctgcactgaggaccgtgagctccaggccccgtgtcagtgccttcaaacctcctcccctattctcaggggacctggggggccctgcctgctgctccctttttctgtctctgtccatgctgccatgtttctctgctgccaaatttgggccccttggccccttccggttctgcttcctgggggcagggttcctgccttggacccccagtctgagaacggtggacatcaagtgcctgccatagagccccctcttccccgcccagctttcccaggggcacagctcttaggctgggggagggggagaaccagncccctccccctgccccaacctccctcccttggggacttgagagggccccctaccaaccttttgcctctggccttggaagggaaggggaaggcctgtttacccactgggggaaaggccgccaggaaatccttgtccctttcaaggccccccacagt

SEQ ID NO: 71088 - DNA, 1149 bp, Homo Sapiens
  misc_feature (1067)..(1090): n is a, c, g, or t
  misc_feature (1113)..(1113): n is a, c, g, or t
cagctctaggctgggaggggagaaccagcccctccccctgccccacctcctcccttgggactgagagggcccctaccaacctttgcctctgccttggagggaggggaggtctgttaccactggggaaggcagcaggagtctgtccttcaggccccacagtgcagcttctccagggccgacagctgagggctgctccctgcatcatccaagcaatgacctcagacttctgccttaaccagccccggggcttggctcccccagctctgagcgtgggggcataggcaggaccccccttgtggtgccatataaatatgtacatgtgtatatagatttttaggggaaggagagagggaagggtcagggtagagacacccctcccttgcccctttcctgggcccagaagttggggggagggagggaaaggatttttacattttttaaactgctattttctgaatggaacaagctgggccaaggggcccaggccctgtcctctgtccctcacacccctttgctccgttcattcattcaaaaaaacatttcttgagcaccttctgtgcccagcatatgctaggcccaccagctaagtgtgtgtggggggtctctacgccagctcatcagtgcctccttgcccatccttcaccggtgcctttgggggatctgtaggaggtgggaccttctgtggggtttggggatctccaggaagcccgaccaagctgtccccttcccctgtgccaacccatctcctacagccccctgcctgatcccctgctggctgggggcagctcccaggatatcctgccttccaactgtttctgaagcccctcctcctaacatggcgattccggaggtcaaggccttgggctctccccagggtctaacggttaaggggacccacataccagtgccaagggggatgtcaagtggtgatgtcgttgtgctcccctcccccagagcgggtgggcggggggtgaatatggttggcctgcatcaggtggccttcccatttaagtgccttctctgtgactgagagccctagtgtgatgagaactaaagagaaagccagnnnnnnnnnnnnnnnnnnnnnnnngaccgcgtatgcggccgcaagcnttattccctttagtgagggtaattttagcttagcac

SEQ ID NO: 71089 - DNA, 940 bp, Homo Sapiens
gcacgaggccgcgatgagaacggcgtggagggggaattaaggctggaactggagagggaggggtctgcggtcagtcggacgcggcgctggaaatccggcggaggacctagaagtagcgggagcgatctgtgggcggggcgaacggcctgccggccgacggctcccacatcaggacgagaaggagccctcgagttaccgtgggagctgtgggagctgccctgtgactcttaggaagatgccgtaccttggctccgaggacgtggtgaaggagctgaagaaggctctgtgcaatcctcacattcaagctgataggctgcgctaccggaatgtcatccagcgagtgattaggtacatgactcaaggcttggacatgtctggtgtttttatggaaatggtgaaggccagtgccactgtagatattgtccagaagaagttggtttatctgtacatgtgcacatatgctcccctgaaaccagatctggctctcctggccatcaatacgctgtgcaaagactgctcagaccccaatccaatggtgcgagggctggcgttacggagcatgtgtagcctcaggatgcctggtgtgcaggagtatatacaacagcctattctcaatggtctgcgggataaggcttcatatgtcaggagagtggcagtccttggatgtgccaagatgcataatcttcatggagactctgaagtagatggtgccctggtaaatgacattatacagtatgctgcgtgaaccaggatccaagttgtagttggtgaacttgctttgagggactctaagagggaacattctgaagacaggaagtgaggcgtatgtcaatccactaagacccattgctcagcatcatcgtaaagtcgaattgtaaaagattggaaccaatggggccatgctgaaggtcattgaacgtcctgctacgcatagaaaccc

SEQ ID NO: 71090 - DNA, 1070 bp, Homo Sapiens
  misc_feature (59)..(148): n is a, c, g, or t
aggtagttgaattaacagcttgttccttgggtgctgtgataagtttggactttattgtnnnnnnnnnnnnnnnnnnnnnnnnnnnnnnnnnnnnnnnnnnnnnnnnnnnnnnnnnnnnnnnnnnnnnnnnnnnnnnnnnnnnnnnnnnagtccctggactggatgacaaaaagcaccccaagggatttttatgcatagtaaagtttgtgaaccatagctgtaggcaagagttatgtgttcaggtatgtataatggaaaaattctgtctcaaatgaggcaaagtggcctactagtaagctgctgcaattgctttattgatgaaggcctggaccagaacaacaatgctaataaacaagagaggatggatatttagaattatgaattcaaaccatctgacataagaagtgagagatcaggtgtcctcaaggttggctcccacgcatagtcggctgctggtggcattcatcaacacaaatgtaagctgaacaggtttgaggaagacggaagaatgcccgggctattccgcacatacttttgataaaccacgcacgtgaaaatgccaaccagccagtgggatacgtgggtctgaagctaaaaaaggaagtctgtactagctatattatagatccaagagtcaccagtaattgctcaagcccgtgatatggagcaaactacccagctgagtaaaagatgctgcagaggggagactgacatggtactccaaagcagcaggacgaagaccgaaccatataactgccacgtgtgaaagctaattcaccctttcagagagactggggctagtgagccctgatggggattgcaaagggagcagttagcacgcgaagggaggtaggtgatacctaatcactcgctggatgacattccggtagcgcagcctatcagcttgaatgtgaggattgcacagagccttcttcagctccttcaccacgtcctcggagccaaggtacggcatcttcctaagagtcacagggcagctcccacagctcccacggtaactcgagggctccttctcgtcctgatgtgggagcctgagtaaaggaaatattcca

SEQ ID NO: 71091 - DNA, 1838 bp, Homo Sapiens
agacggtgctggtgactcgtccacactgctcgcttcggatactccaggcgtctcccgttgcggccgctccctgccttagaggccagccttggacacttgctgcccctttccagcccggattctgggatccttccctctgagccaacatctgggtcctgccttcgacaccaccccaaggcttcctaccttgcgtgcctggagtctgccccaggggcccttgtcctgggccatggcccagaagggggtcctggggcctgggcagctgggggctgtggccattctgctctatcttggattactccggtcggggacaggagcggaaggggcagaagctccctgcggtgtggccccccaagcacgcatcacaggtggcagcagtgcagtcgccggtcagtggccctggcaggtcagcatcacctatgaaggcgtccatgtgtgtggtggctctctcgtgtctgagcagtgggtgctgtcagctgctcactgcttccccagcgagcaccacaaggaagcctatgaggtcaagctgggggcccaccagctagactcctactccgaggacgccaaggtcagcaccctgaaggacatcatcccccaccccagctacctccaggagggctcccagggcgacattgcactcctccaactcagcagacccatcaccttctcccgctacatccggcccatctgcctccctgcagccaacgcctccttccccaacggcctccactgcactgtcactggctggggtcatgtggccccctcagtgagcctcctgacgcccaagccactgcagcaactcgaggtgcctctgatcagtcgtgagacgtgtaactgcctgtacaacatcgacgccaagcctgaggagccgcactttgtccaagaggacatggtgtgtgctggctatgtggaggggggcaaggacgcctgccagggtgactctgggggcccactctcctgccctgtggagggtctctggtacctgacgggcattgtgagctggggagatgcctgtggggcccgcaacaggcctggtgtgtacactctggcctccagctatgcctcctggatccaaagcaaggtgacagaactccagcctcgtgtggtgccccaaacccaggagtcccagcccgacagcaacctctgtggcagccacctggccttcagctctgccccagcccagggcttgctgaggcccatccttttcctgcctctgggcctggctctgggcctcctctccccatggctcagcgagcactgagctggccctacttccaggatggatgcatcacactcaaggacaggagcctggtccttccctgatggcctttggacccagggcctgacttgagccactccttccttcaggactctgcgggaggctggggccccatcttgatctttgagcccattcttctgggtgtgctttttgggaccatcactgagagtcaggagttttactgcctgtagcaatggccagagcctctggcccctcacccaccatggaccagcccattggccgagctcctggggagctcctgggacccttggctatgaaaatgagccctggctcccacctgtttctggaagactgctcccggcccgcctgcccagactgatgagcacatctctctgccctctccctgtgttctgggctggggccacctttgtgcagcttcgaggacaggaaaggccccaatcttgcccactggccgctgagcgcccccgagccctgactcctggactccggaggactgagcccccaccggaactgggctggcgcttggatctggggtgggagtaacagggcagaaatgattaaaatgtttgagcactat

SEQ ID NO: 71092 - DNA, 553 bp, Homo Sapiens
  misc_feature (160)..(168): n is a, c, g, or t
ctaacaaaacaatcttttttcaaaatgaattccaacccctgctagcttccttccccgcctccatactgttttaggcagcaccgtttatgtgacagagtccgtgtttctcaaatgcatggtgttcctcaggtggagagtgggcagaagtttttgcaacacnnnnnnnnnaagttattgggtgcaaaatcccaaaccaggatatgtgtatgtctgtgtgtttatgttttttatttgaccctcccctctttcaacctacccccttttatatctaatgtagaaaaagcgaaattgaatctggaaagcaaactgttgtatatagttgcggtaacaatcatgaagagagagccgggctgtcccctcagtaattcattttaaataacaaattatttaaaaataaaattcatgccagagccagctgaagaggccttccttcatcaccactgaggccacccccaatctgggccctctgtccatctggcatgtctcctcccagcaagattcatctgttcaatgccatttgcgtttcaataaagttatctcctgggctgtcaaa

SEQ ID NO: 71093 - DNA, 924 bp, Homo Sapiens
cggtggagcggctgagcgtgctgcggaccaaggccatgcgggagaaggaggagcagcgggggctgcgcaagtacaactacacgctgctgcgcgtgcgcctccccgatggctgcctcctgcagggcactttctacgctcggaagcggctgggggcggtgtacgggttcgtccgggaggccctgcagagcgactggctgccttttgagctgctggcctcgggagggcagaagctgtccgaggacgagaacctggccttgaacgagtgcgggctggtgccctctgccctcctgaccttctcgtgggacatggctgtgctggaggacatcaaggccgcgggggccgagccggactccatcctgaaacccgagctcctgtcagccatcgagaagctcttgtgaaataaaagcagggttggcctcagccctgtgggtctgtctcatgctctccctgttcctctccccgccaccccagggcctccaagccacctctggaaatacttggctctgccccatgggcacgggaggggcgccagccgtggagctgtggaattgggccccgtggcagagcccccatcccttgggggctgtggggatgcgcccaagcccccgagggagaggcctggggacaccaacaaatctaagccctccctagctgcttggtaactgtgtcatgaagctgccggacagacacacgtggcatctccctgggcaggagagcaggcctgcagcatgggtcctgttcccgtgtgccgtgggtggcagtggctgcacctggcactagggctgctctgtggatgtgggtgacaacggcaggaggggatgctggccttcctgcacatagacctgcagttagtaaatcataagcccaaataaacaggttgtttgagatatagacacgcacagacaaagaaaacacaaagagggg

SEQ ID NO: 71094 - DNA, 1367 bp, Homo Sapiens
  misc_feature (1349)..(1349): n is a, c, g, or t
ttttcgatggcggacagggagcttcgggtttccagaatggagtcccggttcgggccccccgcgggccttgaatgtcttccagcacagccatgttcccacgagaaggtcaggaggggcagagggcaccagcccgcactcgtttcaaggccaggttctcgtcctcggacagcttctgccctcccgaggccagcagctcaaaaggcagccagtcgctctgcagggcctcccggacgaaacccgtaccaccgcccccagccgctcccgagcgtagaaagtgccctgcaggaggcagccatcggggaggcgcacgcgcagcagcgtgtagttgtacttgcgcagcccccgctgctcctccttctcccgcatggccttggtccgcagcacgctcagccgctccaccgcctcggacctgagcctctgctcccgcttgatctcctctgctgtgaggttgaagaagtccccaggcagttcgaactgcgaggccaggggcgagggctggaagacgcggcgctgcctgtccagcttggcgcgcacgggctccgcagccagcagctgttccttgtgcctctccaggctctggggctgggccaaggtggtctcgctcagcacgtagaactcctcggggtcctcctgatcctgggcgggaagcaacaccttctggaacccaatggcctcaaaaaactcgtgggtcccttccaggcagttaatgcgctcctgaaacaccttgttctgcagcttgatcttccggtacttctcctcctcggggtgcaggtggatgttgtccaggtacttggcaatggtgtccacacccagcttcacccggtcctggtctttgttgaacgtgtagatcttcatgatggaggcggccactgggtcggtggagaagtgcaagagaatggcctccttgatgcaggcgtcccgctggtccttcctcagggtggccccagtgagcggacaggtgaagtacacgccaggcacagccaggtgggcagagccttcctctctgggctcagataccacgttggtccctggggcctcggggctcccgctgacggtggcttcggcttgaagttcctttctcacctggtttcggatggtgtcctgcgatgtggggccccaggcccgggactgcttctgctccagccgggctagggcagcagcggctgccatctgtgcctcattggtgggtccctggcggggcggcctgggggctggctggttgggcttctctttgtgggccttttcccccacggactctttgagcttctgaccgggtcccgcgctcttgaacttgatgtcggccttgaactcctgaaagaatttcttcatggtggcggctggcccggcgncggggggccgcgggggcg

SEQ ID NO: 71095 - DNA, 948 bp, Homo Sapiens
  misc_feature (26)..(26): n is a, c, g, or t
aacaagtgctgacaaagagctccatnttccccctcttcatgacgatgctgcacctggccgtgatcttcctcttctccgccctgtccagggcgctggttcagtgctccagccacagggcccgtgtggtgctgagctgggccgactacctcagaagagtggctcccacagctctggcgacggcgcttgacgtgggcttgtccaactggagcttcctgtatgtcaccgtctcgctcgcgcggcactggtcctggtggtcctcctcatcgccgggggtctcttcatgttcacctacaagtccacacagttcaacgtggagggcttcgccttggtgctgggggcctcgttcatcggtggcattcgctggaccctcacccagatgctcctgcagaagactcatttccaaggcacagcagctttctaaagggactgagtttggactgggttttggacctccaggggctggagcttcatcacctgggcagtgtcttttctcagagagcaggtttctttatagtttggaaataaatggttcacggtccactggccgccttgtgttgctggagacgtgggggcagggaggggacagtgtgggcctggcctctcctttcctttccctgcctggagccttcttcaaatgtctggtcttaagccaggcctccttcattttctcgctcctgttagaacaccagtcccctccccagtggggccccactgcacctgctggcaggaaataaatgaatgtttactgagtactgcattctggagaccttacatgttttcacagcctagtttgaatactggctttgtcactagctgtgtgaccctaagcaaatgacctaacctgtctgtgccgtagttttttaatctgtgaaatggggataatgtctatctcagagtccttttgaagattgagtcattattagtaacagattaaatgttatataagca

SEQ ID NO: 71096 - DNA, 2062 bp, Homo Sapiens
  misc_feature (2013)..(2013): n is a, c, g, or t
cgcacttccggtggggagattccggcctggagctcccagggccgagcagaccttgggacctgtgagcgctgcatccaattaaccatgggaagggtcagcaccagccaccagccccttaggtgaggactctgcctggggctctgctgatggttccgaatcatggagctgcagagagctcctccagcctggagacgttcttggtgaaagctgtggtctaactccaccggctcttcctgcacattgtattcaagaggggtgcctgcccccgctgactcaggagctccggtgctgcagccgccacgaatggggaggtgggccctcgatgtggcctttttgtggaaggcggtgttgaccctggggctggtgcttctctactactgcttctccatcggcatcaccttctacaacaagtggctgacaaagagcttccatttccccctcttcatgacgatgctgcacctggccgtgatcttcctcttctccgccctgtccagggcgctggttcagtgctccagccacagggcccgtgtggtgctgagctgggccgactacctcagaagagtggctcccacagctctggcgacggcgcttgacgtgggcttgtccaactggagcttcctgtatgtcaccgtctcgctgtacacaatgaccaaatcctcagctgtcctcttcatcttgatcttctctctgatcttcaagctggaggagctgcgcgcggcactggtcctggtggtcctcctcatcgccgggggtctcttcatgttcacctacaagtccacacagttcaacgtggagggcttcgccttggtgctggggggcctcgttcatcggtggcattcgctggaccctcacccagatgctcctgcagaaggctgaactcggcctccagaatcccatcgacaccatgttccacctgcagccactcatgttcctggggctcttccctctctttgctgtatttgaaggtctccatttgtccacatctgagaaaatcttccgtttccaggacacagggctgctcctgcgggtacttgggagcctcttccttggcgggattctcgcctttggtttgggcttctctgagttcctcctggtctccagaacctccagcctcactctctccattgccggcatttttaaggaagtctgcactttgctgttggcagctcatctgctgggcgatcagatcagcctcctgaactggctgggcttcgccctctgcctctcgggaatatccctccacgttgccctcaaagccctgcattccagaggtgatggtggccccaaggccttgaaggggctgggctccagccccgacctggagctgctgctccggagcagccagcgggaggaaggtgacaatgaggaggaggagtactttgtggcccaggggcagcagtgaccagccagggcaaatggcttagaagcaggccactccccagcctgctgccagcactcactgtgctcaagccgccagggctcatcatggtagctgggagctgtggacgggagtcaccaggtggtggggccaagccagggactcatgacttttgcccctcccttcagagcctggtcacacaaggggcgagcaccaggccagcctgggactggccagagctgggcccaagctgcgctggaatcgcagcaggagaggggagtgggctggttcttcccaccacttcccaggctctgacagccgagactcatttccaaggcacagcagctttctaaagggactgagtttggactgggttttggacctccaggggctggagcttcatcacctgggcagtgtcttttctcagagagcaggtttctttatagtttggaaataaatggttcacggtccactggccgccttgtgttgctggagacgtgggggcagggaggggacagtgtgggcctggcctctcctttcctttccctgcctggagccttcttcaaatgtctggtcttaagccaggcctccttcattttctcgctcctgttagaacaccagtcccctccccagtnggggccccactgcacctgctggcaggaaataaatgaatgtttactgagt

SEQ ID NO: 71097 - DNA, 976 bp, Homo Sapiens
ggggggctgataggatgtcttcatttggtgattttgttgcattgtccgatgtttgtgatgtaccaactgcaaaaattatttccagagaagtatctgatggtataattgccccaggatatgaagaagaagccttgacaatactttccaaaaagaaaaatggaaactattgtgtccttcagatggaccaatcttacaaaccagatgaaaatgaagttcgaactctctttggtcttcatttaagccagaagagaaataatggtgtcgtcgacaagtcattatttagcaatgttgttaccaaaaataaagatttgccagagtctgccctccgagacctcatcgtagccaccattgctgtcaagtacactcagtctaactctgtgtgctacgccaagaacgggcaggttatcggcattggagcaggacagcagtctcgtatacactgcactcgccttgcaggagataaggcaaactattggtggcttagacaccatccacaagtgctttcgatgaagtttaaaacaggagtgaagagagcagaaatctccaatgccatcgatcaatatgtgactggaaccattggcgaggatgaagatttgataaagtggaaggcactgtttgaggaagtccctgagttactcactgaggcagagaagaaggaatgggttgagaaactgactgaagtttctatcagctctgatgccttcttccctttccgagataacgtagacagagctaaaaggagtggtgtggcgtacattgcggctccctccggttctgctgctgacaaagttgtgattgaggcctgcgacgaactgggaatcatcctcgctcatacgaaccttcggctcttccaccactgattttaccacacactgttttttggcttgcttatgtgtaggtgaacagtcacgcctgaaactttgaggataactttttaaaaaaataaaacagtatctcttaatcactggatccagaa

SEQ ID NO: 71098 - DNA, 1418 bp, Homo Sapiens
  misc_feature (67)..(67): n is a, c, g, or t
  misc_feature (201)..(202): n is a, c, g, or t
  misc_feature (1034)..(1172): n is a, c, g, or t
  misc_feature (1187)..(1197): n is a, c, g, or t
  misc_feature (1221)..(1231): n is a, c, g, or t
  misc_feature (1252)..(1374): n is a, c, g, or t
ttttcaatagctttacaaggcctacattatttaattcctcagaataggatttgagcctattatcttntgataatgtgagttagtacaaactttatatgattaaaaagttagtgctattcagtgaagttaaataaacgtctgattttcaatacagatagtacaaattaccatgtttctatccacaggctgttaaaacacacnnaccaaaacgtacagcattacaacctggtgtgcgttatctaatcagagtgatgatataatcacacttgctatttaacataaattgtgcttaagagcataaaagaggaagcagcaggccctgtactcagtattattattcttgcctcagaatgcaaaacaactctaaagtgtctatattcatatatatgtgcatttcttaagatttaaatacaaactgttgttactccttaagcttcaggctttctgcgaaagctctaagaatatcttcattactatgcttggtcaactggaagatggtattaataaggtcagaattaggaattggattgctctgtgggtcctccggtattgtgcagaggaaagaaaaatgtctttcacaccacaaactgtgtgtctgaaccccagccaaacaaatgtgttccattggtccaatatataagcattaacaacaacaacaaaaaatttaaaacaagtaaattaatgcattcacatgatcacttcttgaaaatggttcaaagcatgttttcctgatggtgggattgtttaaatgacatgttttaaagtttttaatactttattagttatgaagtgcttcttttatatgttaagtttaggttgccagtactcataatttttatttctgcaattatgttataatgagttgtttgcatgcctacttaacccaagtaaaacgatgctgtttgctctggaatgttcatcttttagacaggttttggctcatttccaatcatggtgcaatatagtgtaacattcatttgttttcattcaacagttttatttttgtcataataaataattacttttccaatagnnnnnnnnnnnnnnnnnnnnnnnnnnnnnnnnnnnnnnnnnnnnnnnnnnnnnnnnnnnnnnnnnnnnnnnnnnnnnnnnnnnnnnnnnnnnnnnnnnnnnnnnnnnnnnnnnnnnnnnnnnnnnnnnnnnnnnnnnnngaaattgggggcccnnnnnnnnnnnaaaaaatttttaaaaacttttttnnnnnnnnnnncccccaaaggaaaaagaaacnnnnnnnnnnnnnnnnnnnnnnnnnnnnnnnnnnnnnnnnnnnnnnnnnnnnnnnnnnnnnnnnnnnnnnnnnnnnnnnnnnnnnnnnnnnnnnnnnnnnnnnnnnnnnnnnnnnnnnnnnnntctttggggggtttcaaacaggagggggccccagcggggccccc

SEQ ID NO: 71099 - DNA, 424 bp, Homo Sapiens
  misc_feature (71)..(280): n is a, c, g, or t
ggggtaaaatacttagatttctctcagggcctgttatctgtcatgttatcttattgctacaaagagcctgnnnnnnnnnnnnnnnnnnnnnnnnnnnnnnnnnnnnnnnnnnnnnnnnnnnnnnnnnnnnnnnnnnnnnnnnnnnnnnnnnnnnnnnnnnnnnnnnnnnnnnnnnnnnnnnnnnnnnnnnnnnnnnnnnnnnnnnnnnnnnnnnnnnnnnnnnnnnnnnnnnnnnnnnnnnnnnnnnnnnnnnnnnnnnnnnnnnnnnnnnnnnnnnnnntagactatcagctgcttcatgtcacatctcatgcttctcttatgttgcccagttttctcagtgcttccgactgcatgtttttgtactatatgaaaagccttctttctagaagactaccaattaaatatttctttagaaaaatgt

SEQ ID NO: 71100 - DNA, 496 bp, Homo Sapiens
  misc_feature (139)..(351): n is a, c, g, or t
ccagaaggtagcaggcttcagagagaatagattgtaaatgtttcttatcagacttaagagaaatttgttttgggataaaatacttagatttctctcagggcctgttatctgtcatgttatcttattgctacaaagagcnnnnnnnnnnnnnnnnnnnnnnnnnnnnnnnnnnnnnnnnnnnnnnnnnnnnnnnnnnnnnnnnnnnnnnnnnnnnnnnnnnnnnnnnnnnnnnnnnnnnnnnnnnnnnnnnnnnnnnnnnnnnnnnnnnnnnnnnnnnnnnnnnnnnnnnnnnnnnnnnnnnnnnnnnnnnnnnnnnnnnnnnnnnnnnnnnnnnnnnnnnnnnnnnnnnnntagactatcagctgcttcatgtcacatctcatgcttctcttatgttgcccagttttctcagtgcttccgactgcatgtttttgtactatatgaaaagccttctttctagaagactaccaattaaatacttctttagaaaaatgta

SEQ ID NO: 71101 - DNA, 351 bp, Homo Sapiens
  misc_feature (78)..(90): n is a, c, g, or t
gcggccgcaagtgcttacatttgtcatctcatttactcttacaatgtcctccataaggctgagtgaggctccatctcnnnnnnnnnnnnnctttggtacagataatctggctcctccctgggcatcacccccgggagcctactccactccattagcctacagccctgcctctgacttcaaaccctaagcatgatggccatgaatactaaaaaaatactcaacatcagtatcaactgagtaccctttctaggtatctatattagacactttttctgctgaaacccttttatgagtaaaaaaaggaactgaatgtttatacaaaagtttatgtaaatctttagatgatgacct

SEQ ID NO: 71102 - DNA, 734 bp, Homo Sapiens
  misc_feature (398)..(417): n is a, c, g, or t
gttcccacaccccaacacttccagcatttagctgcccacatgccggagagttttaattttaacttattgacaaccgagaaggtttatcccgccgatagagggacggccaagaatgtacgtccagcctgccccggagctggaggatcccctccaagcctaaaaggttgttaatagttggaggtgattccagtgaagatattttatttcctttgtcctttttcaggagaattagatttctataggatttttctttaggagatttattttttggacttcaaagcaagctggtattttcatacaaattcttctaattgctgtgtgtcccaggcagggagacggtttccagggaggggccggccctgtgtgcaggttccgatgttattagatgttacaagttnnnnnnnnnnnnnnnnnnnnatttattgagtttttacaagatgtatttgttgtagacttaacacttcttacgcaatgcttctagagttttatagcctggactgctacctttcaaagcttggagggaagccgtgaattcagttggttcgttctgtactgttactgggccctgagtctgggcagctgtcccttgcttgcctgcagggccatggctcagggtggtctcttcttggggcccagtgcatggtggccagaggtgtcacccaaaccggcaggtgcgattttgttaacccagcgacgaactttccgaaaaataaagacacctggttgctaacctg

SEQ ID NO: 71103 - DNA, 1175 bp, Homo Sapiens
  misc_feature (81)..(115): n is a, c, g, or t
  misc_feature (1098)..(1099): n is a, c, g, or t
  misc_feature (1101)..(1101): n is a, c, g, or t
  misc_feature (1104)..(1104): n is a, c, g, or t
  misc_feature (1107)..(1108): n is a, c, g, or t
  misc_feature (1112)..(1112): n is a, c, g, or t
  misc_feature (1115)..(1115): n is a, c, g, or t
  misc_feature (1118)..(1118): n is a, c, g, or t
  misc_feature (1120)..(1124): n is a, c, g, or t
aaaaatgtatagatcatataggcgctacgtcgctatccgaacgacgagcgcagcgaagtcagatgagcgaggaagcggcgnnnnnnnnnnnnnnnnnnnnnnnnnnnnnnnnnnncagtcgacggtaccggacatatgcccgggaattcggccattacggccggggccttcccggaagcgcagcagacccgctcaacttcatcctgggttgaggcggaggagaacttccagaattatggcgaagtccgggctgaggcaggacccgcagagcacagctgcagccactgtgctaaagcgggcagtagaactagattcggagtcgcggtatccgcaggctctggtgtgttaccaagaggggattgatctgctcctgcaggttctgaaaggtaccaaagataatactaagagatgtaatctcagagaaaaaatttccaaatacatggacagagcggaaaacataaagaagtacttggaccaagaaaaagaagatggaaaatatcacaagcaaattaaaatagaagagaatgcaacaggtttcagttatgagtcactttttcgcgaataccttaatgagacagttacagaagtttggatagaagatccttatattagacatactcatcagctgtataactttcttcgattttgtgagatgcttattaagagaccatgtaaagtaaaaactattcaccttctcacctctctggatgaaggcattgagcaagtgcagcaaagtagaggcctgcaagaaatagaagagtcactcaggagtcacggagtgctgttggaagttcaatactcttcttcaatacatgaccgagaaattaggttcaacaatggatggatgattaagattggaaggggacttgattattttaagaaaccacagagtcgtttttcccttggatattgtgattttgatttaagaccatgtcatgaaacaacagtagacatttttcataagaagcatacaaaaaatatatgatgggtggtagcctaatttgtattatgtctactttaagtgaatattggattttttttaaaagatcacttttataatgtatgaatttaacaataaacttttatatttcctccccnncnacnacnnaatnacnaanannnnnaacccctggttggccgcctccgggcctccaaaaagctttctagacccttta

SEQ ID NO: 71104 - DNA, 1212 bp, Homo Sapiens
  misc_feature (841)..(841): n is a, c, g, or t
  misc_feature (843)..(843): n is a, c, g, or t
gcgtgattggcaaacgtgtgttggatttgcagaacatattataaatagacatacagatgtaacctcggtgtcaacagcagctggttctaccttcatgagggagccaaattttccctgtccagagctgtcaaggaagggtttctgaggtgtgtccctatatggcatggtggcaggtccttcgtgggagggttgccacatatgtgagtgtgcaggggcgagcgtggcgcagtggcatcgtctcactgtcctcctccgttgcagggccgcatcatcgagtgcacacactgtggctgtcgtggctgctctggctgaggctggcgcgctccaccctggactctggacttcgcaggttcctgcctgtcacgccacccccttcctgggagcagcgagcagtgccccaggcccgagttggagcacggtctctatggggaaggcttcgctgtctatcagctgtgatttgtaaaaataaaatctttaaatctctcgagccccacgtctcttctttcagagcatcggcctatggaacccggcggggcggcccaggccccagggaccagatgccccagcccccttgtggtgtgtgaggtgacacacaaaggtagctggagctggaagtcccgtgaaggtgacacgcaaaggtggctggagctgcacttggacctgctgggagcacaggcaccttgggcctagtgtgtgtcctcaccaacacctgtgacacgctgcggctgttcctcagggcctggctcttcccccaggcaggaggtgacaccagctcacttgtcctggggctcccacagagcactgggggccgagcacattgttccagctgtgctcccatcancnctgcccccaagggcacatccgtcatcagcctccttgccggtgtcctggtccccctggggcttggtccggaacttctgccaggggtgcggggtttcctctgcgggcatcactgtcagccactgcttgtaataggctcggaagccgtcaatcttctccaggtaggtgttcttcccttggtaccggtcaaaggtgggagggtactgggctgcaaactccagctggcggatgaccacttcgttcaccgggaccctgttctgcttcatgtccttcaagatgctgatgagataggtgtagttcagcttcctgatggccgcgttgatgagggcactgtagatgtgagtgttaccattctgatgttggagcggccgc

SEQ ID NO: 71105 - DNA, 975 bp, Homo Sapiens
  misc_feature (846)..(864): n is a, c, g, or t
  misc_feature (866)..(873): n is a, c, g, or t
gggctgaagagcggaagccttctgtcgagaagcagctacccaagctccaggagcttccgaagaaacaggaccagagagggaaggtgacctgaaagtcacagaataattttttagagctgaacaagaatccaagcctgcaactgcagagacgagagatctttctgctgtctatactcttggaaagcacatcctaagatctttgcagattatcctgtggaaggaaaatgcctaaagtcaaaagaagccggaaagcacccccagatggctgggagttgattgagccaacactggatgaattagatcaaaagatgagagaagctgaaacagaaccgcatgagggaaagaggaaagtggaatctctgtggcccatcttcaggatccaccaccagaaaacccgctacatcttcgacctcttttacaagcggaaagccatcagcagagaactctatgaatattgtattaaagaaggctatgcagacaaaaacctgattgcaaaatggaaaaagcaaggatatgagaacttgtgctgcctgcggtgcattcagacacgggacaccaacttcgggacgaactgcatctgccgcgtgcccaaaagcaagctggaagtgggccgcatcatcgagtgcacacactgggggctgtcgtgggctgctctgggctgaggctggcgcgctccaccctggactcgggacttcgcaggttcctgcctgtcacgccaccccctttctgggagcagcgagcagtgcccccaggcccgagtttggagcacgctcctaatgtgggaaagggttcccctggctatccacctggggatttgtaaaaataaaatcttttaaatctctcggnnnnnnnnnnnnnnnnnnnannnnnnnnaaaaagggcggccggctctaagaaaaatccctccagggggcccaaggctacgcgtaaccagctttctttggacaaaggggccccctataggggaggcgtatt

SEQ ID NO: 71106 - DNA, 1442 bp, Homo Sapiens
  misc_feature (1104)..(1126): n is a, c, g, or t
  misc_feature (1274)..(1333): n is a, c, g, or t
gcagtaactctaacggttctaaggtagcgaggcctgggtggcgaattcggcacgagaagcagctacccaagctccaggagcttccggtatgtgttttccctctgttctcgattaccttggcaacggctgaggcgggagaccggtggtctgcaccgtcctggagggagatatgagtggctggactctcagccagccactgggatgtgttcgggctttggaccttgaggccggagagagctcccgagaggaggcggcgccacgttcgttcttctgaggggacggtagatttgggggttttcctctaggattctcgcgccgtttcctctgaagaaacaggaccagagagggaaggtgacctgaaagtcacagaataattttttagagctgaacaagaatccaagcctgcaactgcagagacgagagatctttctgctgtctatactcttggaaagcacatcctaagatctttgcagattatcctgtggaaggaaaatgcctaaagtcaaaagaagccggaaagcacccccagatggctgggagttgattgagccaacactggatgaattagatcaaaagatgagagaagctgaaacagaaccgcatgagggaaagaggaaagtggaatctctgtggcccatcttcaggatccaccaccagaaaacccgctacatcttcgacctcttttacaagcggaaagccatcagcagagaactctatgaatattgtattaaagaaggctatgcagacaaaaacctgattgcaaaatggaaaaagcaaggatatgagaacttgtgctgcctgcggtgcattcagacacgggacaccaacttcgggacgaactgcatctgccgcgtgcccaaaagcaagctggaagtgggccgcatcatcgagtgcacacactgtggctgtcgtggctgctctggctgaggctggcgcgctccaccctggactctggacttcgcaggttcctgcctgtcacgccacccccttcctgggagcagcgagcagtgccccaggcccgagttggagcacggtctctatggggaaggcttcgctgtctatcagctgtgatttgtaaaaataaaatctttaaatctctcgagnnnnnnnnnnnnnnnnnnnnnnnacctgggcactttcgcggtgcgaaaaaggtaaaaaggcaatgaagggtcgcaggcacgtttttgacaaaaggggagaaaccaggggccccaatcaagacggaaaatcagacccgagagaacacacgcactcggaacggaccaggaggnnnnnnnnnnnnnnnnnnnnnnnnnnnnnnnnnnnnnnnnnnnnnnnnnnnnnnnnnnnngagaggaacgcggaagaggacggagagaacgaatgaagacacacagagagacaaaaacagcacaacagacagtagactacacatgagcgcgaaccacatgtgaaggaag

SEQ ID NO: 71107 - DNA, 494 bp, Homo Sapiens
  misc_feature (299)..(336): n is a, c, g, or t
ctttgttcccaaacacactctttgcttctcccctgctgaaacagaaccgcatgagggaaagaggaaagtggaatctctgtggctcatcttcaggatccaccaccagaaaacccgctacatcttcgacctcttttacaagcggaaagccatcagcagaggtaattagtcagtctctcttggactttgaagctcgcgtcacttttggagttactgaactaaccacaatccttattctcgcaaactgtgcaagtcatggtttttcttaccacgaaaattagggggagccaacgttggctgannnnnnnnnnnnnnnnnnnnnnnnnnnnnnnnnnnnnnagatggagtctccctctgtcacccagattggagtgtagttgcatgatctcggctcactgcacaacctctgcctcccaggcccaaccagtcctcccacctcagcctcccaagtagctgggaccacaggcgtgcaccaccatgcctggctgttttctgtg

SEQ ID NO: 71108 - DNA, 1111 bp, Homo Sapiens
aaaagctgaaattcaggttggtctgcagcctgggcaaggggaacagctcctggcctctgagcccagctggtggaccactggaaaatatggaatatttcagtacgatggtcccctttgacttgatttaggagctctcagttgcatagaaagatctggtgagcaccttttcatccccagaaaaggagcacgtgaattgagtcgcctggcggctctgtacgcgctcagggaagcttagcttcttggtgcccatctacgtgcactggatgatttttcttttgaacattttgccccactacactgtttggggatagctgggttaagcaagttaaagatatttacatttatattggaattttagcaactttttttcaggttaaatatataatttcaagtgcttttaatgaacttatttttaattggctagggagcaaaaaataagtgagttctgcttttagttagttaaccttgttcttttcttaaatagtacactgcatggtatttaatattccaggaagcatgggattttattttgcttgattttgggcacatgaaataatagctctaggaaaatgcgcatcttaatgactctttgtaaagagaggcatttcttacaactgtgatgtttgcttacataaaagttacctcataagttaattctaacttttattcttgaattttatttcatttcaatagcttgtttcatttgcacgcctttgtattttgattgacctgtagaatggatgttaggaaactcaaaattgaacacagtgaaacaaatggtatttgaagaaatgtaatatcttttatattctatttatgatatccataatcaaatgagattattttaccacataaatgttttaaatatcagatttttagtttgcagttttaggaaaatgctttagatagaaaaggttcttatgcattgaatttggagtactaccaacaatgaatgaatttattttttatattcttacacattttattggtcattgtcacagatagtaaatactaaaaatttcaggtcagtttgttttgaaactgaaattggaaataaatctggaaatgttttgttgcactaaaataataaaatgaattgtactgaaaaaaa

SEQ ID NO: 71109 - DNA, 968 bp, Homo Sapiens; identical to SEQ ID NO: 4150

SEQ ID NO: 71110 - DNA, 1519 bp, Homo Sapiens
cgtgactggattccctcactgttgtatcttgaataaacgctgctgcttcatcctgtgggggccgtggccctgtccctgtgtgggtggggcctcttccatttccctgacttagaaaccacactccacttctaacagggtttgagaggcttggtcagcactgggtagcgttttgactccattcttggctttcttctttttctttccagaaggatttttgtgcagaaatgggtcttttgttgccatgttagtcctccttggaaggcagctcagaaggcctgtgaaatgtcaggggacaggacccccagggagggaaccccaggctacgcactttagggttcgttctccagggagagcgacctcgtcccccgatcctgaccgcccttccggcccacgctctcctgtttggcttccacaggcctggacttctctggcttctctgcccacacactccctgcccccagtgtccctgcccctgccccagcacaggtgacttcatttctgtcctctcagctcagtggactcgctcaacttttgtataagtctccacttggtggcagcagcttgctgatgacttgttttaaaactttcatcctaaataaccttttgatacttgaatatttttaagttttatacatagtttctaatttttttccgaacagatccagatacctaataagatgctggaatgtaatccctggacaatccgtgtcctggcagcatttggtcttcctctaagcgcctggctccgctgttctcaggagtggggttctgaagtctctgggagaacaggatacgtggagggttaggaaggggccaggcctagagacgggagactccctcccggagcaggtggaggcacaggaccattcgctaccccatctgccggcacctgcgggggagcccaggcattctttgtaagccctcctgaccacctggctcaaagaaaacagaagcatggagaccgccaagtattttcaagaaataaccccatgaatattccatcacttttttagaaagaggggcttggggcaggcagaggagagaagggagagcaaactgagagccaagtttccacacagtcctgcaggaggagaggatgcagctgcccagagggaagcaggatcacatttaaggaagtgtgtggggtccctggatgacaccagcacccagtgcggctctgtctggcaaccgctcccaaggtgggaggagtgggtgtcccctgtgtgtcagtgggcagctcctgctgaacccgcagctcactagggagcctgacagtgggtccatgcgcctgacactcctctctgcttgtggacctggcaaggcagggagcagaaaacagagccacttgaaggctttctgtctgcgtctgtgtgcagtgtggatttagttgtgcttttttcttgctgggagagcacagccaccatttacaagcagtgtcaccgtcgtgggtggcgaggacagaacaggagcctctgctctctgtacctatctgggcccggtgggctcccttgtcctggct

SEQ ID NO: 71111 - DNA, 1126 bp, Homo Sapiens
  misc_feature (661)..(695): n is a, c, g, or t
  misc_feature (714)..(731): n is a, c, g, or t
gagatagagcaaggaagagcatacaagtgcagttaacaagatgttcagtcgacacaatgaaggtgatgatcaacaaggaagccggtacagtgtgattccacagattcaaaaagtgtgtgaagttgtagatgggttcatctatgttgcaaatgctgaagctcataaaagacatgaatggcaagatgaattttctcatattatggcaatgacagatccagcctttgggtcttcgggaagaccattgttggttttatcttgtatttctcaaggggatgtaaaaagaatgccctgtttttatttggctcatgagctgcatctgaatcttctaaatcacccatggctggtccaggatacagaggctgaaactctgactggttttttgaatggcattgagtggattcttgaagaagtggaatctaagcgtgcaagatgattctcttttcagatcttgggaactgaaaccatttgaaatttattactaaggtcgtgatgtgaatatttgctcagtcagcccaccttgtcctgcctttttgcagataggctttcatttggacagctataactgctgtgttttttatattatttttactctttaccataaatcaattacaagaaaagagtttcagtcctagtatttagccccaaaatgaacctttaaacnnnnnnnnnnnnnnnnnnnnnnnnnnnnnnnnnnnaaaaatattaaattctggnnnnnnnnnnnnnnnnnnccccatacacaaaaaacacccaccacccccacaggaacaagtcatattccttggtcggcccagcctccggccctccaaaaaaacttccctaaacccatttcctttggggcccccgggccccaattaggggaattggacacttgggtctttaatttgggtttcccaaaggggaaaccccggaggacatggaaaataaggggtgtgtggaaattctccccccccacaataaaataagaagcgccccggcgccgggcacaacccggaatgtgtttttcttgacaacccatatctccccgaatgagagagttctctccaaggggtccctattattcgtggggactcttatttacaaccagcgccgcctcgcccacgagcgagaggccttctacctatcc

SEQ ID NO: 71112 - DNA, 716 bp, Homo Sapiens
  misc_feature (267)..(295): n is a, c, g, or t
  misc_feature (483)..(541): n is a, c, g, or t
gcgttcctgagggccaggtcgggggcaggcatggaggggaggaaaggcgtccctcttggccctccccagagtggctttcctggcaccctggcctgggtgtctggttctgttttcttttcttccccttgtgtttccagtcacctaacttcccttcctcaggctcccccggcccaccctgctcagtgaccccacaggaagcttacacattttctcagaggcctttgtgctcccacctcttctaccctccccctcttctttcccattttnnnnnnnnnnnnnnnnnnnnnnnnnnnnngggcaaggagccccgcggcggcctgggcagcgcctgtgcagacctccctgcaggccgcactgccaactgctgcatttgttgtgttttttaggttgcaattggtgaagttcacactttcattgtaattttagcgtgtggggttttgtcccttttttgttgttgttagctgtgtacagaatgtgtaatcnnnnnnnnnnnnnnnnnnnnnnnnnnnnnnnnnnnnnnnnnnnnnnnnnnnnnnnnnnncttcttggctaattcttggcagggatctttctggaggaaaagctggggccagccagggcaggagaggtgtgaaatctgccacgaggggcctgctgtttgccacccagcccaacttcctgttgctggcccctgccctctgcccttttgcctgtcctcaggccgctggcctcgtgcc

SEQ ID NO: 71113 - DNA, 1779 bp, Homo Sapiens
  misc_feature (208)..(235): n is a, c, g, or t
  misc_feature (421)..(478): n is a, c, g, or t
  misc_feature (1396)..(1592): n is a, c, g, or t
  misc_feature (1594)..(1602): n is a, c, g, or t
  misc_feature (1653)..(1718): n is a, c, g, or t
tggcacgaggccagactggctttatggcacctggctgggtgtctggtctgttttcttttcttccccttgttgtttccagtcacctaacttcccttcctcaggctcccccggccaccctgctcagtgaccccacaggaagcttacacattttctcagaggcctttgtgctcccacctcttctaccctccccctcttctttcccattttnnnnnnnnnnnnnnnnnnnnnnnnnnnnggggcaaggagccccgcggcggctgggcagcgcctgtgcagacctccctgcaggccgcactgccaactgctgcatttgttgtgttttttaggttgcaattggtgaagttcacactttcattgtaattttagcgtgtggggttttgtcccttttttgttgttgttagctgtgtacagaatgtgtaannnnnnnnnnnnnnnnnnnnnnnnnnnnnnnnnnnnnnnnnnnnnnnnnnnnnnnnnncttcttggctaattcttggcagggatctttctggaggaaaagctggggccagccagggcaggagaggtgtgaaatctgccacgaggggcctgctgtttgccacccagcccaacttcctgttgctggcccctgccctctgcccttttgcctgtcctcaggccgctggaacaaaggaaggacagctcattcctcatgggcgatcactccgcatctatagggtcgagcctaggggagcttgagggagggctggggcctccttgtcctggattcccagctcttccccatgccccctccctgagcaccaccggcaccgcctcccaaacagggctgctggtttccgcagccactgctccacctcccccaaatcgtcatggaaagggtggagaatggaggggaaccaggcgtccttggaggcagcttgggagggtgactgtgtagtgtcacccacaagggaggctagggcaatggagcaggccaccagcagcagctgtgcagcatggaactcaggccaggctccgaggctgggggatctgcttggagttttctgccccccaccccaaacttctgtcgaggagcaaggcttgccagcaagtcagaaggatttgaaccgagcagccaatctttccagccctcccctaccgacctctgcctggagacgcagcagcctgtgtcctccagggcctctggtttgttgtattatagtatatttcgctgtggaaaatgtcacgtttagtcaccttggagcccactcacctggtcctgttgttttaccccatcccttctctcgcgcgcctattgatttgtttctgaggagagtacaccgttcactattgtagagtaacccctgtgactcaatattaccatagtgcgatgtcgttttgtgctattttgaacaattaaaagactttttttgaaatnnnnnnnnnnnnnnnnnnnnnnnnnnnnnnnnnnnnnnnnnnnnnnnnnnnnnnnnnnnnnnnnnnnnnnnnnnnnnnnnnnnnnnnnnnnnnnnnnnnnnnnnnnnnnnnnnnnnnnnnnnnnnnnnnnnnnnnnnnnnnnnnnnnnnnnnnnnnnnnnnnnnnnnnnnnnnnnnnnnnnnnnnnnnnnnnnnnnncnnnnnnnnnccgaccccctctcaaaaaaagtttcctggggcttttttgtgggccgggggnnnnnnnnnnnnnnnnnnnnnnnnnnnnnnnnnnnnnnnnnnnnnnnnnnnnnnnnnnnnnnnnnncttgggtgttattcactcacacaaaaaaaagcccgcgggggccgaaccaacggctttattt

SEQ ID NO: 71114 - DNA, 535 bp, Homo Sapiens
  misc_feature (364)..(364): n is a, c, g, or t
  misc_feature (451)..(451): n is a, c, g, or t
  misc_feature (477)..(477): n is a, c, g, or t
  misc_feature (511)..(511): n is a, c, g, or t
  misc_feature (517)..(517): n is a, c, g, or t
atcagaggtacagccatgttggctatgactacacagtctttcactattaaagcaggtacttgtattagtgcagtggagaacaaagactcgggggatgtgggcctagaatcattagcattgaagaccctgctcaggtgttacctcctcaggaaattttaacgagactccttcaataagattctacaactcctctgtgctctccatgctgcattctccaactcctttcgggttacagcgtgtctctgcctgtggactgtaatccccctcaaagtatgaacaggtcttactctcgccatctccactgctaacaccttgctcaacaccatgatcaccacttacctggattagttcaaacagcctccanaccggtctccctgtttctctgctgccctcccatattccctccaggtataatctctatacagcaaccacagtgatcctgtggcaatgntaagcagtgtcacacctctgttccanaccctctagctgtttcctttctcattctgaatangaccanagtgctgagtgtgactac

SEQ ID NO: 71115 - DNA, 813 bp, Homo Sapiens
  misc_feature (537)..(558): n is a, c, g, or t
aattttatcactgattcagagttaaaaagaagactaacttttcaagcaaatgcatctgtaaagatgccttagattagactgtcatgtctcagtgtctatctgtatatattatttgatattcagagaatctaaagcactcgtctactgttttaatgagatttaacagcttttaacagtgagtttcgtttgtaaactgcttgaagtctgtggcattcaggcacacatctggctggccggctgggtctcctcccgggctcagtgggcctggggcctctctgacgtggtgcctgctggagggaggctcgtcgtcaccagctgactgctggtccggcttctgaccggcctttgtcctggctccgtagcagaacactgtaaaagtgcccgcgtctttgcagtagttgcagatttcagtcgtcgtgttacttgtgcacaaacagaagctgggtcttacccgcagcacgagtgtctcgggctgcccggagtcgcccgggagcaggtgctgcagccagagttacgcgggggccacgcgggccggcnnnnnnnnnnnnnnnnnnnnnnaacctgtgtttcacgtgactcagcagtgcccgccgccgtcaccagctatgcattcactccgtttccagtgagcagatgtcttgcttggaaagtggacctgtgtctgtgtctgtcctgagaacttaccagcagaaatcctcatttctgtgctacggatttaccaaaaattgtcaagtctttttcagtttaacagttcctttaaatgtgtagtatttgaggaaaaaaatcaataaacagttgatctcgtgcataaaa

SEQ ID NO: 71116 - DNA, 654 bp, Homo Sapiens
caagcaaaagggctatttcttcatagaaggggagctgtactgcgaaacccacgcaagagcccgcacaaagcccccagagggctatgacacggtcactctgtatcccaaagcttaagtctctgcaggcgtggcacgcacgcacgcacccacccacgcgcacttacacgagaagacattcatggctttgggcagaaggattgtgcagattgtcaactccaaatctaaagtcaaggctttagacctttatcctattgtttattgaggaaaaggaatgggaggcaaatgcctgctatgtgaaaaaaacatacacttagctatgttttgcaactctttttggggctagcaataatgatatttaaagcaataattttttgtatgtcatactccacaatttacatgtatattacagccatcaaacacataaacatcaagatatttgaaggactctaattgtctttccttgacaagttgattttgcaattgtggtaaatagcaaataacaatcttgtattctaacataatctgcagttgtctgtatgtgttttaactattacagtgcatgttagggagaaattccctgaatttctttagttttgtattcaaacaattatgccactcgatgcaacaaacataataaatacataaaagatttaa

SEQ ID NO: 71117 - DNA, 895 bp, Homo Sapiens
  misc_feature (1)..(1): n is a, c, g, or t
ncaaagaacaaaaattataagcataaaaactcaggtatcagaaagactcaaaaggctgtttttcactttgttcagattttgtttccaggcattaagtgtgtcatacagttgttgccactgctgttttccaaatgtccgatgtgtgctatgactgacaactacttttctctgggtctgatcaattttgcagtagaccattttagttcttacggcgtcaataacaaatgcttcaacatcatcagctccaatctgaagttcttgctgcattgtgtcaaaagaaatttccttattttctactgccattcccataaaagtaagtagtctcatttttgccatattctgttcatgtaacaggccaagtgaatcaatgaagtctttattattctgataaaacttgacatatgatgccaatttagcactcacaaaaatggttaaaagatcatgaataagctcgccttccaaaaacttgactggttttaaagtaagaaggtggtcaaaaagaaatgcatttggatctttcaatgctcgtacaatacaccttaattagagaacaaaaatgtaagctcagggttttgaaatcctggcttttcattgagtttttgcagatcataaaatatacttaattcggcaaaatatctaacagtccaaaacatataaacaacattaaaaaagctacaggattgggttaagacaggccaacacatttatcaggttcatctgttttaacaaaatgaaatatattaattgtagataaaaacatagctggagagaaagcaccaaggtaatcaaatagtaagcagcagcagaaccacatgccaagacactaagtgcttcacttgccttacatctcatttattcctcacaacaacctaggagacaaacagggagcggccgc

SEQ ID NO: 71118 - DNA, 1701 bp, Homo Sapiens
  misc_feature (45)..(45): n is a, c, g, or t
  misc_feature (88)..(88): n is a, c, g, or t
  misc_feature (93)..(93): n is a, c, g, or t
  misc_feature (122)..(122): n is a, c, g, or t
  misc_feature (203)..(203): n is a, c, g, or t
  misc_feature (295)..(295): n is a, c, g, or t
  misc_feature (1033)..(1183): n is a, c, g, or t
  misc_feature (1185)..(1186): n is a, c, g, or t
  misc_feature (1188)..(1192): n is a, c, g, or t
  misc_feature (1207)..(1217): n is a, c, g, or t
  misc_feature (1262)..(1352): n is a, c, g, or t
  misc_feature (1360)..(1452): n is a, c, g, or t
  misc_feature (1484)..(1499): n is a, c, g, or t
  misc_feature (1517)..(1529): n is a, c, g, or t
  misc_feature (1550)..(1590): n is a, c, g, or t
ggatcggagtgatcctgtgattccccaatatgaactgtgtgttgntgagagatgtaagatgtgaagttgtgacagttgttcctactcngatcntgaccagacagcagagctttgatgaagcntatggaaagctgtcaattcgcgagtgaacgccgttctgagatgcagtgtagcaccctttccacggatggatagatactccntgtagatacacagtgtatgcagcctataaaagtgcagcatctgtgggccatccagacatcccaactagctgatcaagtagaaaatgattctngactgaatctcaccactgaaaaaaagcacacccttttaagactactttatgaggcacttgtggattgtaagaagagtgatgctgcttcaaaagtcatggtggaattgctcggaagttacacagaggacaatgcttcccaggctcgagttgatgcccacaggtgtattgtacgagcattgaaagatccaaatgcatttctttttgaccaccttcttactttaaaaccagtcaagtttttggaaggcgagcttattcatgatcttttaaccatttttgtgagtgctaaattggcatcatatgtcaagttttatcagaataataaagacttcattgattcacttggcctgttacatgaacagaatatggcaaaaatgagactacttacttttatgggaatggcagtagaaaataaggaaatttcttttgacacaatgcagcaagaacttcagattggagctgatgatgttgaagcatttgttattgacgccgtaagaactaaaatggtctactgcaaaattgatcagacccagagaaaagtagttgtcagtcatagcacacatcggacatttggaaaacagcagtggcaacaactgtatgacacacttaatgcctggaaacaaaatctgaacaaagtgaaaaacagccttttgagtctttctgatacctgagtttttatgcttataatttttgttctttgaaaaaaaagccctaaatcatagtaaaacattataaactagnnnnnnnnnnnnnnnnnnnnnnnnnnnnnnnnnnnnnnnnnnnnnnnnnnnnnnnnnnnnnnnnnnnnnnnnnnnnnnnnnnnnnnnnnnnnnnnnnnnnnnnnnnnnnnnnnnnnnnnnnnnnnnnnnnnnnnnnnnnnnnnnnnnnnnnannannnnngagaagtgcgcccgnnnnnnnnnnnacaaaaaaattttttacaacctttgtgggggggccgggccccccnnnnnnnnnnnnnnnnnnnnnnnnnnnnnnnnnnnnnnnnnnnnnnnnnnnnnnnnnnnnnnnnnnnnnnnnnnnnnnnnnnnnnnnnnnnaccgcccnnnnnnnnnnnnnnnnnnnnnnnnnnnnnnnnnnnnnnnnnnnnnnnnnnnnnnnnnnnnnnnnnnnnnnnnnnnnnnnnnnnnnnnnnnnnnccccccggcggcttattaaaaataaaaatttnnnnnnnnnnnnnnnngccgctttattggggagnnnnnnnnnnnnnaaaaaatattaaaaacatctnnnnnnnnnnnnnnnnnnnnnnnnnnnnnnnnnnnnnnnnnagtgagaaaaacacttgtaacacccgcggcgggaaacacccaccccaccttgtgggcgccctgtgggaaaaataacatactcgccccccccgggggaaaaaacacgggcgg

SEQ ID NO: 71119 - DNA, 957 bp, Homo Sapiens
  misc_feature (880)..(914): n is a, c, g, or t
taatattcgataaacctgacatatgatccaattagcactcacagaatggttaaagatcatgatagctgcgccttccaaaacttgactggtttaaaagttaagaaggtggtcaaaaggaaatgcatttggatctttcaaatgctcgtacaatacacctgtggcatcaactcgagcctgggaagcattgtccctctgtgtaactttccgagcaattccagccaggacttttgaaagcagcatcactcttctgtacaatgccacaagtgcctcataaagtagtctcaaaaggggtgtgctttttttcagtggtgagattccagtcagaaatccattttctaacttgatccagctcagttgggatgtactggatggccccacaagatgctgccactttaataaggctgcaatacactgtgtatcttacaggagtattcttatccatcccgtggaaaaggttgcttaacaactgcagtctcagagacgggcgttcaccttcgcgaaatttgaccagcttttcacataggctttcaatcaaagcttcttgcttgtctggttccaggatcaagagtagggataccacactgttcatcacactttcaacatctttatcatcctccttcagacacacatcacaggcttcaataatttgagctaaatcaacatgaagtccaccttccgagttctcttctgaaatctcagctcctttagatttcagataagcacgaagctcagcagcctgatcttcttcactgatgtcgatgaaggccgggacgctcatggtgcaggcccgggcacagcggacactccactcgcaagaccacgccgaccccccggccgtaatggccgaattcccgggcatatgtccggtaccgtcgactgnnnnnnnnnnnnnnnnnnnnnnnnnnnnnnnnnnncgccgcttcctcgctcatagacttcgctgcgctcggtcgttcc

SEQ ID NO: 71120 - DNA, 1306 bp, Homo Sapiens
  misc_feature (41)..(75): n is a, c, g, or t
acgaccgagcgcagcgagtcatttagcgaggaagcggccgnnnnnnnnnnnnnnnnnnnnnnnnnnnnnnnnnnncagtcgacggtaccggacatatgcccgggaattcggccattacggccggggcttgcgagtggagtgtccgctgtgcccgggcctgcaccatgagcgtcccggccttcatcgacatcagtgaagaagatcaggctgctgagcttcgtgcttatctgaaatctaaaggagctgagatttcagaagagaactcggaaggtggacttcatgttgatttagctcaaattattgaagcctgtgatgtgtgtctgaaggaggatgataaagatgttgaaagtgtgatgaacagtgtggtatccctactcttgatcctggaaccagacaagcaagaagctttgattgaaagcctatgtgaaaagctggtcaaatttcgcgaaggtgaacgcccgtctctgagactgcagttgttaagcaaccttttccacgggatggataagaatactcctgtaagatacacagtgtattgcagccttattaaagtggcagcatcttgtggggccatccagtacatcccaactgagctggatcaagttagaaaatggatttctgactggaatctcaccactgaaaaaaagcacacccttttaagactactttatgaggcacttgtggattgtaagaagagtgatgctgcttcaaaagtcatggtggaattgctcggaagttacacagaggacaatgcttcccaggctcgagttgatgcccacaggtgtattgtacgagcattgaaagatccaaatgcatttctttttgaccaccttcttactttaaaaccagtcaagtttttggaaggcgagcttattcatgatcttttaaccatttttgtgagtgctaaattggcatcatatgtcaagttttatcagaataataaagacttcattgattcacttggcctgttacatgaaccagaatatggcaaaaatgagactaattacctttatgggaatggcagtagaaaataaggaaatttcttttgacacaatgcagcaagaacttcagattggagctgatgatgttgaagcatttgttattgacgccgtaagaactaaaatggtctactgcaaaattgatcagacccagagaaaaagtagttgtcagtcatagcacacatcggacatttggaaaacagcaagtggcaacaactgtatgacacacttaatgcctggaaacaaaatctgaacaaagtgaaaaacagccttttgagtctttctgatacatagcgttctttatgctt

SEQ ID NO: 71121 - DNA, 891 bp, Homo Sapiens
  misc_feature (91)..(125): n is a, c, g, or t
aaaactttgcataatcgactcactatagggcgctagggcgtattaccgaacgacgagcgcagcgagctagttgagcgaggaagcggccggnnnnnnnnnnnnnnnnnnnnnnnnnnnnnnnnnnncagtcgacggtaccggacatatgcccgggaattcggccattacggccgggggacttcatgttgatttagctcaaattattgaagcctgtgatgtgtgtctgaaggaggatgataaagatgttgaaagtgtgatgaacagtgtggtatccctactcttgatcctggaaccagacaagcaagaagctttgattgaaagcctatgtgaaaagctggtcaaatttcgcgaaggtgaacgcccgtctctgagactgcagttgttaagcaaccttttccacgggatggataagaatactcctgtaagatacacagtgtattgcagccttattaaagtggcagcatcttgtggggccatccagtacatcccaactgagctggatcaagttagaaaatggatttctgactggaatctcaccactgaaaaaaagcacacccttttaagactactttatgaggcactttgtggattgtacagaagagctgatgcctgcttcaaacagttcatggtggcacattgctcggaagtttacacagaggacaattgcttcccaagctcgagttgatgcccacaggtgtattgtacgaggcattgaaagaatccaaattgcaatttctttttgaccaaccttcttactttaaaaaacccagtcaacgtttttggaaggcggagcttattcatgatcttttaaccatttttgtgagtgctaaattggcatcatatgtcaggtttatcagaataatcaagacttcatgatccctggccgtactg

SEQ ID NO: 71122 - DNA, 1565 bp, Homo Sapiens
  misc_feature (76)..(110): n is a, c, g, or t
catgaattaatgatctatgggcgcccgcttatgcgaacgacgagcgcagcgagtctgtgagcgaggaagcggcggnnnnnnnnnnnnnnnnnnnnnnnnnnnnnnnnnnncagtcgacggtaccggacatatgcccgggaattcggccattacggccgggcaccttcgctcgcagttgttcgcagtttactcgcacaccagtttcccccaccgcgctttggattagtgtgatctcagctcaaggcaaaggtgggatatcatggcatctatctgggttggacaccgaggaacagtaagagattatccagactttagcccatcagtggatgctgaagctattcagaaagcaatcagaggaattggaactgatgagaaaatgctcatcagcattctgactgagaggtcaaatgcacagcggcagctgattgttaaggaatatcaagcagcatatggaaaggagctgaaagatgacttgaagggtgatctctctggccactttgagcatctcatggtggccctagtgactccaccagcagtctttgatgcaaagcagctaaagaaatccatgaagggcgcgggaacaaacgaagatgccttgattgaaatcttaactaccaggacaagcaggcaaatgaaggatatctctcaagcctattatacagtatacaagaagagtcttggagatgacattagttccgaaacatctggtgacttccggaaagctctgttgactttggcagatggcagaagagatgaaagtctgaaagtggatgagcatctggccaaacaagatgcccagattctctataaagctggtgagaacagatggggcacggatgaagacaaattcactgagatcctgtgtttaaggagctttcctcaattaaaactaacatttgatgaatacagaaatatcagccaaaaggacattgtggacagcataaaaggagaattatctgggcattttgaagacttactgttggccatagttaattgtgtgaggaacacgccggcctttttagccgaaagactgcatcgagccttgaagggtattggaactgatgagtttactctgaaccgaataatggtgtccagatcagaaattgaccttttggacattcgaacagagttcaagaagcattatggctattccctatattcagcaattaaatcggatacttctggagactatgaaatcacactcttaaaaatctgtggtggagatgactgaaccaagaagataatctccaaaggtccacgatgggcttttccaacagctccaccttacttcttctcatactatttaagagaacaagcaaatataaacagcaacttgtgttcctaacaggaattttcattgttctataacaacaacaacaaaagcgattattattttagagcatctcatttataatgtagcagctcataaatgaaattgaaaatggtattaaagatctgcaactactatccaacttatatttctgctttcaaagttaagaatctttatagttctaatccattaaatataaagcaagataataaaaattgttgcttttgttaaaagt

SEQ ID NO: 71123 - DNA, 975 bp, Homo Sapiens
  misc_feature (49)..(91): n is a, c, g, or t
  misc_feature (95)..(129): n is a, c, g, or t
acaccgccccccgctgtaacactcactatagggcgctagcttcttattnnnnnnnnnnnnnnnnnnnnnnnnnnnnnnnnnnnnnnnnnnnccgnnnnnnnnnnnnnnnnnnnnnnnnnnnnnnnnnnncagtcgacggtaccggacatatgcccgggaattcggccattacggccggggagcgcggagcacctgcgcccgcggctgacaccttcgctcgcagtttgttcgcagtttactcgcacaccagtttcccccaccgcgctttggattagtgtgatctcagctcaaggcaaaggtgggatatcatggcatctatctgggttggacaccgaggaacagtaagagattatccagactttagcccatcagtggatgctgaagctattcagaaagcaatcagaggaattggaactgatgagaaaatgctcatcagcattctgactgagaggtcaaatgcacagcggcagctgattgttaaggaatatcaagcagcatatggaaaggagctgaaagatgacttgaagggtgatctctctggccactttgagcatctcatggtggccctagtgactccaccagcagtctttgatgcaaagcagctaaagaaatccatgaagggcgcgggaacaaacgaagatgccttgattgaaatcttaactaccaggacaagcaggcaaatgaaggatatctctcaagcctattatacagtatacaagaagagtcttggagatgacattagttccgaaacatcttggtgacttccggaaagctctgttgactttggcagatgggcagaagagatgaaagtctgaaagtggatgagcatctgggccaaacaagatgcccagattctctataaagctggtgagaacagatggggcacgggatgaagacaaattcactgagatcctgtgtttaaggagctttcctcaattaaaacttaaccttttgatgaatacggaaaatatcagc

SEQ ID NO: 71124 - DNA, 981 bp, Homo Sapiens
  misc_feature (79)..(113): n is a, c, g, or t
aagactatatacctcatatggcgcatccttattagcgaacgaccgagcgcagcgaagtatatagcgaggaagcggccgnnnnnnnnnnnnnnnnnnnnnnnnnnnnnnnnnnncagtcgacggtaccggacatatgcccgggaattcggccattacggccggggagcgcggagcactctgcgcccgcggatgacaccttcgctcgcagtttgttcgcagtttactcgaacaccagtttcccccaacgcgctttggattagtgtgatctcagctcaatggcaaaggtgggatatcatggcatctatctggagttggacaccgaggaacagtaagagattatccagactttgagcccatcagtggatgctgaagctattcagaaagcaagtcagaggaattggaacctgatgacgaaaatgctcagtcagcattctgactgagaggtcaaatgcacagcggcagctgattgttaaggaatatcaagcagcatatggaacggagctgaaagatgacttgaagggtgatctctctggccactttgagcatctcatggtggccctagtgactccaaccagcagtctttgatgcaaagcagctaaagaaatccatgaagggcgcgggaacaaacgaagatgccttgattgaaatcttaactaccaggacaagcaggcaaactgacggatatctctcaagcctattatacagtatacaagaagagtcttggagatgacattagttccgaaacatctggtgacttccggaaagctctgttgaccctcggcagatggcagacagcagcatgaccgtctgaaagtggatgaagcatctggccaaacaagatgcccagattctctataaaagctggtgagaaccagatggggcacggcttgcaagacaattccactgaaatcctgtgttaagggcgctttcctcgattaaaaactaaactttgatgaatccggaaatataggccacaggact

SEQ ID NO: 71125 - DNA, 320 bp, Homo Sapiens
gggcatgattacccatgatttttatagttgaagaacctaagacacagagaccaaggcccatgagctcatagggctgaggcaggatttggaatcaggccatgtcttctccagagcccacatccatcctttctctatattgcctcccacagatgtgctaaaatttatttaactaatcctttatcctctatttgtgttgtctcccattttttattattacaatattactgtggtgaacatgcttaaaaatacattccttggatatctgacaacgtgtttctgaaaaacagattttcataagtaataataaaaataataataaa

SEQ ID NO: 71126 - DNA, 556 bp, Homo Sapiens
tcactacatagatatataattacactatgatagacagaattctagagtgattctcaataatccatgccttggtataatcctctcccccattgagtgtgggtgggacatgtaacctgcttctaaccaacagaatatggcaaaagtgatgggatcatctctcccatattatgttatgttatataacaaaagtgaagagaagttgcagatatacataaggtttctaatcagctgactttgagttaatcaaagagatcccctgggtgggcctgacctaatcagactagtcctttaaaagagagtgaaccagtcagagactctctctcctattagccttaaataagcaagctgccatgagctctacggctgcaaggaaataagttttgtgaacaaccatgtgatcttggaagaagcatctgaacctcagataaaagcccagccccagccaacgccttgcttgcagctttgtgaaactctgagcagaggacccagctaaatcacgtttggactcctgacccacagaaactttcagataataaatgtatgctgttttaaatct

SEQ ID NO: 71127 - DNA, 1562 bp, Homo Sapiens
aatgacacttggtaaaaagcaggctggtacggtccggaattccgggatatcgtcgacccacgcgtcgcgcttatttgagctcctggaaaaggaaattctttattatcggaagacaataggctataaggttccaaggaatcctgatatcccaaatccagctctggctcaaagagaagagcaaaaaaaagattgatggagctgaacctcttacaccagaagagactgaagaaaaggaaaaacttctcacacaaggtttcacaaactggactaaacgagattttaaccagtttattaaagctaatgagaaatatggaagagatgacattgataacatagctcgagaggtagagggcaaatcccctgaggaggtcatggagtattcagctgtatttgggaacgttgcaatgaattacaggacattgagaaaattatggctcaaattgaacgtggagaagcaagaattcaacgaaggatcagtatcaagaaagccctggatgccaaaattgcaagatacaaggctccatttcatcagttgcgcattcagtatggaaccagcaaaggaaagaactatactgaggaagaagatagattcttgatttgtatgttacacaaaatgggctttgatagagaaaatgtatatgaagaattaagacagtgtgtacgaaatgctccccagtttagatttgactggtttatcaaagtctaggactgccatggaattccagagacgctgtaacactctgatttcattgattgagaaagaaaatatggaaattgaggaaagagagagagcagaaaagaagaaacgggcaactaaaactccaatgtcacagaaaagaaaagcagagtcagctactgagagctctggaaagaaggatgtcaagaaggtgaaatcctaaagcctagaaataaagttttaaatgggaaactgctattttcttgttcccatcttcaaatgctaattgccagttccagtgtattcatggtactctaagaaaaatctctttggttttgatttcttgcatattttatatattttacaatgctttctacctgaaatgtgtagctttatattttatggcattctagtatttttgtgtactgtattttgtgcatttcatgtcttcatcaaaatcctctcagtccttgttcttttgaagcttgtgctgaggttttagcttttctatgttttatatgccgctgctttgaaagagaacctagattctatagttgtattattgttgtttcatactttaaatttatatggctgtggaaaaacgaattaaaatgttttgaggagaaagaccttttttcacttcctttgttgctttcttttctaattgagtctgggcttgtttgtgttactgcatactgtgattagcataataattgtttctttgaggtcatctaaatatttttttcctaaaggaataaagggtgaggaaagaaaaatattaaaaaagctaatatttgatactgtgcttgctgtcagtatgcattacatttaaattattctctattcaagtgggaaaatataataaagaaatgtctataagaaattt

SEQ ID NO: 71128 - DNA, 1297 bp, Homo Sapiens
gggtgaagcaaggaagatatacatgaaaattttaaaaatacatatccgctgacttcatggaatggacatcctgtataagcactgaaaaacaacaacacaataacactaaaattttaggcactcttaaatgatctgcctctaaaagcgttggatgtagcattatgcaattaggtttttccttatttgcttcattgtactacctgtgtatatagtttttaccttttatgtagcacataaactttggggaagggagggcagggtggggctgaggaactgacgtggagcggggtatgaagagcttgctttgatttacagcaagtagataaatatttgacttgcatgaagagaagcaatttaggggaagggtttgaattgttttctttaaagatgtaatgtccctttcagagacagctgatacttcatttaaaaaaatcacaaaaatttgaacactggctaaagataattgctatttatttttacaagaagtttattctcatttgggagatctggtgatctcccaagctatctaaagtttgttagatagctgcatgtggcttttttaaaaaagcaacagaaacctatcctcactgccctccccagtctctcttaaagttggaatttaccagttaattactcagcagaatggtgatcactccaggtagtttggggcaaaaatccgaggtgcttgggagttttgaatgttaagaattgaccatctgcttttattaaatttgttgacaaaattttctcattttcttttcacttcgggctgtgtaaacacagtcaaaataattctaaatccctcgatatttttaaagatctgtaagtaacttcacattaaaaaatgaaatattttttaatttaaagcttactctgtccatttatccacaggaaagtgttatttttaaaggaaggttcatgtagagaaaagcacacttgtaggataagtgaaatggatactacatctttaaacagtatttcattgcctgtgtatggaaaaaccatttgaagtgtacctgtgtacataactctgtaaaaacactgaaaaattatactaacttatttatgttaaaagattttttttaatctagacaatatacaagccaaagtggcatgttttgtgcatttgtaaatgctgtgttgggtagaataggttttcccctcttttgttaaataatatggctatgcttaaaaggttgcatactgagccaagtataattttttgtaatgtgtgaaaaagatgccaattattgttacacattaagtaatcaataaagaaaacttccatagctaaaaa

SEQ ID NO: 71129 - DNA, 903 bp, Homo Sapiens
  misc_feature (829)..(852): n is a, c, g, or t
  misc_feature (884)..(884): n is a, c, g, or t
gagcagcaaatggcagagttcaaggccagcctgtccccggtcatctacgacagcctaaccggcctcatgactagcctggttgccgtcgagttggagaaagtggtgctgaaatccacctttaaccggctgggtggtctgcagtttgacaaggagctgaggtcactcattgcctaccttaccacggtgaccacctggaccatccgagacaagtttgcccggctctcccagatggccaccatcctcaatctggagcgggtgaccgagatcctcgattactggggacccaattccggcccattgacgtggcgcctcacccctgctgaagtgcgccaggtgctggccctgcggatagacttccgcagtgaagatatcaagaggctgcgcctgtagctgcctggatgagcacacctggctcatcacacttgcaggcctgttccctaaggggccccagccaaggagctgagcgaggctgtcgggcttgggggagatctgacagcccagacctttctacggctggcagcagagaaacaaagtctggacccactccatgctctgccctcagacctggccaggtgatgctctgggggcagcatctccccaccgagagaagcgggctcctaatgaggtgggaaagccacggcaggcagcgagcagcccaggccagctttctgcatggatggtcagtctcttgccctcaaacactacagcaaacaagctacccctgccagtcctagacaacttgggtacatctggggacctagcagttaggcttgactttgaggagaggctgtgatgtttatgatccctgaataaagctactccttggagnnnnnnnnnnnnnnnnnnnnnnnnacctgagcaggcggccgcaagcttattccctnttagtgagggttaatttta

SEQ ID NO: 71130 - DNA, 1605 bp, Homo Sapiens
  misc_feature (652)..(652): n is a, c, g, or t
  misc_feature (808)..(808): n is a, c, g, or t
  misc_feature (888)..(888): n is a, c, g, or t
  misc_feature (962)..(962): n is a, c, g, or t
ccgcgtcaacggaggcggaacggcggaccccgtaccctggcagcatcggagcaccggcgggtgaaggcaaggtccctggactggtcatatacctcttgtggccctggcagaatcaagatgaggccctgtcatgcctccccagtgaggcctacagtctgagcagacagcatggccgtgccactggcagtgaacaccatgtctgcaggaggtggccgggcctttgcttgatggtatggtgtatgctctggggggaatgggccctgacacgggcccccaggcccaggtacgtgtgtatgagccccgtcgggactgctggctttcgctaccctccatgcccagaccctgctatggggcctccaccttcctgcacggtgaacaagatctatgtcctgtgggggccgccagggcaagctcccggtgactgcttttgaagcctttgatctggaggcccgtacatggacccggcatccaagcctacccagccgtcgggcctttgctggctgcgccatggctgaaggcagcgtctttagcctgggtggcctgcagcagcctgggcccagaacttctactctcgcccacactttgtcaacactgtggagatgtttgacctggagcatgggtcctggaccaaattgccccgcagcctgcgcantgagggataagagggcagactttgtggtagggtcccttgggggccacattgtagccacgggggccttggaaaccagccatgtcctttgggctcttggggagagctttagcttgcacggcggcgctgggaggcatagcctgccatgccactgcccgntgctcctgctctagtctgcaggctgggcccggctgtttgttattgggggtgtggcccagggcccagtcaagccgtggagnactgtgtctgcgtgatggggtctgaaggcttggtgggagctgtccactggagcagctcattgccagaagcagcntatttctatgggctccttttgctgctgaggacactcactgtggctctgtgggatgagagaggcatgggggtgagcacttgaaacactgccttggggccttgggttaggggagcctttgtctttagtgcaggacacacatatgcttacacctacctttatcaccattcgttcatgaatcatgcctagctccatccttgccctgggacctactaggccttccatccaactgggaaatggggagaagcaaagctggcctcatgctcttcagggtcagttcctatctggagttgaccaggcctaccccagttgccattcctgaaaaatctcagctgccaggctgcctttagggtccctgtagacccaggagagttgagagggtgggggacacagagagaatagagaggatgtgggaactgccagagggccggagcgcaggagttcaagtggaggaatgctggctttgagccctctacactgctggttgtatgaccttggacaagtcacttcacctctctgtgcctcagcatcctcatctataaatggggatctctgaaaccttcctaccctacctacctcacagggctgttgtgaggacccagggagtttggatgtggaagtaaaagtgctgctaaaacctaagaaa

SEQ ID NO: 71131 - DNA, 1203 bp, Homo Sapiens
ttccgggatgagcccgacttcagccccagtcagatcccgcgtcaacggaggcggaacggcggaccccgtaccctggcagcatcggagcaccggcgggtgaaggcaaggtccctggactggtcatatacctcttgtggccctggcagaatcaagatgaggccctgtcatgcctccccagtgaggcctacagtctgagcagacagcatggcctgccactggcagtgaacaccatgtctgcaggaggtggccgggcctttgcttggcaagtgttcccccccatgcccacttgccgggtctatggcacagtggcacaccaagatgggcacctgctggtgttggggggttgtggccgggctggactgcccctggacactgctgagacactggacatggcctcgcacacatggctggcactggcacccctgcccactgcccgggctggtgcagctgcggtagttctgggcaagcaggtgctagtggtgggtggtgtggatgaggtccagagcccggtagctgctgtagaggccttcctgatggatgagggccgctgggagcgtcgggccaccctccctcaagcagccatgggggttgcaactgtggagagagatggtatggtgtatgctctggggggaatgggcccctgacacgggccccccaggcccaggtacgtgtgtatgagccccgtcgggactgctggctttcgctaccctccatgccccacaccctgctatggggcctccaccttcctgcacgggaacaagatctatgtccctgggggggcccgcccgggcaagctccccggtgactgctttttgaaaccctttgatcttggaagccccgtaaattgcgaccccggcattccaagcctaacccagacgaacagagccttttgcttagacgctccaacggctataaagataaacccttacttaccccagggctgggcctttaccccaaaccttggtctccaacaaacttccaaccttctcccatcacacctttttacatccctcttctaaacattcctcgcccccctatcatccgactcaacacacccgtttcttctatacgacagctcccccgccaccttcttgcttcaaacattctaacttcatattccgacctacatgaatctagaaactagaactttcccatatcttatgaacagtatcttcgcgcttacgtctctaccctccccccgtt

SEQ ID NO: 71132 - DNA, 893 bp, Homo Sapiens
cagtcgacggtaccggacatatgcccgggaattcggccattacggccgggggaggctcgtgggcggagccaagcgccgccatgtccgccgccctgctgcggcggggcctggagctgctggcggcgtccgaggccccccgggaccctccaggtcaggccaagccgagaggggctccggtgaaacggccccggaagacgaaggcaattcaggcccagaaactgcggaactcggccaagggaaaggtgcccaagtcggcactggacgagtaccggaagcgagagtgtcgagaccacctcagagtaaacctgaagtttctgaccaggacgagaagcaccgtggctgagtctgtgagccagcagattttgcgccagaaccggggccgcaaggcctgtgaccggcctgtggccaagaccaagaagaagaaggctgagggcaccgtgttcaccgaggaagacttccagaagttccagcaggaatacttcggcagctaggctccctggagggcacggtgaagaggccttcaagccctgcagcctccgactcctgctggctccaggaaccggccgtgccgcgcggccagcagatggcgatgcaggaccagcctggctcgaggaagccgcggagctgagccgagtggaggctggaatggagctggtgggccggaagtcctggggaggatttacacacagaccggagctggcttccgcaggcctgggcagagcatctgcacctgccggaaaggaacgtatctgttttgtttgcttttgcccaggtggggcctctgggctgtttgctgtggagcaaggctaattcctgagcccttggggacgacagctccaggagtaggaagaagggtgggcttccaagttacaataaatgtgaacccaaaaaaa

SEQ ID NO: 71133 - DNA, 493 bp, Homo Sapiens
  misc_feature (113)..(140): n is a, c, g, or t
ggaagtggagaaaaagttactcaagacagctttccatcccgtgcccaggcggccccagaaccatctggacgccgccctggtcttatcggctctctcctcatcctagttctttnnnnnnnnnnnnnnnnnnnnnnnnnnnntttttttaatcgttgtaataattgtataaaaaaaatcgctctgtatagttacaacttgtaagcatgtccgtgtataaatacctaaaagcaaaactaaacaaagaaagtaagaaaaagaaataaaaccagtcctcctcagccctccccaagtcgcttctgtggcaccccgcattcgctgtgaggtttgtttgtccggttgattttggggggtggagtttcagtgagaataaacgtgtctgcctttgtgtgtgtgtatatatacagagaaatgtacatatgtgtgaaccaaattgtacgagaaagtatctatttttggctaaataaatgagctgctgccactttgtctataaaaa

SEQ ID NO: 71134 - DNA, 564 bp, Homo Sapiens
  misc_feature (201)..(262): n is a, c, g, or t
gcggccgccgccgcccaaggctacggcgccttcctgccctacgccgcggagctgcccatcttcccgcagctgatcgctgtagtgccttggaagtggagaaaaagttactcaagacagctttccagcccgtgcccaggcggccccagaaccatctggacgccgccctggtcttatcggctctctcctcatcctagttctttnnnnnnnnnnnnnnnnnnnnnnnnnnnnnnnnnnnnnnnnnnnnnnnnnnnnnnnnnnnnnncgctctgtatagttacaacttgtaagcatgtccgtgtataaatacctaaaagcaaaactatacaaagaaagtaagaaaaagaaataaaaccagtcctcctcagccctccccaggtcgcttctgtggcacccaccattcgctgtgaggtttgtttgtccggttgattttggggggtggagtttcagtgagaataaacgtgtctgcctttgtgtgtgtgtatatatacagagaaatgtacatatgtgtgaaccaaattgtacgagaaagtatctatttttggctaaataaatgagctgctgcca

SEQ ID NO: 71135 - DNA, 478 bp, Homo Sapiens
  misc_feature (103)..(128): n is a, c, g, or t
  misc_feature (213)..(254): n is a, c, g, or t
aaaaagttactcaagacagctttccatcccgtgcccaggcggccccagaaccatttggacgccgccctggtcttatcggctctctcttcatcctagttctttnnnnnnnnnnnnnnnnnnnnnnnnnnctttttttaatcgttgtaataattgtataaaaaaaatcgctctgtatagttacaacttgtaagcatgtccgtgtataaatacctnnnnnnnnnnnnnnnnnnnnnnnnnnnnnnnnnnnnnnnnnnccagtcctcctcagccctccccaagtcgcttctgtggcaccccgcattcgctgtgaggtttgtttgtccggttgattttggggggtggagtttcagtgagaataaacgtgtctgcctttgtgtgtgtgtatatatacagagaaatgtacatatgtgtgaaccaaattgtacgagaaagtatctatttttggctaaataaatgagctgctgccactttgactata

SEQ ID NO: 71136 - DNA, 699 bp, Homo Sapiens
  misc_feature (70)..(70): n is a, c, g, or t
  misc_feature (100)..(100): n is a, c, g, or t
  misc_feature (331)..(355): n is a, c, g, or t
  misc_feature (431)..(483): n is a, c, g, or t
agactgtctcaagcgccgctgggcaagtttcccggcttgggacaaaccgccgttttcagggcccacgccncgcccccgcccgcaccccgctcttccctgntgggctctgcccctccgcacctgctgggacttcccgaagccgcgggccacccggctgccaccgccgccttcgctcggccaccggagcccgaaggcggaacagatcgctgtagtgccttggaagtggagaaaaagttactcaagacagctttccagcccgtgcccaggcggccccagaaccatttggacgccgccctggtcttatcggctctctcctcatcctagttctttnnnnnnnnnnnnnnnnnnnnnnnnnctttttttaatcgttgtaataattgtataaaaaaaatcgctctgtatagttccaccttgtaagcatgtccgtgtannnnnnnnnnnnnnnnnnnnnnnnnnnnnnnnnnnnnnnnnnnnnnnnnnnnnagtcctcctcagccctccccaagtcgcttttgtggcaccccgcattcgctgtgaggtttgtttgtccggttgattttggggggtggagtttcagtgagaataaacgtgtctgcctttgtgtgtgtgtatatatacaaagaaatgtacatatgtgtgaaccaaattgtacgagaaagtatctatttttggctaaataaatgagcagctgccactttg

SEQ ID NO: 71137 - DNA, 863 bp, Homo Sapiens
  misc_feature (166)..(338): n is a, c, g, or t
atggcatgtgaatgatactttaatagggctgttatttttaaaatgcaaatgctgattcagtagatcccagctggggctcaagattctgcatttctgacaagctcccagttgtggttcatgctgccgggcttgggaccagctctgagcagcgagctcttgcactgcnnnnnnnnnnnnnnnnnnnnnnnnnnnnnnnnnnnnnnnnnnnnnnnnnnnnnnnnnnnnnnnnnnnnnnnnnnnnnnnnnnnnnnnnnnnnnnnnnnnnnnnnnnnnnnnnnnnnnnnnnnnnnnnnnnnnnnnnnnnnnnnnnnnnnnnnnnnnnnnnnnnnnnnnnnnnncctcttgtaccctggacactttcccctttccccttacctgcctacgcaggctctcaggcatttgacccctgctctcctctaaaccccaaagcttggcttccaaggctgtgccagggcggccagccctgcctgcctctccacctcctccctgcccacccctcatcccactgtagttctgggattctgaggccaaaccttcattgcctcccccactttttcccgcctccctagttagcggagcttgttttgttttattgggcagctttgagtgaggacatgtgtcagaggcgtttggaaaatctaaagaactcacgtccttccctggtgcctcttgtccccactccagtcacccggaactcaccaggagccccaggcagggcgaagcgtcccggtcccgccctcgtctggcggccgcatggaggccacacatgccttacgctccccaagccggggccgcgtggggcgacatgtgctgccggtcacaggggagggtggccagaggcaagtgatgctgatcagcatggg

SEQ ID NO: 71138 - DNA, 2220 bp, Homo Sapiens
  misc_feature (1379)..(1387): n is a, c, g, or t
  misc_feature (1699)..(1708): n is a, c, g, or t
  misc_feature (1737)..(1737): n is a, c, g, or t
tagggctaggtagcgaggcctgggtggagaattcggcacgaggcgcagcgcggcgccgccccactcgccccagccgccgccatgaaggccgtggtgcagcgcgtcacccgggccagcgtcacagttggaggagagcagattagtgccattggaaggggcatatgtgtgttgctgggtatttccctggaggatacgcagaaggaactggaacacatggtccgaaagattctaaacctgcgtgtatttgaggatgagagtgggaagcactggtcgaagagtgtgatggacaaacagtacgagattctgtgtgtcagccagtttaccctccagtgtgtcctgaagggaaacaagcctgatttccacctagcaatgcccacggagcaggcagagggcttctacaacagcttcctggagcagctgcgtaaaacatacaggccggagcttatcaaagatggcaagtttggggcctacatgcaggtgcacattcagaatgatgggcctgtgaccatagagctggaatcgccagctcccggcactgctacctctgacccaaagcagctgtcaaagctcgaaaaacagcagcagaggaaagaaaagaccagagctaagggaccttctgaatcaagcaaggaaagaaacactccccgaaaagaagaccgcagtgccagcagcggggctgagggcgacgtgtcctctgaacgggagccgtagctcaggaggcagaattcagtgtgttatcattgggcagaactggatcctgaaaaattcaagatgctaagcacctacactactttaagaatttggaactgaaacatgaagaggaagacagaaataagaatttgggaacctgaatagctctgcaaaaaacaccaaaggaccgttttatcgttttctgttgttgctgtggtggagtgatgcagtgggcactgccggtgggccagggggcgggtgcgcatgtggtagaaggtgtgcgctcgtgcctcccccacagaaaggctttgttggtttctaccacatcttggcttgcttttggaacaggctggcccagcatcatttgtcatcaagtccactgtggtgtattctgcgtgtccatggcgggggttctccaatacactcacactgtccatgttctttttattgccagggcccgtgttgaagtgtcaagagagcaatcatcaatgataatgtattgtgtgagacctttgcatcttgtaaattttctcttttttctaaaaataaataataataaaatcctaaatctcaacgaacagaaccgccctgcggccccaggcgcccccgctcaactgcaggagctcaagcgcccccgccgacgccgtgcgaggcgggatctcaacgccggaccgcctcggccgcaccgnnnnnnnnnacacccgcttcgcgacgcaccggccccaacagggcaccgcggtctggggggcggggcgccctccgcctcgccgatgagaacgaaacggcgcttcaagcaagtcacaggggaatactcagaaccccccgcgccccccgcaccgcgccgagccgggtgtcaaccgctcacccttctctcacccctgtattttgctctcctcgagaccccgcgcaacagtccgctgcgatcccactagtacacactcaccaccgcccgtgtcttatttcatatgtccctctcctcacgtcacagtagcaatcacgcagacgcatnnnnnnnnnnaatcgctggttggaggcgataacacccancgttcacagtatttacacccgttttcctctgtccctagatatctcccacctcctcacctaccccactctgtaccatattactcctttaccacgcacctaaacgcacctcaactcacgaacgaagcgcgcgtcccactaggccaactgcgtcccggaaaggaggctgccgtccgcgcgatcacgtatcccttgagagccactcgcacggactattcccaggagggcagcgtggtctggcccacggggctctccgcactacgcccctgccatcgagcacatcattttcccgcaggagcagacgcgccgccataaatgtcgtacgggcctgcccctttgtcgtcattatactattccatcctcactcagcgcggaagcgagaccgccgatacctgtccgacacccaacacagcactgtggtcgctcgggggagggacaaaagggatctgacacgcccgtatccgggaccggctgatcaactagata

SEQ ID NO: 71139 - DNA, 1049 bp, Homo Sapiens
aaggctagtgaactatagaaccgtggttaataaaagcaggctggtacggtccggaattccgggatatcgtcgacccacgcgtcgtgggcgtggccgacgtggggtgggtagcagccgaccgagtcggaccggccagttgggcgcgcttccgggtgtcacctccagagggcgccggctgcggagccgcacctcagagtcgcgaggccggacgcagcgcggcgccgccccactcgccccagccgccgccatgaaggccgtggtgcagcgcgtcacccgggccagcgtcacagttggaggagagcagattagtgccattggaaggggcatatgtgtgttgctgggtatttccctggaggatacgcagaaggaactggaacacatggtccgaaagattctaaacctgcgtgtatttgaggatgagagtgggaagcactggtcgaagagtgtgatggacaaacagtacgagattctgtgtgtcagccagtttaccctccagtgtgtcctgaagggaaacaagcctgatttccacctagcaatgcccacggagcaggcagagggcttctacaacagcttcctggagcagctgcgtaaaacataccaggccggagcttatcaaagatggcaagtttggggcctacatgcaggtgcacattcacgaatgatgggcctgtgaccatagagctggaatcgccagctcccggcactgctacctctgacccaaagcagctgtcaaagctcgaaaaaacagcagcagaggacacgaaaagaccagagctaagggaccttctgaattcacgcacaggaaacgaaacactccccgaaaagaagaccgcagtgccagcagcggggctgagggcgacgtgtccttctgaaacgggagcccgtagctcaggaggcagaattccagtgtgttatcatttgcgcagaaactggatcctgcaaaattcaagatgctaagcaactacactactttacagaatttggaacttgacacatgaagacggagaccgacttcagaattgccaacctgaatagctctgcaaaaaaca

SEQ ID NO: 71140 - DNA, 650 bp, Homo Sapiens
  misc_feature (260)..(273): n is a, c, g, or t
actgagcccagccaaaacttcagtgttgactgctttggaggcacaaacccatgcaagcgttagttccaaagttcagtgtgtacccttaaatgaacaatgaagcaggtaaaattacccttgaaaaaaatcccttggaccacccataaatgacagggactttttcaatatggactcatcatagccagttttccttttgaagttggaactgatcacccttttgtcatctgtaccaaatcagtagttggcttgtgttacatttnnnnnnnnnnnnnncgtgttttaaaccagtgcatataaattgtatgttaaatgtaagtaactttaagttgacttatctcttcacagtaatcaagcctcacgtaattcatgctttttaaattcagccagccccccctctctgaaattttattatgtaaataatttgtgttccctgatcactcgtttaagttcttagttgtatgtcatctcttctctagcaggaattggcaaacttttttgtaaaggggtagaaagtgaagattttaggctttgcaggccatatagcctctgctgcaaatgctcagccctgctgttgtaatgtaaaagctgccacagacactacatgaacacgaatgagtgtggctggtgttccaataaaactttatttacac

SEQ ID NO: 71141 - DNA, 1350 bp, Homo Sapiens
  misc_feature (1)..(1): n is a, c, g, or t
  misc_feature (27)..(55): n is a, c, g, or t
ngtaaaaaagcctgaaactttattgtnnnnnnnnnnnnnnnnnnnnnnnnnnnnncactctaaaaccctgagctggctgggggtgtcgtcagagatcagaaggacagggaaaaggctcggtaacccaggttggtgaaaacatccacccggcagctgttgcctgcagctgtcaggaccttgcactcaggcgcggcaggctgctggttgaggctgaggctgagcagccctggggaggagccaggcacctgggccttcagctccccgctcagctgccactggttgacgcagcggccctggccagctgaacaaaatcaggtcctggtaaaaggtgacgtgcttctgtggcgcccggatggggaagatggtggtgggtgtggaggatcggaggtgccagaagggtgagggctgggccccctccacagacccatccagtcggaatcagttgccaaacatcccaatccagcgcccattgtggggcctcgagcactcctcgtgcttatagacctcgatcgtctggacctccttggctgtgcgcaggtcccaaagtcgaacagctccatcctcgccacctgacagcacctctgggctcctttcccgcagtgccaggcagtggatgtagtctgtgtggccccggaggaccctcgtgaaagtcccagtttcaaggtccatagtgtgcaactgacagtctcccccagccaggatgagggaattctccttggggaccagcagcaaagcgttgatctcaggcacttccaggctggtcctgtatggaggctgacgacgccacagctccttacagcccttcttgagcatctccgcccaaagccaggccttcacctccccatccccagcactaagcagatgtcgatcggtggaaaccatgctatagacgggcccatcatgggcttggaaagtcaccaccggcttcttactttcctctttggcttctgagctcaaagcagaggacaagctgaagatggcaatctgcccgtaattgttgccagccgccagaaacttcccacatggtgagacgctctgggagaagatggtcatatggagccgctgcaaggcctggaacacctctgtctgacccagaggcaccgcgagcggcacagctcgctccatctccagaactacaagtcccagagtgctccgcgcgcgacgcaacctcacgaggccttacgtgcctagagcggttcctctccgtggcgccctaccgccttcggcgcgaaggtggctggtgcgtaccgtcccgaacccttccgccacgcgccgcccgtcttccgcgcccgcgcagaacctcgccctcgtgccgattacacacccagcctcgtacctagccgtatcgtt

SEQ ID NO: 71142 - DNA, 685 bp, Homo Sapiens
aggagcgaggcctgagtggcgaatccagcacgaggatcctgcagcagcccttgcagcgaggcccccagggaggggcccagcgcctcccgcgggccgccttgggggtgacttggggcctggacgccagctcccctctccgaggagctgtgcccatgagcaccaagcggcgcctggaggaggagcaggagcctctgcgcaagcagtttctgtctgaggagaacatggccacccacttctctcaactcagcctgcacaatgaccacccctactgcagcccccccatgaccttctccccagccctgcccccactcaggagcccttgctctgagctgcttctctggcgctatcctggcagcctcatccctgaggccctccgtctgctgaggctgggggacacccccagtcccccctaccctgcaaccccagctggggacataatggagctctgagtgctggtggacagtgcccctcccaccttccttcttccccacaacagaagagaccagcgactcccgcaaagggacaaggttcctccctctcctgcagagtaggcatctgggcaccaagaccttccctcaacagaggacactgagcccaacggagttctgggatgggaggggtgggagcatgggaagggaggcatcccacccccaagaagaactgaataaagattgctgagcaaagg

SEQ ID NO: 71143 - DNA, 1677 bp, Homo Sapiens
  misc_feature (1455)..(1464): n is a, c, g, or t
ttgtgccacgagccctctgtaatcccaattcaggtcaatagtgtccactgacagttgccccagccagatgaggtatctcttgggacactatcaagcgtgatctcagcaacttccagcctggtccttgtatggagcttgtcgaacgccacagctcctttacagcccttcttgagcatgctccgcccaaaagccaggccttccacgctccgccatccccagcactaagcagatgtcgatcggtggaaaccatgctatagacgggcccatcatgggcttggaaagtcaccaccggcttcttactttcctctttggcttctgagctcaaagcagaggacaagctgaagatggcaatctgcccagtaattgttgccagccgccagaaacttcccacatggtgagacgctctgggagaagatggtcatatggagccgcttgcaaggccatggaacacctctgtctgacccagaggcaaccgcgagcggcacagctcgctccatctccaagaactacaagtcccagagtgctccgcagcagcgacgcaacctcacgaggccttacgtgcctagagcaggttcctctccgtggcagccctaccgccattcggcagcgaaggtggctggtgcgtaccgtcccgaaccctaggagcacgaggtgagcgccgcgaagacccccgacattaagaagtggtgtccaccgcagcccccttaagccggataccctcccccacccacgaggagcaagcactgccttccgccacacgccgcccgtcttccgcgcccgcgcagaacctcgcggctgtgcccgcctaaagccacgcccatcctctcttggccacgccctcagagactcctcccctgtcgcccagatcccacccgcaggaccccaaaacccaatgatcctgcagcagcccttgcagcgaggcccccagggaggggcccagcgcctcccgcgggccgccttgggggtgacttggggcctggacgccagggagcctctgcgcaagcagtttctgtctgaggagaacatggccacccacttctctcaactcagcctgcacaatgaccacccctactgcagcccccccatgaccttctccccagccctgcccccactcaggagcccttgctctgagctgcttctctggcgctatcctggcagcctcatccctgaggccctccgtctgctgaggctgggaggatagcgcaagagcagcagctttgagcaagggcttctgagtatatcggagcatctctgtcctccccgaaccgcccccccgcccacctatcttttcatccccctcccccgtgctccgccatcactccgaagaaaaatactttcacccctgcccccctcccccttaattcaaacccctccgcctttggccattccgccctctccccgcccccaattatacctctcctttgttcccgcgcctcccgcaattattatcggcgnnnnnnnnnnttcccatattcgctctcctcacccgcggtccacccccctctcttatttttcccggcccgagcgggtcctagacccgacttataattatcacccaccatagttatcgttttctcgcccctctcattcctctcgcccctcatatttctttcctccccccctccccgttatttgctcccgccccgcccgccacaccttgtctcgcccccgccgcct

SEQ ID NO: 71144 - DNA, 454 bp, Homo Sapiens
aagaagatttatggacaggaaaaagaaaatgatgtactgaaaatgaaagtgaggtacagaaacagccagactggttatagctcagcattggccttatttgaacgagatttgaacagttggccacctttgattggccgaaactcagtgattggcacaagagtaggttgcagtctgtttacacatccttttaggttatagttcaccatgtacagagaaattttaggccaaacttaaaatatgtaaggaggcagctttaggctaaacttgatttaacagcaccaataccccctacctttagtgagcacatctgcacattccaattttaatgacagctccttagaatttcttatcaacgaagacactaacaaagaatggcgcattcctccttctcctttctgaggatgccctaccctgtaacaaagtcgtttctaataaatttgcttctttcaccaaa

SEQ ID NO: 71145 - DNA, 561 bp, Homo Sapiens
  misc_feature (13)..(13): n is a, c, g, or t
aggaagtagtttntaaatgtgagcttatagatagaaacagaatatcaacttaattatgaaattgttagaacctgttctcttgtatctgaatctgattgcaattactattgtactgatagactccagccattgcaagtctcagatatcttagctgtgtagtgattcttgaaattctttttaagaaaaattgagtagaaagaaataaaccctttgtaaatgaggcttggcttttgtgaaagatcatccgcaggctatgttaaaaggattttagctcactaaaagtgtaataatggaaatgtggaaaatatcgtaggtaaaggaaactacctcatgctctgaaggttttgtagaagcacaattaaacatctaaaatggctttgttacaccagagccatctggtgtgaagaactctatatttgtatgttgagagggcatggaataattgtattttgctggcaatagacacattctttattatttgcagattcctcatcaaatctgtaattatgcacagtttctgttatcaataaaacaaaagaatcctgtttgtgtggtttcatg

SEQ ID NO: 71146 - DNA, 1272 bp, Homo Sapiens
  misc_feature (331)..(353): n is a, c, g, or t
  misc_feature (433)..(478): n is a, c, g, or t
gcggccgctacaacatcactaattttggctttcacatttaaatggttctgtgctaatcaaaactttcgttgttattattcgttatggtagaatcatttttaattcacgtgctttgtgttcagttttgtggtctgagagatgtaccaattgtcaaattaccgtgtaccacctaatgtttataggagaaagcaaaatacatcagcttggtagttaacacatcaaatatttcttgctgcttctaggagaacttttttggtgtgtgttggaatggctgagcaaatattaaaattgttaatatgcagccatatatggaaggttcctgtggggttgnnnnnnnnnnnnnnnnnnnnnnngtggtgggattatgtgcctcccattcactagaaaatgagaaaattgtctgggttccaaaatattgacattgaatggatcnnnnnnnnnnnnnnnnnnnnnnnnnnnnnnnnnnnnnnnnnnnnnnggcagttgcatgctagcatgggtatttttataacaatataactgagttatattggaattataaatattttccgtcacttaaatttgttctttgtttagcctgaaaacctttatggctcaagatcagattcctgactaacccctctcttagagctacagcgagctgcattaccagcttaaaacacttcttagggattaaatatagatgtaatttttcaaaatcgtttttaatttaaactgtgttttagtgtaaaattgttaaccttgtaagatggataatgtgtataagaatgtaggccttaactatttcacatgagtcaaaacaaagcagctttaaaaaaataattggaagcacaagtgcatggcactgactgaatgctgttaatatttctaaaagtttctacattcagattatatgcctgattcatagtaaaatacctctaataaacactgttttatagaaaacctgacttcagtgaatatttttgtattttacatgggccagtttatatactgctatttacactattatttcctatagctacatgttctttgtaccttttgtagttttatttgtattactagattcataccttgatggtaacgctctatctggttttgggtgtttttcatgttttagcatttgtataaagaaactggtccatgtaaatactttccatgttttttcttcaaatgtttaaaccactagttgatgtatggtatctttagatatttgcctgtctgtttgctcaaaattgcttctaaaacaataaagattcttttatttcttaaggc

SEQ ID NO: 71147 - DNA, 909 bp, Homo Sapiens
agcccacgagcacgagctgaacccacgaggatggcctgaacccatgtcagtctctcaccacctccagcttcgatgatgtgggtgtcctgcagaagaagctggtcccttcctcacagagttaaatatgcatctggcccaggaattagagaagctgaaaggatgatcctggggaaggtggagcagctgcaggcctggctgcaggcctgactactgcccacaccaacgaggtgatctagcagatacatggcaacgtgtgaactgcaacaacgcctggtgccccagcaccaaccttccaagtgtaaaaacaatgtgctgctgcttcacttccgccctccggttatcaagcaaaatgtctcttgtggcccatcttactggaagagagttccgggaaacatagcctcaccaaggtgacacattacaaagccaccctaccatgaatccgctcccaagggtctcactgctcacctgaggataactcaatataactatgttgctgaaaatgcaaagctgaagaccatggatttcatggtgattccagcaagtacagagattctatgaagcccacccagaaaaaacttgctggtcctggctatttttgtgtcatttattcaagtattgagaacctggcctgtggtaggcactgtacttaatactaggatacagaaatgcaaaagatacggcccatgcaattttattaaatgcatcaatatgtattacaaatggtgaatggatttccaactttatcatggaatttaatgctgaatatatagaattcagaaaattgttgggaggacagcccttttgtgaaccttgtttggggcacagtaggaattggaaataatttagtttctatctctaagctgttctattttaaaattatttttaaatttttattgtcccactaaaaaa

SEQ ID NO: 71148 - DNA, 652 bp, Homo Sapiens
  misc_feature (59)..(59): n is a, c, g, or t
  misc_feature (416)..(440): n is a, c, g, or t
ctagggtaaaataaatacatttgtgtccaactgaaatataattgtcattaaaataattntaaagagtgaagaaaatattgtgaaaagctcttggttgcacatgttatgaaatgttttttcttacactttgtcatggtaagttctactcattttcacttcttttccactgtatacagtgttctgctttgacaaagttagtctttattacttacatttaaatttcttattgccaaaagaacgtgttttatggggagaaacaaactctttgaagccagttatgtcatgccttgcacaaaagtgatgaaatctagaaaagattgtgtgtcacccctgtttattcttgaacagagggcaaagagggcactgggcacttctcacaaactttctagtgaacaaaaggtgcctattcttttttnnnnnnnnnnnnnnnnnnnnnnnnnttactcttccatattccttctgcctatatttagtaattaatttattttatgataaagttctaatgaaatgtaaattgtttcagcaaaattctgcttttttttcatccctttgtgtaaacctgttaataatgagcccatcactaatatccagtgtaaagtttaacacggtttgacagtaaataaatgtgaatttttcaagtagttaacatgtg

SEQ ID NO: 71149 - DNA, 1761 bp, Homo Sapiens
tacggctaggtacgaggcctgggtgggcgaatcggccggaggctggccaatatttttactgtgtttgtaaagactgaggtcgttgattctgatggatcagtgaaagacaaaatcacagcattcatagtagaaagagactttggtggagtcactaatgggaaacccgaagataaattaggcattcggggctccaacacttgtgaagtccattttgaaaacaccaagatacctgtggaaaacatccttggagaggtcggagatgggtttaaggtggccatgaacatcctcaacagcggccggttcagcatgggcagcgtcgtggctgggctgctcaagagattgattgaaatgactgctgagtacgcctgcacaaggaaacagtttaacaagaggctcagtgaatttggattgattcaggagaaatttgcactgatggctcagaaggcttacgtcatggagagtatgacctacctcacagcagggatgctggaccaacctggctttcccgactgctccatcgaggcagccatggtgaaggtgttcagctccgaggccgcctggcagtgtgtgagtgaggcgctgcagatcctcgggggcttgggctacacaagggactatccgtacgagcgcatactgcgtgacacccgcatcctcctcatcttcgagggaaccaatgagattctccggatgtacatcgccctgacgggtctgcagcatgccggccgcatcctgactaccaggatccatgagcttaaacaggccaaagtgagcacagtcatggataccgttggccggaggcttcgggactccctgggccgaactgtggacctggggctgacaggcaaccatggagttgtgcaccccagtcttgcggacagtgccaacaagtttgaggagaacacctactgcttcggccggaccgtggagacactgctgctccgctttggcaagaccatcatggaggagcagctggtactgaagcgggtggccaacatcctcatcaacctgtatggcatgacggccgtgctgtcgcgggccagccgctccatccgcattgggctccgcaaccacgaccacgaggttctcttggccaacaccttctgcgtggaagcttacttgcagaatctcttcagcctctctcagctggacaagtatgctccagaaaacctagatgagcagattaagaaagtgtcccagcagatccttgagaagcgagcctatatctgtgcccaccctctggacaggacatgctgaggcaggggacagtgtcccctgctaccgcccgcccctacccatggcccgttgctggatgactgttactcttttttcagaaggtgttgggattatcacaggttaagccttttgttccccgtctgcacctgaagggttgtcgcctggcctgggagagcctcttccaggttttgacctgcaggcagtgctctctaacaggaccatcacagcttctgaactgagccggagagagagaatggaattgctgacccctggaactggcgggtattctggtcattgaggagacaccatagtggaaactggggcttatgctgctgcctccagggtgtgaggtgggtggggacctgtgtcaggtgtggatagccatttctgctcaaccacacattctctaagaaacagcttgaaagctctgtctgggtcattcatttaaactagaagcagaggcacttaaaacatgtaccaggaaccatttaacaaagaatataaaatgtcacaatctgtgtactgtta

SEQ ID NO: 71150 - DNA, 650 bp, Homo Sapiens
  misc_feature (60)..(117): n is a, c, g, or t
  misc_feature (450)..(458): n is a, c, g, or t
ttcaaaaactatataattctataaaaatttaaatgtggactaactacatcaatacatggnnnnnnnnnnnnnnnnnnnnnnnnnnnnnnnnnnnnnnnnnnnnnnnnnnnnnnnnnncatgtaaaagtaaatatattacaataacaaaaactgaagtgaatttaaattgaaagacataaatagattcaaatattagggttttttctttgttgcttaagattataacaaaatacaaaagaaaaaatagactattattttagataaaataaaattatactcctaaacaataaatgctgaactatatgtgaactcctaaaacagagatatttaaaacataacttctatatttcaagtgtatcctgtgaaggagatcagcctacatttgctggtcttcattttacaaaacattctgggcaatgtgtccatttataactgcccctcttaaacatnnnnnnnnncattttaaagcactaagtaagaaaaccaagcagcatgctaacaaaatctatctacttaatctgttttgcttctgcaaaaagccactaacagaaggtttaaaaaactaatcggacgcgtggtcgacgatatcccgggaattccggaccggtaccagcctgctttttttaccagctgttcataggtccatgccg

SEQ ID NO: 71151 - DNA, 1148 bp, Homo Sapiens
  misc_feature (1047)..(1047): n is a, c, g, or t
atagctagtacgaggctggggtttaatcgcacgaggcgtgtcggggcttagtaacgtcatcagacgtgtgtgtgtccctgcggcgctaagaaggggagactgaggctgaggctggggaacatcgggcagcatgagcggctgcgggctcttcctgcgcaccacggctgcggctcgtgcctgccggggtctggtggtctctaccgcgaaccggcggctactgcgcaccagcccgcctgtacgagctttcgccaaagagcttttcctaggcaaaatcaagaagaaagaagttttcccatttccagaagttagccaagatgaacttaatgaaatcaatcagttcttgggacccgtggaaaaattcttcactgaagaggtggactcccgaaaaattgaccaggaagggaaaatcccagatgaaactttggagaaattgaagagcctagggctttttgggctgcaagtcccagaagaatatggtggcctgggcttctccaacaccatgtactcaagactaggggagatcatcagcatggatgggtccatcactgtgaccctggcagcgcaccaggctattggcctcaaggggatcatcttggctggcactgaggagcagaaagccaaatacttgcctaaactggcgtccggggagcacattgcagccttctgcctcacggagccagccagtgggagcgatgcagcctcaatccggagcagagccacactaagtgaagacaagaagcactacatcctcaatggctccaaggtctggattactaatggaggactggccaatatttttactgtgtttgcaaagactgaggtcgttgattctgatggatcagtgaaagacaaaatcacagcattcatagtagaaagagactttggtggagtcactaatgggaaacccgaagataaattaggcattcggggctccaccacttgtgaagtccattttgaaaacaccaagatacctgtggaaaacatccttggagaggtcggagatgggtttaaggtggccatgaacatcctcaacagcggccggttcancatgggcagcgtcgtggctgggctgctcaagagattgattgaaatgactgctgagtacgcctgcacaaggaaacagtttaacaagaggctcagtgaatttg

SEQ ID NO: 71152 - DNA, 1094 bp, Homo Sapiens
  misc_feature (182)..(197): n is a, c, g, or t
gcccagcatgtgacctatgaaccgtggtacaaaaagcaggtggtacggtccggaattcccgggatatcgtcgaacccacgcgtccggttaaaacaaagtctatttaactgacgtgatctattggtgtctaaaacagaggaatttatcttgtcctagaagttcatgaactataagatctaagnnnnnnnnnnnnnnnnaacaataaaatgattttttcttaaagtatcaaagttggaattggctaaaagtgaagtagcataactcagatatgtggaacttggtactgaagcaggcttttggtaacagaaatgacattttaaggggtaactgtatatcctgtttttagttctttgcctctcagattctgttaacttagtttaaattcactgaataccctaccactaaggcgttgctcattacaaaagcatgttaatttcaatacaggaaaactcttttgtagttttatatatggattggggaaagtgactttgttttacttttcctttttattcccctccatcctccaaacttccaatctatattattgtaatgagaacttggtggggggaaaaaaagcattaagagaattttggatgtaaaggcatctggtatctgatggaccagcaggtagatgtggttggattgagaaattttgggtaaggtagatgatagaagaaagagattttaggagacacagttctctgtggaacactttctttcatgttcctgtaactaattgatcaagacccttttaaacgcttatctttgtcagttccgcttttgaaaaaactattgccctaggattgtttcttccatatgacagatgaaggttattggctctgagtcatttttggcattatcgtcacagataaaaagattggcaattaatctcataaaaaatctgaattattccagattgctgccgatttttgcctaagaaacaatatgtaagtatattttataaaccaaactttgtcaaccaattctattgtacgtctacccacaggcaactttgaatttacttctctagtgctaaataaacatttcagcgatttaatcccccaacttgggggatgcattatgaaaaggttaaa

SEQ ID NO: 71153 - DNA, 740 bp, Homo Sapiens
caagagtcaggatacactttatttctcacaggtgttagttctttttggcagatccatctgatttctgtactacagtactcagaatacacagatgtctgtgagatggaaatacagctgttttctttagcatcacctctaatttctaagtcattagaatttaaaaaagagccgtttatccacttccagttcttttctgataatgaaaaatttaatccaatccaaaacagaattgctttgtcacgtatcaggttctgtgtgtgtatcaattcatccttatctcgaataagcagcaggctggattctttggtggaacaatcagctagactgttattccaagggttgacagtgtgagaaaataacaagcatttctctcggagttgctgccaatatattgggcagtttaagagacccggtctctctgttgttttattcctgctctgttgaatgtccacactgcatttttctattgatgatttctgtattaaggatgtcactgaaacactcaacccagtaacaaccaagacaaggagaataatcccagcacagctaagtttcagggcaaattgatgccaaggtgaaccctgacagacatcccgaggaagagatgaaggtgaagaactttctgggcctgagtctgtgggtaagtttaactcagcatatattgcttgttggtccatggcagacagaggaaggtggcattaaacttgtgtgtaagaacaaactctcaattctgtgaggca

SEQ ID NO: 71154 - DNA, 476 bp, Homo Sapiens
tccccacccccagctcggacgcaggggcctggcgtggcctcctcacgggcacggtgtggaaacaccactggcggttaccgtggtctgccgggtgcatgagcccctggggtggccccgtcccttgtttctgaccagccggatcctctccagcggcaggagcagagagggcccggaggtccagacggtgctctctgcggccagcatgccgcggaggtggccgagtgagtgtggcccctcccttgcaggctgacccagctggatgttgacagccacctggcccagtgcttggccgaaagcacagaagacgtgacgtggtgagcgccatccaagagccctgcgcagagtgcagcgcccggacacgctctcccccgccagcagccccgcctctcggctcccccgccagcagccccgcctctcggctcccccgcatgcgcattaaagcagggcgggctcctgtctgtctctgtgttgtgatg

SEQ ID NO: 71155 - DNA, 1208 bp, Homo Sapiens
ctcccatgtttaaaaggttttacataaggaccccaaagagaggctcggctgccggccacagactggattttctgacatcaagtcccacgcgttcttccgcagcatagactgggacttgctggagaagaagcaggcgctccctccattccagccacagatcacagacgactacggtctggacaactttgacacacagttcaccagcgagcccgtgcagctgaccccagacgatgaggatgccataaagaggatcgaccagtcagagttcgaaggctttgagtatatcaacccattattgctgtccaccgaggagtcggtgtgaggccgcgtgcgtctctgtcgtggacacgcgtgattgaccctttaactgtatccttaaccaccgcatatgcatgccaggctgggcacggctccgagggcggccagggacagacgcttgcgccgagaccgcagagggaagcgtcagcgggcgctgctgggagcagaacagtccctcacacctgggcccgggcaggccagcttcgtgctggaggaacttgctgctgtgcctgcgtcgcggcggatccgcggggaccctgccgagggggctgtcatgcggtttccaaggtgcacattttccacggaaacagaactcgatgcactgacctgctccgccaggaaagtgagcgtgtagcgtcctgaggaataaaatgttccgatgatgtggaagctcctctgatgccttttttcagtgagtggcgcctgccccacatctcagacgcaacccacacgtaggggggcagcttaggagccagcgggacacaggtgggggcgggagttgaagtacctgggggcgaactccttctggcacatggggcagctgcgcagggccgcggcaccctccacagacggctgctgctccaccctgggggccctgcaggaatcaggtgccgggcgctggggcagggacctggcgggggatttcaggtgccctcctgccccgtgaagcagccggtaggaacggcccgggccccacaggtccggcggaaagggtgtccaggaaaaggtcttgggtccgacagtgaagacttcagtgggctccgggccgcacctgggctcctgtcctgggaaggcgggcagtgaaggcacctcgtgatccaggatcagctccgggctcaccgtgcgcagtagctcggcccagagccgctcccgctcatcaccccccagga

SEQ ID NO: 71156 - DNA, 614 bp, Homo Sapiens
tcatcacaacacagagacagacaggagcccgccctgctttaatgcgcatgcgggggagccgagaggcggggctgctggcgggggagccgagaggcggggctgctggcgggggagagcgtgtccgggcgctgcactctgcgcagggctcttggatggcgctcaccacgtcacgtcttctgtgctttcggccaagcactgggccaggtggctgtcaacatccagctgggtcagcctgggggcgaactccttctggcacatggggcagctgcgcagggccgcggcaccctccacagacggctgctgctccaccctgggggccctgcagggatcaggtgccgggcgctggggcagggacctggcgggggattccaggtgccctcctgccccgtgaagcagccggtaggaacggcccgggccccacaggtccggcggaaagggtgtccaggaaaaggtcttgggtccgacagtgaagacttcagtgggctccgggccgcacctgggctcctgtcctgggaaggcgggcagtgaaggcacctcgtgatccaggatcagctccgggctcaccgtgcgcagtagctcggcccagagccgctcccgctcatcaccccccagga

SEQ ID NO: 71157 - DNA, 1268 bp, Homo Sapiens
  misc_feature (234)..(257): n is a, c, g, or t
  misc_feature (1066)..(1066): n is a, c, g, or t
gggtttaggtgtcagctcttgagctgcttccctcatcacaccacactcacatgcatctgtctctctcacactctatacccctgccacttcctggcacctccccccatgcttgtcatttaattttggccacttgtaggtatcagtgtgatctgatcaacactctggttaccttggtcagtgaaaagatgctactatattgcttttgtcccaaagtgagtaaaatcccctagagcnnnnnnnnnnnnnnnnnnnnnnnntgtcttcatgccaaccacagcctgtttctgctgagtttcttatcagccctcaagctatgctaggaaaagttataaaatgccaaaatatttataaacatttactttgtccataaaaaatttacattggatactctgtaagtaggaggtactttgtcccaaaaagatgtataagaatgtactaatagttttatttgattaggattgaacagttcagttgtatctatgccccacagtgaccagtaaagtccaattaaaatatggaaatgtaaaagtgtatgccgaataccttaaagtaactaattatccttacacacaaaaggctcagtgcattaaatatttgcctatcacctgtgtgctgtgtaccgtggccatgcctcgctctgcactatgaacaactcagacctgtcccttcacggtctgattagggtgtcacacaaagctctctccctaacatggtttctcaactgtcaaaatcatgaaaatgacagcacctaaccactattttaaagtatgtacagtaaatacccaaatgtgtgtaaatgtcatagacatatacaaagtcagtaatctcacccagtcctgctgtgtgaacctgtcaaagcacctgggagtgccctttacaccattaggtgaaattcatcaggcacttcagacaaccaggttgcactgttttctcactaaattggctttatttatacagtttcctggaacctagcattcctaaacaagctccaaaatgcagaagaagaaattgtgccacagtgatagagtttttaatgaatatccatggccacagttttgagtctcanggtaagtcttggaagaagttaaacacagtattaggcaaatatttatctctctgaaaaaatagggaggaggtgaccaggaaaaaataaccactattgaatgacacgtttgtacttgatggatctgtcatcaagttttaaaatcagaatcatttgggatttccacaaaccattttatactcgtaataaatatatttaatataaa

SEQ ID NO: 71158 - DNA, 774 bp, Homo Sapiens
aaggctagtacgaggcgtggtgttgaattcggcacgaggccgggccacgtttgtgagcagcgtgagacccgagagctctcggctgccagagggtagctcaggcctgtccagctacaccccgaagcactctgtggccttcagcaagtggcaggagcaggcgctggagcaggccccgagggaggcagagcccccgcccgtggaggccatgctcacacccgccagtcagaatgacctctcggacttccgcagcgagccagccctgtatttctgagcccagcactgccaggaccaaggctgagcccagctgtgggagtcccggaagctgggcagtagccagggactactgcacccgcttctgccttgtttggcctcactgtatcccacccacccctcctggccctggaagcagctagggtgcctcctgccatcggggccaggtctgggtctcactccccggccctgatttgggagggtccaagggggaagtggggtggggaactgcctgtgggtgagtgccaggggcctgctgggtggtggccatctgcgacccggcagggggctgtgcagattctgcacctggccattccctgtcctgtctcctcagcctgcctcacagtggccatggggtgtcggggtgaagggctgtcccagctacttgtcctctgcaggaccctaagcccctgcccgcagcccacatgccctctgtgatgagtggcgtctttcctgcctctgatgatggactcaataaacagcactggacaaggcaaaaacaaa

SEQ ID NO: 71159 - DNA, 1102 bp, Homo Sapiens
  misc_feature (41)..(83): n is a, c, g, or t
  misc_feature (87)..(121): n is a, c, g, or t
  misc_feature (968)..(968): n is a, c, g, or t
  misc_feature (974)..(975): n is a, c, g, or t
aagactgtatcgatcactatagggcgctagctctgttcgtnnnnnnnnnnnnnnnnnnnnnnnnnnnnnnnnnnnnnnnnnnnccgnnnnnnnnnnnnnnnnnnnnnnnnnnnnnnnnnnncagtcgacggtaccggacatatgcccgggaattcggccattacggccggggggcgcccgagtgcactgaagatggcggctgctgtaggacggttgctccgagcgtcggttgcccgacatgtgagtgccattccttggggcatttctgccactgcagccctcaggcctgctgcatgtggaagaacgagcttgacaaatttattgtgttctggttccagtcaagcaaaattattcagcaccagttcctcatgccatgcacctgctgtcacccagcatgcaccctattttaagggtacagccgttgtcaatggagagttcaaagacctaagccttgatgactttaaggggaaatatttggtgcttttcttctatcctttggatttcacctttgtgtgtcctacagaaattgttgcttttagtgacaaagctaacgaatttcacgatgtgaactgtgaagttgtcgcagtctcagtggattcccactttagccatcttgcctggataaatacaccaagaaagaatggtggtttgggccacatgaacatcgcactcttgtcagacttaactaagcagatttcccgagactacggtgtgctgttagaaggttctggtcttgcactaagaggtctcttcataattgaccccaatggagtcatcaagcatttgagcgtcaacgatctcccagtgggccgaagcgtggaagaaaccctccgcttggtgaaggcgttccagtatgtagaaacacatgggagaagtctgcccaagcgaaactggaacaccgggaatcctcctacggatcaagccaaagtccagcctggcttccaaaagagtacctttcagaaaggtanattcanntagaatcaccccctggtggttatctggcaccttttctccaattgagaaaaaaagaaccccccggttttgaaaaacctggccttttttatccactttttcccaaggaatggggttaaattttgggaga

SEQ ID NO: 71160 - DNA, 997 bp, Homo Sapiens
  misc_feature (81)..(115): n is a, c, g, or t
aaacttgtgatgactcactatgggccctagctcgttgagcgaacgacgagcgcagcgagtagtgagcgaggaagcggccgnnnnnnnnnnnnnnnnnnnnnnnnnnnnnnnnnnncagtcgacggtaccggacatatgcccgggaattcggccattacggccgggggagtgcactgaagatggcggctgctgtaggacggttgctccgagcgtcggttgcccgacatgtgagtgccattccttggggcatttctgccactgcagccctcaggcctgctgcatgtggaagaacgagcttgacaaatttattgtgttctggttccagtcaagcaaaattattcagcaccagttcctcatgccatgcacctgctgtcacccagcatgcaccctattttaagggtacagccgttgtcaatggagagttcaaagacctaagccttgatgactttaaggggaaatatttggtgcttttcttctatcctttggatttcacctttgtgtgtcctacagaaattgttgcttttagtgacaaagctaacgaatttcacgatgtgaactgtgaagttgtcgcagtctcagtggattcccactttagccatcttgcctggataaatacaccaagaaagaatggtggtttgggccacatgaacatcgcactcttgtcagaacttaactaagcagatttcccgagactacggtgtgctgttagaaggttctggtcttgcactaagaggtctcttcataattgacccaatggagtcatcaagcatctgagccgtcaacgatctcccagtgggccgaagcgtggaagaaacctccgcttggtgaaggcgttccagtatggtagaaaccaccatggagcaacgtctgcccaagcgaactggcacaccgggattctctacgcatcacgccaagtcccagctgcttccaaagagtactttcagcaaggtacatccgtgatcacccatgtgtatctgcacttctcattgaagaagac

SEQ ID NO: 71161 - DNA, 1111 bp, Homo Sapiens
  misc_feature (51)..(90): n is a, c, g, or t
  misc_feature (94)..(128): n is a, c, g, or t
gttgaaaaaagggaaacgtccactatagagagccggctcagtcgttgaagnnnnnnnnnnnnnnnnnnnnnnnnnnnnnnnnnnnnnnnnccgnnnnnnnnnnnnnnnnnnnnnnnnnnnnnnnnnnncagtcgacggtaccggacatatgcccgggaattcggccattacggccggggggcgcccgagtgcactgaagatggcggctgctgtaggacggttgctccgagcgtcggttgcccgacatgtgagtgccattccttggggcatttctgccactgcagccctcaggcctgctgcatgtggaagaacgagcttgacaaatttattgtgttctggttccagtcaagcaaaattattcagcaccagttcctcatgccatgcacctgctgtcacccagcatgcaccctattttaagggtacagccgttgtcaatggagagttcaaagacctaagccttgatgactttaaggggaaatatttggtgcttttcttctatcctttggatttcacctttgtgtgtcctacagaaattgttgcttttagtgacaaagctaacgaatttcacgatgtgaactgtgaagttgtcgcagtctcagtggattcccactttagccatcttgcctggataaatacaccaagaaagaatggtggtttgggccacatgaacatcgcactcttgtcagacttaactaagcagatttcccgagactacggtgtgctgttagaaggttctggtcttgcactaagaggtctcttcataattgaccccaatggagtcatcaagcatttgagcgtcaacgatctcccagtgggccgaagcgtggaagaaaccctccgcttggtgaaggcgttccagtatgtagaaacacatgggagaagtctgcccagcgaactggacaccggattctcctacgatcaagccaagtccagttgcttcccaaagagtactttcagaaaggtaaatcagtagatcacccatggtggatctgccacctttctcaactgagaagaagaaccacaggttggaaaccctgctttttatcatttttcaagaatgggtttattttgttagaaaaggcaaggggaccccaaattatggccttggaac

SEQ ID NO: 71162 - DNA, 894 bp, Homo Sapiens
cagtcgacggtaccggacatatgcccgggaattcggccattacggccgggggcactgaagatggcggctgctgtaggacggttgctccgagcgtcggttgcccgacatgtgagtgccattccttggggcatttctgccactgcagccctcaggcctgctgcatgtggaagaacgagcttgacaaatttattgtgttctggttccagtcaagcaaaattattcagcaccagttcctcatgccatgcacctgctgtcacccagcatgcaccctattttaagggtacagccgttgtcaatggagagttcaaagacctaagccttgatgactttaaggggaaatatttggtgcttttcttctatcctttggatttcacctttgtgtgtcctacagaaattgttgcttttagtgacaaagctaacgaatttcacgatgtgaactgtgaagttgtcgcagtctcagtggattcccactttagccatcttgcctggataaatacaccaagaaagaatggtggtttgggccacatgaacatcgcactcttgtcagacttaactaagcagatttcccgagactacggtgtgctgttagaaggttctggtcttgcactaagaggtctcttcataattgaccccaatggagtcatcaagcatttgagcgtcaacgatctcccagtgggccgaagcgtggaagaaaccctccgcttggtgaaggcgttccagtatgtagaaacacatggagaagtctgcccagcgaactggaaaaccgggattctccctaccatcaaagccaaggtcccagcttggcttcccaaagaagtaactttttccaggaaagggtaaaattccagttaagaatcccacccccattgttgggtaatccttggccacacccta

SEQ ID NO: 71163 - DNA, 1651 bp, Homo Sapiens
gaaccacagcgcttcggagctatcccgcacccatcacccaccaacgcctggtaccggtccggaattcccgggatatcgtcgacccacgcgtccgactgaagatggcggctgctgtaggacggttgctccgagcgtcggttgcccgacatgtgagtgccattccttggggcatttctgccactgcagccctcaggcctgctgcatgtggaagaacgagcttgacaaatttattgtgttctggttccagtcaagcaaaattattcagcaccagttcctcatgccatgcacctgctgtcacccagcatgcaccctattttaagggtacagccgttgtcaatggagagttcaaagacctaagccttgatgactttaaggggaaatatttggtgcttttcttctatcctttggatttcacctttgtgtgtcctacagaaattgttgcttttagtgacaaagctaacgaatttcacgatgtgaactgtgaagttgtcgcagtctcagtggattcccactttagccatcttgcctggataaatacaccaagaaagaatggtggtttgggccacatgaacatcgcactcttgtcagacttaactaagcagatttcccgagactacggtgtgctgttagaaggttctggtcttgcactaagaggtctcttcataattgaccccaatggagtcatcaagcatttgagcgtcaacgatctcccagtgggccgaagcgtggaagaaaccctccgcttggtgaaggcgttccagtatgtagaaacacatggagaagtctgcccagcgaactggacaccggattctcctacgatcaagccaagtccagctgcttccaaagagtactttcagaaggtaaatcagtagatcacccatgtgtatctgcaccttctcaactgagagaagaaccacagttgaaacctgcttttatcattttcaagatggttatttgtagaaggcaaggaaccaattatgcttgtattcataagtattactctaaatgttttgtttttgtaattctggctaagaccttttaaacatggttagttgctagtacaaggaatcctttattggtaacatcttggtggctggctagctagtttctacagaacataatttgcctctatagaaggctattcttagatcatgtctcaatggaaacactcttctttcttagccttacttgaatcttgcctataataaagtagagcaacacacattgaaagcttctgatcaacggtcctgaaattttcatcttgaatgtctttgtattaaactgaattttcttttaagctaacaaagatcataattttccatgattagccgtgtaactcctgcaatgaatgtttatgtgattgaagcaaatgtgaatcgtattattttaaaaagtggcagagtgacttaactgatcatgcatgatccctcatccctgaaattgagtttatgtagtcattttacttattttattcattagctaactttgtctatgtatatttctagatattgattagtgtaatcgattataaaggatatttatcaaatccagggattgcattttgaaattataattattttctttgctgaagtattcattgtaaaacatacaaaataaacatattttaaaacatttgcattttaccaccatt

SEQ ID NO: 71164 - DNA, 909 bp, Homo Sapiens
  misc_feature (16)..(16): n is a, c, g, or t
  misc_feature (67)..(67): n is a, c, g, or t
  misc_feature (71)..(71): n is a, c, g, or t
acaaagggtggaaatnaggatggagggatacagaagtctgcacagctgtaaaggttttatagatgtntttnccttcccttctgaggaagggaagaagtaatgaaagcacatgtgaataaccccttccatcccattcacagcatcgcactcccagtccttaaggcaaagggaggcagtgctgaagcattggtggtgcagtgtaaagagacaagacctgatcatctgatcacacttgtgccaacttgattcatattgggcattactaacaacccctgggcaaggtaaataggttgaacaatcaataacattatccctgcctgcatacatgtgaacaaaagctatagaggacatgcaaattctacagtcattcctcatatgctttagacagagtgcagctactggaatcttccagatttcagtgttttaaaatcagagctctgaatacacaaaaggaaagagaaatggagcagctgacatattttaagctcacagtgatactcagtgacaggagcacagagctctaatgtccacaggatgttgtagggtagggtctctcagtaaatcaagtcccttacctatgttctgacactgaggctcttggagctatgggttagaaatccaggaggcaatatgtctttattctaatgaagtcctcatcttgcactcagaggcccactagtttgcccttctatatattaagtaaaaccaagagaaattaagaggatgatggcttctttctgtcacatgggtgctaaaccttttacaaacacttgatacttctatagagggaccaaggacctcaagtcctgggcagtctccttactgtgctactcactactgtctcaacactgtagtgagtctgtctttaacacatttccttccaataaagataaaaccacttaaactctt

SEQ ID NO: 71165 - DNA, 996 bp, Homo Sapiens
  misc_feature (924)..(945): n is a, c, g, or t
gtacgaggctgggtggcgaattcggcacgaggtcgcgtccgggtgacgtctcccgagggcgtcggcagggtcggcggcgtcggcagcagtgtcgacggcagcggcggcggcgggtgggaaatggcggagtatctggcctccatcttcggcaccgagaaagacaaagtcaactgttcattttatttcaaaattggagcatgtcgtcatggagacaggtgctctcggttgcacaataaaccgacgtttagccagaccattgccctcttgaacatttaccgtaaccctcaaaactcttcccagtctgctgacggtttgcgctgtgccgtgagcgatgtggagatgcaggaacactatgatgagttttttgaggaggtttttacagaaatggaggagaagtatggggaagtagaggagatgaacgtctgtgacaacctgggagaccacctggtggggaacgtgtacgtcaagtttcgccgtgaggaagatgcggaaaaggctgtgattgacttgaataaccgttggtttaatggacagccgatccacgccgagctgtcacccgtgacggacttcagagaagcctgctgccgtcagtatgagatgggagaatgcacacgaggcggcttctgcaacttcatgcatttgaagcccatttccagagagctgcggcgggagctgtatggccgccgtcgcaagaagcatagatcaagatcccgatcccgggagcgtcgttctcggtctagagaccgtggtcgtggcggtggcggtggcggtggtggaggtggcggcggacgggagcgtgacaggaggcggtcgagagatcgtgaaagatctgggcgattctgagccatgccatttttaccttatgtctgctagaaagtgttgtagttgattgaccaaaccagttcataaggggaattttttttnnnnnnnnnnnnnnnnnnnnnncatacaaagatgggtttctgaataaaatttgtagtgataacagtaaaaaaa

SEQ ID NO: 71166 - DNA, 783 bp, Homo Sapiens
  misc_feature (11)..(11): n is a, c, g, or t
  misc_feature (94)..(94): n is a, c, g, or t
  misc_feature (100)..(100): n is a, c, g, or t
  misc_feature (136)..(136): n is a, c, g, or t
tccccgggccncagccgagctccctccctggacactgatatccaggagctgtcagagcagatccaccggctgctgctgcagcccgtccacagcnccagcnccacgggactctgtggagtcggcgccgtgacatccncaggccctctccacagccctgggtcctccagtgatagcaacgggggtgatgcagaggggcctgggcctcctgcgccagtgagtgacctgctcctacctcaccctctaatcgccctttcccctctccttcttggaaccagcactgccagtcccagagtcttgcccgatcctcctttgccctctccttcctgccttttccttcttgtcctgctcccatcaaggcgtctgtgcctccccactggtaccttcttgttttattgtgcccttggcccctgacactggcgacaccacctggttctgctcactgtggtgctgtgtcccacaggtgactttccagcagatctgtaaggatgtgcatctggtgaagcaccagggccagcagctttttattgagtctcgggcccggcctcagtcccggccccgcctccctggtgagttgatgatgatgtgtgggtgaagagacagacctggggggtcccctgacctggactcaataattgatagattttcctagagtaacagtatgagagctccagccattccattaaaagtattagttctgctttgagctgaaaccagttgagcctaatggaagactggatgtctttcttcttcaaccgcatcacccgttcggggatgctctattgt

SEQ ID NO: 71167 - DNA, 816 bp, Homo Sapiens
tcttgctatgttgcccaggctggtcttaaacgcctgggtcaagcaaccctcccgcctccctgctgagattacaggtgtaagccaccataccgcaacctcaatgacacctttctgatggtctttacacagtctgtgatgtctggtggcccccctgccctggactcaataattgatagattttcctagagtaacagtatgagagctccagccattccattaaaagtattagttctgctttgagctgaaaccagttgagcctaatggaagactggatgtctttcttcttcatccaagcaccctaatgactgtttagttacatccatagatgcagacaacataacacctgtgacttacttgaattgggataagccattccagaagtagcttatcctagacttggaaataagatttttttcaccactaacttccatgcttcagagatgacattcaaagccagattcccaagtgcctgatcatacctcccagtctcaggaagatatttgcttaccccttagaccaagaatcttaagatcttccccagctatgaagcctatcttggaatgggaaaccatgaaatttgtcttttaaaagaaagggaagaaatagccttacagcccctgttcctccaagtgcacatttagccttaaaatcctgggagtcgggagacaccgtggagtccttacatccacagtgtctgctggtcgtggtcagaaggcagtaatgcaagagtccttttgtgaagagtgtttctatgtagagatgtttatatttaagtagttcttttataaataaaagcatttctaatggcaaaataaa

SEQ ID NO: 71168 - DNA, 1305 bp, Homo Sapiens
  misc_feature (245)..(264): n is a, c, g, or t
tccttccaatgttttatgtgaaatttggtcagagatgcaagcttgggaaaacttaaatttttttaatactcatggcagggaaaccaaatcctttatctcaatgaataatctatacttttgcaacactctatcaatcctctcctctcccttacctctaacggatacccagtgggtacacaggaaccctgtcaagctctaccccataccttctagattcatccaggatggtactcaggcatacagannnnnnnnnnnnnnnnnnnnaactctcatttgagtctgaccaacagacagggtagatgagctctctcaagattctcagctttatgttttttgttccctctcaatacctttatgcaaatgaaactgaaaccaccataagaaatccttgttaaggggaaaagaggcaaaaagacctctaaatatagtcaaggttaaccctagttctcaatttcctaatctgtgacaaaagaggggcaggaatctctaccctaaattgatgttgaggtatcgatgctaaagagtcatttcctgttactatcgttgggaaggaatgagacagctgcagagagcttcaccagaacctcaatgatggagaggtagtcattgaaaaaataagacaacttgacggaaggaaaacaaaatactgaatgggcagatgagaaacagaattatcatcagagtcttgctacaaacagggaaaaacacaaaccaagatgacacacggacatggtagattaaacattcctccccaccttcaggatacatttacattgcaataaatactgcaatctcagcagcggcaaacaaggaggaatgtaggaaatgcccacctcctcccctctgtcttatctgtgtgctctcttccttggtagcaccgatctccccaggtgctgggtgagaaacaggacagggggaagaggtccgtgcatgctcacttgccctctggccgtgcccggagcgctcagcaaacacccctctcacattcctatggcagacgctggaggatgaagggctggctgttgggtctgttcttgctctaaggccacatcctagaaaagcagggcctgtctgggtagaaaacatggccaccaaaccccaactagtgactggattttccagctgacattcagtcgactgtctacctccatcatcctcacctgatgtctaaggctgcgttccttcaaggccttgtcctgattggcaataaaataaggaaaaggtgtgaaaaccagcattcatgatgaagtggtgccctggcactcccatccttgtctgtctgacccctgcaccacagatgacgag

SEQ ID NO: 71169 - DNA, 1088 bp, Homo Sapiens
ggaggcactggcctccagagcccgtggccaaggccggcctcacgggcggcgacggcgccgggatcggtgcctcagcgttcgggctggagacgaggccaggtctccagctggggtggacgtgcccaccagctgccgaaggccaagacgccaggtccggtggacgtgacaagcaggacatgacatggtccggtgtgacggcgaggacagaggaggcgcgtccggccttcctgaacaccttaggctggtggggctgcggcaagaagcgggtctgtttctttacttcctccacggagtcggcacactatggctgccctctgggctcccagaacccacaacatgaaagaaatggtgctacccagctcaagcctgggcctttgaatccggacacaaaaccctctagcttggaaatgaatatgctgcactttacaaccactgcactacctgactcaggaatcggctctggaaggtgaagctagaggaaccagacctcatcagcccaacatcaaagacaccatcggaacagcagcgcccgcagcacccaccccgcaccggcgactccatcttcatggccaccccctgcggcggacggttgaccaccagccaccacatcatcccagagctgagctcctccagcgggatgacgccgtccccaccacctccctcttcttctttttcatccttctgtctctttgtttctgagctttcctgtctttccttttttctgagagattcaaagcctccacgactctgtttcccccgtcccttctgaatttaatttgcactaagtcatttgcactggttggagttgtggagacggccttgagtctcggtgcgagtgtgcgtgagtgtgagccaccttggcaagtgcctgcgcagggcccggccgccctccatctgggccgggtgactgggcgccggctgtgtgcccgaggcctcaccctgccctcgcctagtctggaagctccgaccgacatcacggagcagccttcaagcattccattacgccccatctcgctctgtgcccctccccaccagggcttcagcaggagccctggactcatcatcaataaacactgttacagcaaaaa

SEQ ID NO: 71170 - DNA, 1192 bp, Homo Sapiens
  misc_feature (1125)..(1125): n is a, c, g, or t
cagctcggtaccctgtcaatcctccttatgggggtgctggaggagagcttgtgggaaccaaggagcaccttgaacatctggagtctgtcaggagtgatgacgggtggaggggctagctcaaggcatggctggtggggcctgaggccagtgaggagtgtggagtaggcgcccaggcatcgtgcagacagggcgacatcagctggggacgatgggcctgagctagggctggaaagaagggggagccaggcattcatcccggtcacttttggttacaggacgtggcagctggttggacgaggggagctggtgggcagggtttgatcccagggcctgggcaacggaggtgtagctggcagcagcgggcaggtgaggaccccatctgccgggcaggtgagtcccttccctccccaggcctcgcttccccagccttctgaaagaaggaggtttaggggatcgagggctggcggggagaagcagacaccctcccagcagaggggcaggatgggggcaggagagttagcaaaggtgacatcttctcggggggagccgagactgcgcaaggctgggcgggttatgggcccgttacaggcagaaagagcaagagggcagcggagggagcacaggggtggccagcgtagggtccagcacgtggggtggtaccccaggcctgggtcagacagggacaaggcaggggacacaggacagaggggtccccagctgccacctcacccaccgcaattcatttagtagcaggcacaggggcagctccggcacggctttctcaggcctatgccggagcctcgagggctggagagcgggaagacaggcagtgctcggcggagtagcagcaggacagtcaccagcgagggcgaagcggccacgggaaggggggccccgggacattgcgcagcaaggaggctgcaggggctcgacctgagggcgccggacccaccaagcactgcggcccagggtctggtgcggagagggcccacagtggacttggtgacgctgtatgccctcaccgctcagcccctggggctggcttggcagacagtacagcatccagggaagctccgaccgacatcacggagcacccctcaagcattccattacgccccatctcgntttgtgcccctccccaccagggcttcagcaggagccctggactcatcatcaataaacactgttacag

SEQ ID NO: 71171 - DNA, 455 bp, Homo Sapiens
ccagcggaggtgaaggacgtccttccccaggagccgactggccaatcacaggcaggaagatgaaggttctgtgggctgcgttgctggtcacattcctggcaggatgccaggccaaggtggagcaagcggtggagacagagccggagcccgagctgcgccagcagaccgagtggcagagcggccagcgctgggaactggcactgggtcgcttttgggattacctgcgctgggtgcagacactgtctgagcaggtgcaggaggagctgctcagctcccaggtcacccaggaactgagggcgctgatggacgagaccatgaaggagttgaaggcctacaaatcggaactggaggaacaactgaccccggtggcggaggagacgcgggcacggctgtccaaggagctgcaggcggcgcaggcccggctgggcgcggacatggaggacgtgtgcggccgc

SEQ ID NO: 71172 - DNA, 687 bp, Homo Sapiens
gacatgatcgaatcgagctcggtaccgaacgggtgatgcggtcgtgctgttccgatggtgtctttgatgtggggctgatgaggtctggttcctctagcttcaccttccagagccgattcctgagtcaggtagtgcagtggttgtaaagtgcagcatattcatttccaagctagagggttttgtgtccggattcaaaggcccaggcttgagctgggtagcaccatttctttcatgttgtgggttctgggagcccagagggcagccatagtgtgccgactccgtggaggaagtaaagaaacagacccgcttcttgccgcagccccaccagcctaaggtgttcaggaaggccggacgcgcctcctctgtcctcgccgtcacaccggaccatgtcatgtcctgcttgtcacgtccaccggacctggcgtcttggccttcggcagctggtgggcacgtccaccccagctggagacctggcctcgtctccagcccgaacgctgaggcaccgatcccggctccgtcgccgcccgcgaggcccgccttggccacgggctctggaggccagtgcctcccgctcgccgcccgctgcgctcctcactcctgcctgcaccatcctccctcctgagagctcattcatctccgccccaaccgcatcacccgttcggtaccgagctcgattgtatcatgtat

SEQ ID NO: 71173 - DNA, 846 bp, Homo Sapiens
agggctaggtgcgaggcctgggtggtgaattcggcacgaggcattggtcccaggcagcagttagcccgccgcccgcctgtgtgtccccagagccatggagagagccagtctgatccagaaggccaagctggcagagcaggccgaacgctatgaggacatggcagccttcatgaaaggcgccgtggagaagggcgaggagctctcctgcgaagagcgaaacctgctctcagtagcctataagaacgtggtgggcggccagagggctgcctggagggtgctgtccagtattgagcagaaaagcaacgaggagggctcggaggagaaggggcccgaggtgcgtgagtaccgggagaaggtggagactgagctccagggcgtgtgcgacaccgtgctgggcctgctggacagccacctcatcaaggaggccggggacgccgagagccgggtcttctacctgaagatgaagggtgactactaccgctacctggccgaggtggccaccggtgacgacaagaagcgcatcattgactcagcccggtcagcctaccaggaggccatggacatcagcaagaaggagatgccgcccaccaaccccatccgcctgggcctggccctgaacttttccgtcttccactacgagatcgccaacagccccgaggaggccatctctctggccaagaccactttcgacgaggccatggctgatctgcacaccctcagcgaggactcctacaaagacagcaccctcatcatgcagctgctgcgagacaacctgacactgtggacggcgacaacgccggggaagagggggcgagctccccaggagccagagcggttttgcgcccg

SEQ ID NO: 71174 - DNA, 1385 bp, Homo Sapiens
  misc_feature (1252)..(1288): n is a, c, g, or t
gcaatttaggtgacactatagaacagtgttacaaaaagcaggctggtacggtcggaatcccgggatatcgtcgaccacacgtcgggtcccaggcagcagttagcccgccgcccgcctgtgtgtccccagagccatggagagagccagtctgatccagaaggccaagctggcagagcaggccgaacgctatgaggacatggcagccttcatgaaaggcgccgtggagaagggcgaggagctctcctgcgaagagcgaaacctgctctcagtagcctataagaacgtggtgggcggccagagggctgcctggagggtgctgtccagtattgagcagaaaagcaacgaggagggctcggaggagaaggggcccgaggtgcgtgagtaccgggagaaggtggagactgagctccagggcgtgtgcgacaccgtgctgggcctgctggacagccacctcatcaaggaggccggggacgccgagagccgggtcttctacctgaagatgaagggtgactactaccgctacctggccgaggtggccaccggtgacgacaagaagcgcatcattgactcagcccggtcagcctaccaggaggccatggacatcagcaagaaggagatgccgcccaccaaccccatccgcctgggcctggccctgaacttttccgtcttccactacgagatcgccaacagccccgaggaggccatctctctggccaagaccactttcgacgaggccatggctgatctgcacaccctcagcgaggactcctacaaagacagcaccctcatcatgcagctgctgcgagacaacctgacactgtggacggccgacaacgccggggaagaggggggcgaggctccccaggagccccagagctgagtgttgcccgccaccgccccgccctgccccctccagtcccccaccctgccgagaggactagtatggggtgggaggccccacccttctcccctaggcgctgttcttgctccaaagggctccgtggagagggactggcagagctgaggccacctggggctggggatcccactcttcttgcagctgttgagcgcacctaaccactggtcatgcccccacccctgctctccgcacccgcttcctcccgaccccaggaccaggctacttctcccctcctcttgcctccctcctgcccctgctgcctctgatcgtaggaattgaggagtgtcccgccttgtggctgagaactggacagtggcaggggctggagatggnnnnnnnnnnnnnnnnnnnnnnnnnnnnnnnnnnnnncgcgcgcgccagtgcaagaccgagattgagggaaagcatgtctgctgggtgtgaccatgtttcctctcaataaagttcccctgtgacactcaaaaaa

SEQ ID NO: 71175 - DNA, 529 bp, Homo Sapiens
tgagacaacaatacagacaccagatggtgaggagaggcttgggggagaggctcactccatggtctgggaccccagtggggaacgtctggctgtgcttatgaaaggaaagccaagggtacaggatggtaaaccagtcatcctcctttttcgcactcgaaacagccctgtgtttgagctccttccctgtggcattatccagggggagccaggagcccagccccagctcatcactttccatccttccttcaacaaaggggccctgctcagtgtgggctggtccacaggccgaattgcccacatcccgctgtactttgtcaatgcccagtttccacgttttagcccagtgcttgggcgggcccaggaaccccctgctgggggtggaggctctattcatgacctgcccctctttactgagacatccccaacctctgccccttgggaccctctcccagggccaccacctgttctgccccactccccacattcccacctctaagaataaataagttttccttttgttttccactca

SEQ ID NO: 71176 - DNA, 1447 bp, Homo Sapiens
  misc_feature (19)..(19): n is a, c, g, or t
cgtccgcatacgaatctancccgggacacgagtgcgggagtgcggtctgtgccgttccggccaggagttgccgactgcagacgtcctgcgaaccgtggatcaatcttcctgtcctacaactgacaaaggatcccctaaagacccctggaaggctggaccatggcacaagaactgccttcatccatcaccgggagcaagtgtggaagagatgcatcaacatttggcgtgatgtgggcctttttggggtgctaaatgaaattgcaaactcagaagaagaggtgtttgagtgggtgaagacggcatccggctgggccctggcactctgtcgatgggcctcttccctccatgggtccctgttcccccatctgtctctcaggagcgaagatctgatcgctgaatttgcccaagtcacaaattgcaccatagtcccctccctgaagcaccggctgcagcgaaatgtggcgtctctggcctggaagccccttagtgcctctgtcttggctgtggcctgccagagctgcattcttatctggaccctggaccctacctccttgtctaccccaccctcttctggctgtgcccaagtgctgtctcaccctgggcatacacctgttaccagcttggcctgggcccccagtggggggcggctgctctcagcttcacccgtggatgctgctatccgggtatgggatgtctcaacagagacctgtgtcccccttccctggtttcgaggaggtggggtgaccaacctgctctggtccccagacggcagcaaaatcctggctaccactccttcagctgtctttcgagtctgggaggcccagatgtggacttgtgagaggtggcctactctatcagggcgctgtcagactggctgctggagcccagatggcagccgactgctgttcactgtattgggagagccactgatttactccctgtctttaccagaacgtagagatgagggaaaggggtgaaaaggaggtgcaaagtcagccacgattgtggcagatctgtctgagacaacaatacagacaccagatggtgaggagaggcttgggggagaggctcactcccatggtcggggaccccagtggggaacgtctggctgtgcttatgaaaggaaagccaagggtacaggatggtaaaccagtcatcctcctttttcgcactcgaaacagccctgtgtttgagctccttccctgtggcattatccagggggagccaggagcccagccccagctcatcactttccatccttccttcaacaaaggggcccaggaaccccctgctgggggtggaggctctattcatgacctgcccctctttactgagacatccccaacctctgccccttgggaccctctcccagggccaccacctgttctgccccactccccacattcccacctctaagaataaataagttttccttttgttttccact

SEQ ID NO: 71177 - DNA, 941 bp, Homo Sapiens
  misc_feature (861)..(861): n is a, c, g, or t
ctagtacgagactggggtcgaatcggcacgaggcctgcggtaccgtccgcatacgaatctagcccgggaaccgagttgcgggagtgcggtctgtgccgttccggccaggagtttgccgactgcagacgtcctgcgaaccggcaagatgtgctctctggggttgttccctcctccaccgcctcggggtcaagtcaccctatatgagcacaataacgagctggtgacgggcagtagctatgagagcccgccccccgacttccggggccagtggatcaatcttcctgtcctacaactgacaaaggatcccctaaagacccctggaaggctggaccatggcacaagaactgccttcatccatcaccgggagcaagtgtggaagagatgcatcaacatttggcgtgatgtgggcctttttggggtgctaaatgaaattgcaaactcagaagaagaggtgtttgagtgggtgaagacggcatccggctgggccctggcactctgtcgatgggcctcttccctccatgggtccctgttcccccatctgtctctcaggagcgaagatctgatcgctgaatttgcccaagtcacaaattggtccagctgctgcttgcgtgtctttgcatggcacccccacaccaacaagtttgcagtggccctgctagatgactcagtccgtgtgtataatgccagcagcaccatagtcccctccctgaagcaccggctgcagcgaaatgtggcgtctctggcctggaagccccttagtgcctctgtcttggctgtgggctgccagagctgcattcttatcttggacccttgggaccctacctccttgtctacccgaccctcttctggctgttgcccagnggctgtctcaccctggggcatacacctgtttaccagctttggcctgggccccccaatgggggggcggctggctctcacct

SEQ ID NO: 71178 - DNA, 993 bp, Homo Sapiens
  misc_feature (882)..(882): n is a, c, g, or t
ttaggctagtacgaggctggtgttgaattcggcacgagggcggtaccgtccgcatacgaatctagcccgggaaccgagttgcgggagtgcggtctgtgccgttccggccaggagttgggccgactgcagacgtcctgcgaaccggcaagatgtgctctctggggttgttccctcctccaccgcctcggggtcaagtcaccctatatgagcacaataacgagctggtgacgggcagtagctatgagagcccgccccccgacttccggggccagtggatcaatcttcctgtcctacaactgacaaaggatcccctaaagacccctggaaggctggaccatggcacaagaactgccttcatccatcaccgggagcaatgtgtggaagagatgcatcaacatttggcgtgatgtgggcctttttggggtgctaaatgaaattgcaacactcagaagaagaggtgtttgagtgggtgaagacggcatccggctgggccctggcactctgtcgatgggcctcttccctccatgggtccctgttcccccatctgtctctcaggagcgaagatctgatcgctgaatttgcccaagtcacaaattgcaccatagtcccctccctgaagcaccggctgcagcgaaatgtggcgtctctggcctggaagccccttagtgcctctgtcttggctgtggcctgccagagctgcattcttatctggaccctggaccctactccttgtctacccgagcctcttctggctgtgcccaagtgctgtctcaccctgggcctacacctgttaccagcttggctgggccccagtggggggcggtgtctcaagttcaccgggaagctggtttccgggttggatgttcacaagaccgggttccncttcctggtttcggggggggtgcccccgcctggcccaagggaactggtcccttcggttcgttgggccatggcggaggcgccctaggcggcggtggtcacgcgtctttgacc

SEQ ID NO: 71179 - DNA, 562 bp, Homo Sapiens
gggaaactattggtgcctttttaataagttgtggtgaggagagttcaaattacagcataacagaattcgtttcgtgaattaatgcagtctgtagtaagcatatcatatagcagtattatccagttaaagaaagatacagttgaaaaacattacgttttaattctccatgagtaaagtgataagtaactataaaatcattattgggagaacatggaaacagtcaagcataacgaacttacagaaagataattatctccaaatttaggaagtacatgtacctgcctacccacctcttcaagcctatgcttaccacacgtgcaaaaatacaatacaatacaactactgcaattattactatcattttcttttgcccttaggtgaaaaacacctgacagctacatgctgagccatgctaacaaaactaaacctttcactttctttaatagtaaaattaccattactgaatcattgtcataaaaagtgcattcaagtacattaccacttattttaaataaacaccaattttgaaacaatcaactttgaaaagctgcataagtttttt

SEQ ID NO: 71180 - DNA, 1334 bp, Homo Sapiens
  misc_feature (1276)..(1294): n is a, c, g, or t
aaggtagcgaggcctgggtggcgaattcggcacgaggcgcagagcttggggcttccttggtcgcacccaccacctgcctgcccactggtcagccttcagggaccctgagcaccgcctggtctctttcctgtggccagcccagctgggaggctgtggcgtgctgggtgtcggcatctggctggccgccacacaggggagcttcgccacgctgtcctcttccttcccgtccctgtcggctgccaacctgctcatcatcaccggcgcctttgtcatggccatcggcttcgtgggctgcctgggtgccatcaaggagaacaagtgcctcctgctcactttcttcctgctgctgctgctggtgttcctgctggaggccaccatcgccatcctcttcttcgcctacacggacaagattgacaggtatgcccagcaagacctgaagaaaggcttgcacctgtacggcacgcagggcaacgtgggcctcaccaacgcctggagcatcatccagaccgacttccgctgctgtggcgtctccaactacactgactggttcgaggtgtacaacgccacgcgggtacctgactcctgctgcttggagttcagtgagagctgtgggctgcacgcccccggcacctggtggaaggcgccgtgctacgagacggtgaaggtgtggcttcaggagaacctgctggctgtgggcatctttgggctgtgcacggcgctggtgcagatcctgggcctgaccttcgccatgaccatgtactgccaagtggtcaaggcagacacctactgcgcgtaggccgcccaccgcccgcttctctgccaaaaggacgcccacggggagatggccgcacccacagctgcctttcccaccaccagcctcggtgctctgccccatgctgggaggagggagggagggacaggtgcctggagcccccggaaccctgtttctggaaggccctagctcaggtggcttcagggcctccggaccccccctgggaggggtggccacgtgctggctgcggaacccagggcaggggtgggaggggcctccagcactttttatatttacgtattctccaaagcagtgttcacacgggagccagcctgtggcccccagcctcctggaaaacaggttggcgctggaggagccgggtcttggcatcctggaggtggccccactggtcctggtgctccaggcggggccgtggacccctcacctacattccatagtgggcccgtggggctcctggtgcatcttaataaagtgtgagcagcnnnnnnnnnnnnnnnnnnncctgagcaggcggccgcaagcttattccctttagtgaggg

SEQ ID NO: 71181 - DNA, 566 bp, Homo Sapiens
  misc_feature (46)..(46): n is a, c, g, or t
atcatcaccggcgcctttgtcatggccatcggcttcgtgggctgcntgggtgccatcaaggagaacaagtgcatcctgctcactttcttcatgctgctgctgctggtgttcctgctggaggccaccatcgccatcctatttttcgcctttcccaccaccagcctcggtgctctgccccatgctgggaggagggagggagggacaggtgcctggagcccccggaaccctgtttctggaaggccctggctcaggtggcttcagggcctccggaccccccctgggaggggtggccacgtgctggctgcggaacccagggcaggggtgggaggggcctccagcactttttatatttacgtattctccaaagcagtgttcacacgggagccagcctgtggcccccagcctcctggaaaacaggttggcgctggaggagccgggtcttggcatcctggaggtggccccactggtcctggtgctccaggcggggccgtggacccctcacctacattccatagtgggcccgtggggctcctggtgcatcttaataaagtgtgagcagcaaaaaa

SEQ ID NO: 71182 - DNA, 1125 bp, Homo Sapiens
cagtcgacggtaccggacatatgcccgggaattcggccattacggccgggggttcagctgcgaggctgctggtggctgtggagagcttggggcttccttggtcgcacccaccacctgcctgcccactggtcagccttcagggaccctgagcaccgcctggtctctttcctgtggccagcccagaactgaagcgctgcggcatggcgcgcgcctgcctccaggccgtcaagtacctcatgttcgccttcaacctgctcttctggctgggaggctgtggcgtgctgggtgtcggcatctggctggccgccacacaggggagcttcgccacgctgtcctcttccttcccgtccctgtcggctgccaacctgctcatcatcaccggcgcctttgtcatggccatcggcttcgtgggctgcctgggtgccatcaaggagaacaagtgcctcctgctcactttcttcctgctgctgctgctggtgttcctgctggaggccaccatcgccatcctcttcttcgcctacacggacaagattgacaggtatgcccagcaagacctgaagaaaggcttgcacctgtacggcacgcagggcaacgtgggcctcaccaacgcctggagcatcatccagaccgacttccgctgctgtggcgtctccaaactacactgactggttcgaggtgtacaacgccacgcggggtacctgactcctgctgcttggagttcagtgagagctgtgggctgcacgccccccggaacctggtggaaggcgccgtgctacgagaacggtgacaggtgtggcttcaggagaacctgctggctgtgggcatcttagggactgtgcacgggcgctggtgcagatcctgggcctgaccttcgccatgaccatgtactgccaaggtgggtcaagggccaggacacctactgccgacgtaggccagccaccgcccgttctctgccaaaaggacgcccacggggagatgtgcgaacccactaggtgctttcccacaacagctcggtgctctgcccaatgctgcgaggagggagggaggaacaggttgcttggagcccccgggaacccttgttctggagggccctagttcaaggtggttcagggcctcggaacccct

SEQ ID NO: 71183 - DNA, 870 bp, Homo Sapiens
  misc_feature (41)..(75): n is a, c, g, or t
aaaccgacgagcgcaggagtcattgagcgaggaagcggcgnnnnnnnnnnnnnnnnnnnnnnnnnnnnnnnnnnncagtcgacggtaccggacatatgcccgggaattcggccattacggccgggggcgagcgggaggcggcggcgcagagcttggggcttccttggtcgcacccaccacctgcctgcccactggtcagccttcagggaccctgagcaccgcctggtctctttcctgtggccagcccagaactgaagcgctgcggcatggcgcgcgcctgcctccaggccgtcaagtacctcatgttcgccttcaacctgctcttctggctgggaggctgtggcgtgctgggtgtcggcatctggctggccgccacacaggggagcttcgccacgctgtcctcttccttcccgtccctgtcggctgccaacctgctcatcatcaccggcgcctttgtcatggccatcggcttcgtgggctgcctgggtgccatcaaggagaacaagtgcctcctgctcactttcttcctgctgctgctgctggtgttcctgctggaggccaccatcgccatcctcttcttcgcctacacggacaagattgacaggtatgcccagcaagacctgaagaaaggcttgcacctgtacggcacgcagggcaacgtgggcctcaccaacgcctggagcatcatccagaccgacttccgctgctgtggcgtctcccaactacactgactggttcgaggtgtacaacgccacgcgggtaccttgactcctgctgcttggaagttcagtgagagctgtgggctgcacgccccggcaccttggtggaaggcgccgtgtacgagacgggaaggtgtgggttcaggagatc

SEQ ID NO: 71184 - DNA, 943 bp, Homo Sapiens
cagtcgacggtaccggacatatgcccgggaattcggccattacggccggggggcgcgagcgggaggcggcggcgcagagcttggggcttccttggtcgcacccaccacctgcctgcccactggtcagccttcagggaccctgagcaccgcctggtctctttcctgtggccagcccagaactgaagcgctgcggcatggcgcgcgcctgcctccaggccgtcaagtacctcatgttcgccttcaacctgctcttctggctgggaggctgtggcgtgctgggtgtcggcatctggctggccgccacacaggggagcttcgccacgctgtcctcttccttcccgtccctgtcggctgccaacctgctcatcatcaccggcgcctttgtcatggccatcggcttcgtgggctgcctgggtgccatcaaggagaacaagtgcctcctgctcactttcttcctgctgctgctgctggtgttcctgctggaggccaccatcgccatcctcttcttcgcctacacggacaagattgacaggtatgcccagcaagacctgaagaaaggcttgcacctgtacggcacgcagggcaacgtgggcctcaccaacgcctggagcatcatccagaccgacttccgctgctgtggcgtctcaactacactgactggttcgaggttgtacaacgccacgcgggtacctgactcctgctgcttggagttcagttgagagcttgtggggctgcacgcccccgggcacctgggtggaaaggcgccggtgctaacgaagacggtgaacggtgtgggcttccagggagaaacctggctggctgtggggccatccttggggtctgtgcacgggcgcctgggtgcagatcctggggcttgacctttcgccatgaacatgtactggccagtggtccaggcagacacctactgcgcgttagcggccac

SEQ ID NO: 71185 - DNA, 1012 bp, Homo Sapiens
cggcgcttccagctggcggcccggctgtgttgaagccagtgtggtgggcctgttcccgtggcgtcccttgcagagaagcggcggtggcgcctacggcagtagggtccgccttgaccacttgccgttacttggtcatgccgaaggtcagcccaggatctgcaccagcgccgtgcacagcccaaagatgcccacagccagcaggttctcctgaagccaccaccttcaccgtctcgtagcacggcgccttccaccaggtgccgggggcgtgcagcccacagctctcactgaactccaagcagcaggagtcaggtacccgcgtggcgttgtacacctcgaaccagtcagtgtagttggagacgccacagcagcggaagtcggtctggatgatgctccaggcgttggtgaggcccacgttgccctgcgtgccgtacaggtgcaagcctttcttcaggtcttgctgggcatacctgtcaatcttgtccgtgtaggcgaagaagaggatggcgatggtggcctccagcaggaacaccagcagcagcagcaggaagaaagtgagcaggaggcacttgttctccttgatggcacccaggcagcccacgaagccgatggccatgacaaaggcgccggtgatgatgagcaggttggcagccgacagggacgggaaggaagaggacagcgtggcgaagctcccctgtgtggcggccagccagatgccgacacccagcacgccacagcctcccagccagaagagcaggttgaaggcgaacatgaggtacttgacggcctggaggcaggcgcgcgccatgccgcagcgcttcagttctgggctggccacaggaaagagaccaggcggtgctcagggtccctgaaggctgaccagtgggcaggcaggtggtgggtgcgaccaaggaagccccaagctctccacagccaccagcagcctcgcagctgaacctggctctgaccccaggccaccgttactcagggcatctatgtcggtgcgagaaggaga

SEQ ID NO: 71186 - DNA, 960 bp, Homo Sapiens
ggtctagggagcgaggcctgggtggcgtactcggcacgaggccccccagccccagtgtggcctgaaagacccaacagtggccagggccccgggccacactgccagcctggaggtccggccccagaggtggtgcccacgtctggggggtcactgcggcagccaaggcctgggggccaccggagccccaccctgcgtggtcccacccggagcatcgcttgggccccggcactcacagtgagcaagaggcacttgttctccttgatggcacccaagcagcccacgaagccgatggccatgacaaaggcgccggtgatgatgagcaggttggcagccgacagggacgggaaggaagaggacagcgtggcgaagctcccctgtgtggcggccaaccagatgccgacacccagcacgccacagcctcccagctggggcacagcaacaggagagacacagacagggtgaggccccaatgcaagctctggaccccagggcagagcccggaccacaagcccaaagccatgccgcctgccagcctgagccacaaccacccagagtcctgctagatcccacagcagcccgggggggtgtccagcgcaggccagtctttcccgacaccctgggctggcaccccatccccaaaccccacactccatggccacagtcagggaggctcccttgggcctctgaaacactccctctaagagggatccgcccaaccccctgacctgaagccaaaagggaccgcatcttaagccccaagaaagcagcctgcacacccctaaacccccattcaccgtctggtctgcgcaagggcaaaaggcttcactccccacctgaaaggtccactccaggccttttccaaaattgtgctgtcaagggaagacacaaccctgggccctcaaattcgggaatggggactttcctgggcaaggggggtccaaaaaaattcgcaatttccaa

SEQ ID NO: 71187 - DNA, 1083 bp, Homo Sapiens
  misc_feature (1032)..(1032): n is a, c, g, or t
gagcccctgagatctggagactgccccagcctcaggctctgtgcatctcccccgagcccccaccacatatgtgcggaggcccctgggggcccaggcctgtcctcagtcccgactgggctctacctgaggaccctggggagcctgggcctggccctcctcagagcttggggcttccttggtcgcacccaccacctgcctgcccactggtcagccttcagggaccctgagcaccgcctggtctctttcctgtggccagcccagaactgaagcgctgcggcatggcgcgcgcctgcctccaggccgtcaagtacctcatgttcgccttcaacctgctcttctggctgggaggctgtggcgtgctgggtgtcggcatctggctggccgccacacaggggagcttcgccacgctgtcctcttccttcccgtccctgtcggctgccaacctgctcatcatcaccggcgcctttgtcatggccatcggcttcgtgggctgcctgggtgccatcaaggagaacaagtgcctcctgctcactttcttcctgctgctgctgctggtgttcctgctggaggccaccatcgccatcctcttcttcgcctacacggacaagattgacaggtatgcccagcaagacctgaagaaaggcttgcacctgtacggcacgcagggcaacgtgggcctcaccaacgcctggagcatcatccagaccgacttccgctgctgtggcgtctccaactacactgactggttcgaggtgtacaacgccacgcgggtacctgactcctgctgcttggagttcagtgagagctgtgggctgcacgcccccggcacctggtggaaaggcgccgtgctacggagaacggtgaaacgtggggctttcacggagaaccctgctggctgtggggcattcttttgggctgttgcacgggcgcctggttgcaagatcccctgggcctgaacctttcgccatggaccatggtactgcccaaggtgggtcaaggggcagacaccctaacttggcgcgttaaggccgnccccaccggcccggcttttctcttgccaaaaagggacgcccccccacgggg

SEQ ID NO: 71188 - DNA, 1000 bp, Homo Sapiens
  misc_feature (121)..(121): n is a, c, g, or t
acagaaatgaaaagaagcccatgaagacctccccagagatggacattcagaatccagatgatggagcccggaaacccatacctagagacaaagtcagtgagaacaaaaggtgcttgaggtntgctagacagaatgagagctcccagcctaaggtggcagaggagagcggagggcagaagagtgcgaaggttctcatgcagaatcagaaagggaaaggagaagcaggaaattcagactccatgtgcctgagatcaagaaagacaaaaagccagcctgcagcaagcactttggagagcaaatctgtgcagagagtaacgcggagtgtcaagaggtgtgcagaaaatccaaagaaggctgaggacaatgtgtgtgtcaagaaaataagaaccagaagtcatagggacagtgaagatatttgacagaaaaatcgaactgggaaaaatataataaagttagttttgtgataagttctagtgcagtttttgtcataaattacaagtgaattctgtaagtaaggctgtcagtctgcttaagggaagaaaactttggatttgctgggtctgaatcggcttcataaactccactgggagcactgctgggctcctggactgagaatagttgaacaccgggggctttgtgaaggagtctgggccaaggcttgccctcagctttgcagaatgaagccttgaggtctgtcaccacccacagccaccatacagcagccttaactgtgacacttgccacactgtgtcgtcgtttgtttgcctatgtcctccagggcacggtggcaggaacaactatcctcgtctgtcccaacactgagcaggcactcggtaaacacgaatgaatggatgagcgcacggatgaatggagcttacaagatctgtctttccaatggccgggggcatttggtccccaaattaaggctattggacatctgcacaggacagtcctatttttgatgtcctttcctttctgaaaataaagttttgtgctttgg

SEQ ID NO: 71189 - DNA, 1518 bp, Homo Sapiens
  misc_feature (76)..(110): n is a, c, g, or t
  misc_feature (1279)..(1289): n is a, c, g, or t
tgaatcactatagggcgctagctcgctgtagtccgaacgacgagcgcagcgaagtagtgagcgaggaagcggccgnnnnnnnnnnnnnnnnnnnnnnnnnnnnnnnnnnncagtcgacggtaccggacatatgcccgggaattcggccattacggccgggtcttatgtttaactgtgtgtagccttttgagattttgtgcttgaagtgggtgattatggaagttgatataagacttaaacttggtatttaaagcctggtcaagatttccctgtcctgtgtctagtgtgagttcttgacaagagtgtttttcccttcccgtcacagagtgggcccaacgacctacggcactttgaccccgagtttaccgaagagcctgtccccaactccattggcaagtcccctgacagcgtcctcgtcacagccagcgtcaaggaagctgccgaggctttcctaggctttacctatgcgcctcccacgggactctttcctctgaaccctgttagggcttggttttaaaaggatattatgtgtgttcccgaatgttttagttagccttttggtggagccgccagctgacaggacatcttacaagagaatttgcacatctctggaagcttagcgaagtcttattgcacactgttcgctggaagctttttgaagagcacattctcctcagtgagctcatgaggttttcatttttattcttccttccaacgtggtgctatctctgaaacgagcgttagagtgccgccttagacggaggcaggagtttcgttagaaagcggacgctgttctaaaaaaggtctcctgcagatctgtctgggctgtgatgacgaatattatgaaatgtgccttttctgaagagattgtgttagctccaaagcttttcctatcgcagtgtttcagttctttattttcccttgtggatatgctgtgtgaaccgtcgtgtgagtgtggtatgcctgatcacagatggattttgttataagcatcaatgtgacacttgcaggacactacaacgtgggacattgtttgtttcttccatatttggaagataaatttatgtgtagacttttttgtaagatacggttaataactaaaatttattgaaatggtcttgcaatgactcgtattcagatgcttaaagaaagcattgctgctacaaatatttctatttttagaaagggtttttatggaccaatgccccagttgtcagtcagagccgttggtgtttttcattgtttaaaatgtcacctgtaaaatgggcattatttatgnnnnnnnnnnngcattcctgataattgtatgtattgtataaagaacgtctgtacattgggttataacactagtatatttaaacttacaggcttatttgtaatgtaaaccaccattttaatgtactgtaattaacatggttataatacgtacaatccttccctcatcccatcacacaactttttttgtgtgtgataaactgattttggtttgcaataaaaccttgaaaaatatttacaaaa

SEQ ID NO: 71190 - DNA, 694 bp, Homo Sapiens
  misc_feature (27)..(27): n is a, c, g, or t
taattcagatctttagtacaccacgtnatcatcccaaaagccaaccatttgtggaccacgtgtttactttcaccattttggataataggatatggtttcggaactttcagatcatagaagaagatgctgctcttgtagaaataggacctcgttttgtcttaaatctcataaagattttccagggaagttttggaggaccaactttatatgaaaatcctcactaccagtcaccaaacatgcatcggcgtgtcataagatccatcacagctgcaaaatacagagagaaacagcaagtgaaagatgtgcaaaaactgagaaagaaagagccgaagactcttcttccacatgatcccactgcagatgtttttgtaacaccagctgaggagaaaccaatagaaatacagtgggtaaaaccagagccaaaagttgatttgaaagcaagaaagaaacggatttacaaaaggcaaagaaaaatgaaacagaggatggacagtgggaaaacaaaataagtcaatggaaacctgatttgtttttcagttactttatatttattttgtattcaatgtgtaaatacttttattatctaatactatcttacgtctaattagtgtagcatttacaagaaagaaaaattaagatcttaaaatcagtgattatctttttctaaataaaatatcaccagaattcatcagtt

SEQ ID NO: 71191 - DNA, 536 bp, Homo Sapiens
gatatttaatttgccacggcaaagccattgctgtgaagaatggataatatatgtcaatggtaatatatgaagaaataacacaggtgaatagcagaggcaataaatctgtttttaccacaggacttgtcttacacttttctcttagtaataaataaaataattttcgaccagatggagctggcttgaaatcctcttgtttatggcagtacatatcggttatgattcaaaaaatatagcccatttccaaaaacctgcaacaaagagatactttctcaggtgtcagtttcttggtcgggaatgaaaatagtgccaacctgtgataccttcactctaattttactttctgaggaagttttctgtaatagttatttggtgataattattaatactggtgagaaaatcaatgtaaaagaggagaaataacccacacaaccacatacaactaggaaatgatagatggatctgaaaaaaaggatatgcactcttaacaagttcaacacccaagtactattgcaagtaccagctgtatttcttgg

SEQ ID NO: 71192 - DNA, 977 bp, Homo Sapiens
  misc_feature (119)..(119): n is a, c, g, or t
  misc_feature (133)..(133): n is a, c, g, or t
  misc_feature (193)..(193): n is a, c, g, or t
  misc_feature (306)..(306): n is a, c, g, or t
tgacgctgcgacatatgtgtctctgcacccgtacattgtcgtgttgtgtgattgcgtacatcccagacattgctgtcgatatcgctcattggattgctgagccagatcgccgagcgacntgattgagtctccntagacaggaacacttcatcaagaactagagctctcctcgtgtaggagacaccagagcgtntcttggaactgtggatgtccctgggggcccgagaaaacagaaggaagtgctccagaccagtaactacagcctggtctctctctgcagttcctgctgctgtcctatgacctctntgtcaattccttctcagaactgctccaaaagactcctgtcatccagcttgtgctcttcatcatccaggatattgcagtcctcttcaacatcatcatcattttcctcatgttcttcaacaccttcgtcttccaggctggcctggtcaacctcctattccataagttcaaagggaccatcatcctgacagctgtgtactttgccctcagcatctcccttcatgtctgggtcatgaacttacgctggaaaaactccaacagcttcatatggacagatggacttcaaatgctgtttgtattccagagactagggctttgattcctgggtctaagaaggacagcaagtcctgctaaatgttaaacactgacggcaattaaagccccatcttcacgcccggtagaagatgccaatcaaaataaacttcattcctgaagcacggggctggaaaatcaaagctattcaactcctcaaggcccagggactatcaagaaagaggcggacagatgagattgtaaaggctgattttgagagataaaataagttcagtttccctataaattaatcattaatgtcaaaggcacactgaagcaagaccagcatatgggcctctgtgtcagattaacaaggttttcttgaagcagtaactgactccttaataaaggttataaaagtt

SEQ ID NO: 71193 - DNA, 1753 bp, Homo Sapiens
  misc_feature (12)..(12): n is a, c, g, or t
aagtatgaagtnacggcgcgccgaattcggcacgaggtatggccagtctggccgccatgttggagctttcgctgttcggggcccggcctgctccgggccctcccagcgtcgccgctagctgacttagggctcccgcccacactgcgcacggccttgctgagggccggctcgtagtgggaggcttcgcgttcacctgaacatttccgcctcctctggatgggggatgagaggcggggctgatgcatcgcagcagtcctggaccctgacttcggacttggagaagaaacgccgaggaggaacgggagttagggggttagcagcttggcgcgctgggagccggccacccctggtctccggacttcacttcccaggaggcctcgcgcgcgactggaagtgctgcgagcctataagaaggcgaggcggcacccgccgctctgctctggggcggcattgccagccggctgtaggcattcagggcagtgtcttctgcatctcctaggaacctcgggagcggcagctccggcgcctggtagcgagaggcgggttccggagatcccggcctcacttcgtcccactgtggttaggggtgagtcctgcaaatgttaagtgatttgctcaaggtgcccatttcgcaggaattggagcccaggccagttctctgagcctatcattagggctaaaggagtgcgtgatcagaatggtgtctggacggttctacttgtcctgcctgctgctggggtccctgggctctatgtgcatcctcttcactatctactggatgcagtactggcgtggtggctttgcctggaatggcagcatctacatgttcaactggcacccagtgcttatggttgctggcatggtggtattctatggaggtgcgtcactggtgtaccgcctgccccagtcgtgggtggggcccaaactgccctggaaactcctccatgcagcgctgcacctgatggccttcgtcctcactgttgtggggctggttgctgtctttacgtttcacaaccatggaaggactgccaacctctactcccttcacagctggctgggcatcaccactgtcttcctcttcgcctgccagtggttcctgggctttgctgtcttcctcctgccctgggcgtccatgtggctgcgcagcctcctaaaacctatccacgtctttttttggagccgccatcctctctctgtccatcgcatccgtcatttcgggcattaatgagaagcttttcttcagtttgaaaaacaccaccaggccataccacagcctgcccagtgaggcggtctttgccaacagcaccgggatgctggtggtggcctttgggctgctggtgctctacatccttctggcttcatcttggaagcgcccagagccggggatcctgaccgacagacagcccctgctgcatgatggggagtgaagcagcaggaaggggctcccaagagctcctggtggtgcagcctgtgctcccctcagaagctctgctcttcccagggctcccggctggtttcagcaggcgactttcttccaatgctgggcccagacttcttgcctgggtgctggcctgccctctccggccgcttgctgcctgtctgctttccttggtggctttgcctgggtgctgggcctgccctctccggccgcttgctgcctgcctgctttccttggtggctttgcctgggtgctgggcctgccttctctggctgcttgctgcctgtctgctttccttggtggctttggcttttg

SEQ ID NO: 71194 - DNA, 1183 bp, Homo Sapiens
gggtccggaagccgggacgatgtccgcatgacaaccgacgttggagtttggaggtgcttgccttagagcaagggaaacagctctcattcaaaggaactagaagcctctccctcagtggtagggagacagccaggagcggttttctgggaactgtgggatgtgcccttgggggcccgagaaaacagaaggaagatgctccagaccagtaactacagcctggtgctctctctgcagttcctgctgctgtcctatgacctctttgtcaattccttctcagaactgctccaaaagactcctgtcatccagcttgtgctcttcatcatccaggatattgcagtcctcttcaacatcatcatcattttcctcatgttcttcaacaccttcgtcttccaggctggcctggtcaacctcctattccataagttcaaagggaccatcatcctgacagctgtgtactttgccctcagcatctcccttcatgtctgggtcatgaacttacgctggaaaaactccaacagcttcatatggacagatggacttcaaatgctgtttgtattccagagactagcagcagtgttgtactgctacttctataaacggacagccgtaagactaggcgatcctcacttctaccaggactctttgtggctgcgcaaggagttcatgcaagttcgaaggtgacctcttgtcacactgatggatacttttccttcctgatagaagccacatttgctgctttgcagggagagttggccctatgcatgggcaaacagctggactttccaaggaaggttcagactagctgtgttcagcattcaagaaggaagatcctccctcttgcacaattagagtgtccccatcggtctccagtgcggcatcccttccttgccttctacctctgttccaccccctttccttcctttcctctctgtaccattcattctccctgaccggcctttcttgccgagggttctgtggctcttacccttgtgaagcttttcctttagcctgggacagaaggacctcccagcccccaaaggatctcccagtgaccaaaggatgcgaagagtgatagttacgtgctcctgactgatcacaccgcagacatttagatttttatacccaaggcactttaaaaaaatgttttataaatagagaataaattgaattcttgttccataaa

SEQ ID NO: 71195 - DNA, 1130 bp, Homo Sapiens
ttttttggagccgccatcctctctctgtccatcgcatccgtcatttcgggcattaatgagaagcttttcttcagtttgaaaaacaccaccaggccataccacagcctgcccagtgaggcggtctttgccaacagcaccgggatgctggtggtggcctttgggctgctggtgctctacatccttctggcttcatcttggaagcgcccagagccggggatcctgaccgacagacagctgctgctacagctgaggcctggatcccggcctttccctgtaacttacgtgtctgtcaccggcaggcagccctacaaatcctggtgacctgctctcccaagaacagagcctgtccccagatgtcccagtagcgatgagtaacagaggtggctgtggacttcctctacttctccttgctggatcagggccttcctgcctcccgctgggcaggtctggccttgctctcttggcagggccccagcccctctgaccactctgcagctcaccatgcagctgatgccaaagttgtggtgtccagtgtgcagcagccctgggagccactgccaccttcagaggggttccttgctgagacccacattgcttcacctggccccaccatggctgcttgcctggcccaacctagcgttctgtgccatgctagagcttgagctgttgctcttcttcaggggaggaaatagggtggagagcgggaagggtcttgctcctaagtgttgctgctgtggcttttttgccttctccaaagacgcactgccaggtcccaagcttcagactgctgtgcttagtaagcaagtgagaagcctggggtttggagcccacctactctctggcagcatcagcatcctactcctggcaacatcaggccaacgtccaccccagcctcacattgccagatgttggcagaagggctaatattgaccgtcttgactggctggagccttcaaagccactgggatgtcctccaggcacctgggtcccatgaccagctccccgtctccataggggtaggcatttcactggtttatgaagctcgagtttcattaaatatgttaagaatcaaagctgtctttgttcaggctgctataacaaaaatataatagcctgggtggcttaaaaaa

SEQ ID NO: 71196 - DNA, 758 bp, Homo Sapiens
tctcgtaccgatatttgtggttctggcccagtgtgtggtctactttgccagagccccaaagtccattgaggtgtacagcgcctacaacaacgtcaaagcctgcctgaggaaccaccaggggccactgccccccgtgcccctgcacctgaggaacgcgcccactaggctgatgaaggatttgggctatggcaaaggctacaagtacaaccccatgtacagcgagcctgtggatcaggagtacctgcctgaagagttgaggggggtagatttcttcaagcagaggaggtgctgactcctcagggcacgacagcagaaggatgttgcttttttaagggagggccagaaagaaagttagtggattgcaaagttggttgcctggtggaagttagaacagaccaacattttgtgccagaaatttaagagttccataggtggaggcgcagttctttcgaataaatgtgtaactttgaaattgtgttcatttgcactcggtgcagcggttatgcttatgaaaatacctggcagctttgtgcaatgaattaatgttataaggaattatctattttgtcatagtatttaagtcataatgtcatttcagaattcagttctgtaggattttcttttctttaaaaaatgtatattctgggtagttttaattggtaaaaaaatgtaattgtgatttaatactgcatagtgttttgggtattttttttatatgcaaaggtcttacgagccaataaaactatttcaaagtaaaa

SEQ ID NO: 71197 - DNA, 827 bp, Homo Sapiens
  misc_feature (18)..(18): n is a, c, g, or t
  misc_feature (69)..(69): n is a, c, g, or t
  misc_feature (170)..(170): n is a, c, g, or t
tatatatattttatggtngcatgtgtctttctagttatagcaatatacacatacatgcataaatacatntacacctatgtaaatgtgtgttgggagtatgtattcacacagatacatataccccaaggccatgtgtcatctttatcaatatttaagttttggaattgttntgtttgcctcctatatcatggaataaatggtaaagagggctaatttattactctaagtggatttcttattacattaatatcagacatatagaatgtactttgttttactatttgtaagatacaaaggtatataaactgacatacatcagcttgaaacctgagataatgctaaaatgttctaattattttaaatgtttaaagaggacaaccatgtaatgctgctaaacatgaaaaatgtcatcaagtggaataaagaatagctgaagttaacatttgggggaaattgagctgaaaacaaaaatatgagtattttgataccttttctttaccatgagactcttgactatgaagtcaaatttatctaaaggaaaaacaggaattctggagacctgtgtaaaagcagactattatcttcctactgtgagagtactaaaattaaaatacgtttaatgacgttttcctcaatgtaaaagcattgaagtaaatgtttcttttatgttgcagatacatagttgctctagagatcacctttttctttatgcgttgtgaatagcagtctgcatcctaagtttaaaatatttgagaatcctctatgggactctctgtaaatgttttaaatactgttgttttcaataaatattttatactatctgaaaa

SEQ ID NO: 71198 - DNA, 1236 bp, Homo Sapiens
  misc_feature (48)..(48): n is a, c, g, or t
  misc_feature (66)..(67): n is a, c, g, or t
  misc_feature (123)..(123): n is a, c, g, or t
  misc_feature (126)..(126): n is a, c, g, or t
  misc_feature (153)..(154): n is a, c, g, or t
  misc_feature (167)..(167): n is a, c, g, or t
  misc_feature (200)..(200): n is a, c, g, or t
  misc_feature (944)..(955): n is a, c, g, or t
ttagattgcctcggccagatcgcagagctgatcccgtcatatctctcngccttgaggagtctcttnntccccactgccgctgtccagacgtgggcccactggggcccggatgggctctctctntgnagggtgcagtgcctccccagctggagnntcctcctagctcnccactgccccgctgttagagtggctccctgtcntgaactcctggcattggaacagacattccagcattgttgtggtgtttactcacctacccttagaaaatgaatgttagaaggtgcctgccgaggcgggacagagtgttcgctcgcgctggagaaggctctgctcagccctgagagtcccttcctgccccaccgatactggcactttaaaaaggaagctgaccgcacagtgtccagacgaattggcccccagaagatggggagttctgtcctgcccttctgtgtctgcgtgacctcacccagcctaggagggaggtgcattcagggtagatttgcctctcattcaaagttctggggctttgggcggaaaacagccagctttggcgctgttggggagactcctccagaccaggaaccccagaaggagacagagcctgccacatcctcccacgccaggccctgggccagggtgattggactgagaatttggccacaaccaaattgatgctggctggaaccagaggccagaaagcctggccttgtccccatgtgggagccctgtcctcagccctcttgtccccttgagctcagtgaattcccaccaggtgcccacagctcctggacttcaaattctatatattgagagagttggagagtatatcagagatatttttggaaaggagttggtctatgcaatgtcagtttggaatcttcttgaaagtttaatgtttttattaggagatttaaagaaaataaaggtctacaatatctttaggnnnnnnnnnnnncctgtttaccgcacaaactgaccacatggcatgtctatcaggatggagggtgtccatgttctcctctgtctttagggaggtgataaggagatgggcggaggggtgtttttttctttgactcccctcctttctaacagaatgttgccaccactgcttgagtgggctgtgtttgttcctctgtcccagcttctgttgtagaaaataacattgttaggggaactcaggctagtgtcagcgtcttggtttggggagaaaaaattaaatgtttcggtttttgtttc

SEQ ID NO: 71199 - DNA, 485 bp, Homo Sapiens
  misc_feature (398)..(408): n is a, c, g, or t
gtgcgggatcggaattccatttttcagatgggaaaagtgaggctcagagaaaggaatctggaacgatgaaggtgatgattgtgcctgtggccaagaccgggagaaccctggatccctacaccttccccacccctggaatgtcactatacatatctgacttcttctgatgttgcctttgaccctaaagtcaatatgataaagtaacaagaagctgggacagaggaacaaacacagcccactcaagcagtggtggcaacattctgttagaaaggaggggagtcaaagaaaaaaacacccctccgcccatctccttatcacctccctaaagacagaggagaacatggacaccctccatcctgatagacatgccatgtggtcagtttgtgcggtaaacaggnnnnnnnnnnncctaaagatattgtagacctttattttctttaaatctcctaataaaaacattaaactttcaagaagattccaaactg

SEQ ID NO: 71200 - DNA, 694 bp, Homo Sapiens
ctcattgagcattatgggaagctggccttcaacctggactactacacagaggttctggacctctcctacctgcttgaccacctggcttctgaccctttcttccgccactaccgccagctcaatgagaagctagtgcagctcatcgaagactatagccttgtctcctttatccctctcaacatccaggacaaggagagcatccagcgagtcctgcaggctgtggataaagccaatggatactgtttcggagcccaagagcagcgaagcttggaagccatgatgtctgccgcaatgggagccgacttccatttctcttccacactgggcatccaggagaagtacctggcaccctcgaaccagtcagtggagcaggaagccatgcagctgtagcaacaaggtggaccctggagagcaggatgcataatccagcactggggaaagtggaggctcctgatgcaggctgcagacccaagagcaagtcctcccagccagagctggcgggctggcaaggggatattcagctctgcaaaggacttctggccaaaaagccagacatggtgccaagcagaacaccccccatactgtcagtggtgtccgtgagctctgggccctgccaccagaaagtcgagcactggtcctagtcaggctgtgatgaaatgtgctacaatacaagagtttattttcttacaaatta

SEQ ID NO: 71201 - DNA, 688 bp, Homo Sapiens
cggatgtaatgccaccaatttcaaataactaaaatgtgaccaattactttgcttcaagttctatacaaatatctctgaaatctgtaagccatatttcagctattctggtttttataatacattctaccctaaattaaccaaaggactttttattcagtgtattccatgtttcagcataaggaaagtttgtgcctgatatggcaggagaaagaacactatggtaatttcattgttacttcaggtctctttcaatctgaagaactgggttgtctggagaattgaacatagccaagcaatattatcaattagtaatgtcatcttaaaaatgttcacttttactaagttttattcagaggatctatgtattattagaaaaatgaagtatttctgacatggaacaaagaaagtggaaactggtacttaatgggggaagcaaaattagctgggactaaaacggacatgttttgttttgtgaattctacctaaatgtctctctatccacagagaaactagtattacttgaagatgtgaaagttcctgtggtagccataccttgaagcacagtgtttgtacataagtaaatatcttgattctaaattaaatccagatttaactaatatatattattttatatctttgttgtattaaaatgtttaaaaacactaaaaataaaacatttgaaagttgg

SEQ ID NO: 71202 - DNA, 974 bp, Homo Sapiens
  misc_feature (17)..(17): n is a, c, g, or t
  misc_feature (204)..(204): n is a, c, g, or t
aacccaagaacccaagnatttttaggaagctgggaatggaggggcagggatcccatgggaagatgtcggggatgaaggtgggaacccggaggtggcaggggggacccggaaacatggatgggagtgacaggccctttctccttaagaggccagagggtgctgcccctgcctgggagtgaagctccagggccactaccagctttncctgattttcccgtttggtccagtgtgaagagctaccacgagccccagcctcacagtgtccactcaagggcagcttggtcctcttgtcctgcagaggcaggctggtgtgaccctgggaacttgacccgggaacaacaggtggtccagagtgagtgtggcctggcccctcaacctagtgtccgtcctcctctctcctggagccagtcttgagtttaaaggcattagtgttagatacagctccttgtggctggaaaacacccctctgctgataaagctcagggggcactgaggaagcagaggccccttgggggtgccctcctgaagagagcgtcaggccatcagctctgtccctctggtgctcccacgtctgttcctcaccctccatctctgggagcagctgcacctgactggccacgcgggggcagtggaggcacaggctcagggtggccgggctacctggcaccttatggcttacaaagtagagttggcccagtttccttccacctgaggggagcactctgactcctaacagtcttccttgccctgccatcatctggggtggctggctgtcaagaaaggccgggcatgctttctaaacacagccacaggaggcttgtagggcatcttccaggtggggaaacagtcttagataagtaaggtgacttgcctaaggcctcccagcacccttgatcttggagtctcacagcagactgcatgtgaacaactggaaccgaaaacatgcctcagtataaaacaaacattataaaacg

SEQ ID NO: 71203 - DNA, 658 bp, Homo Sapiens
  misc_feature (29)..(29): n is a, c, g, or t
  misc_feature (88)..(88): n is a, c, g, or t
gccaaccccctggcaagcattctgtaggngaccctagaagaatcaccgtgcagactggtgaaactgaacaagcaccatttgggagctntgtttcgatggggttgacagagaaatcttaaaatctgacagggtagaagaagcactttggcatcaatgccatatgtacagtcttgactatttctgagtcatctagtggctccaatttgctccagggaaattggaattaattaagaaatttattatctagtaagttgctatgtaataaagaaaaaaaagaaattcaatccaatgacacacaccacatgtatttgggcagagtcagattctctcagctattttgagtctgtggaagaaacaaaaaaaagcttcctcctgaggatgggttattgtcatcaagaagccacctgcatagccgtatccattacctcatggtaattcccggtgctttcccctcatatcccctagaagcaaatatctgttctgaggttttttgggacttctggctgcaataggagcaagggacccaggcagggcagagcaataccttccgaagcttccatattccctggggccagcacatgcaaggtttatatggtcagtagctcacgtgaagtcatctgaatctttcttaaatctgctctcttaaaatctcttatgc

SEQ ID NO: 71204 - DNA, 1270 bp, Homo Sapiens
  misc_feature (1085)..(1180): n is a, c, g, or t
tgcacccacccccgaccactacatatcaggacgtcatcctaggcactcggaagacctatgccatatatgacttgcttgacaccgccatgatcaacaactctcgaaacctcaacatccagctcaagtggaagagacccccagagaatgagccccccccagtgcccttcctgcatgcccagcggtacgtgagtggctatgggctgcagaagggggagctgagcacactgctgtacaacacccacccataccgggccttcccggtgctgctgctggacaccgtaccctggtatctgcggctgtatgtgcacaccctcaccatcacctccaagggcaaggagaacaaaccaagttacatccactaccagcctgcccaggaccggctgcaaccccacctcctggagatgctgattcagctgccggccaactcagtcaccaaggtttccatccagtttgagcgggcgctgctgaagtggaccgagtacacaccagatcctaaccatggcttctatgtcagcccatctgtcctcagcgcccttgtgcccagcatggtagcagccaagccagtggactgggaagagagtcccctcttcaacagcctgttcccagtctctgatggctctaactactttgtgcggctctacacggagccgctgctggtgaacctgccgacaccggacttcagcatgccctacaacgtgatctgcctcacgtgcactgtggtggccgtgtgctacggctccttctacaatctcctcacccgaaccttccacatcgaggagccccgcacaggtggcctggccaagcggctggccaaccttatccggcgcgcccgaggtgtccccccactctgattcttgccctttccagcagctgcagctgccgtttctctctggggaggggagcccaagggctgtttctgccacttgctctcctcagagttggcttttgaaccaaagtgccctggaccaggtcagggcctacagactgtgttgtccagtacaggagccacgagcctaaatgtggcatattgaatttgaattaactgtagaaattcatttcctcacctgtagtggccacctctatannnnnnnnnnnnnnnnnnnnnnnnnnnnnnnnnnnnnnnnnnnnnnnnnnnnnnnnnnnnnnnnnnnnnnnnnnnnnnnnnnnnnnnnnnnnnnnnggccaaggtgatggggtgtgctacacagtgtatgtcactgtgtagtggatggagtttactgtttgtggaataaaaacggctgtttccgtg

SEQ ID NO: 71205 - DNA, 1103 bp, Homo Sapiens
  misc_feature (962)..(962): n is a, c, g, or t
agtatccgcaggcatggcggcggctatgccgcttgctctgctcgtcctgttgctcctggggcccggcggctggtgccttgcagaacccccacgcgacagcctgcgggaggaacttgtcatcaccccgctgccttccggggacgtagccgccacattccagttccgcacgcgctgggattcggagcttcagcgggaaggagtgtcccattacaggctctttcccaaagccctggggcagctgatctccaagtattctctacgggagctgcacctgtcattcacacaaggcttttggaggacccgatactgggggccacccttcctgcaggccccatcaggtgcagagctgtgggtctggttccaagacactgtcactgatgtggataaatcttggaaggagctcagtaatgtcctctcagggatcttctgcgcctctctcaacttcatcgactccaccaacacagtcactcccactgcctccttcaaacccctgggtctggccaatgacactgaccactactttctgcgctatgctgtgctgccgcgggaggtggtctgcaccgaaaacctcaccccctggaagaagctcttgccctgtagttccaaggcaggcctctctgtgctgctgaaggcagatcgcttgttccacaccagctaccactcccaggcagtgcatatccgccctgtttgcagaaatgcacgctgtactagcatctcctgggagctgaggcagaccctgtcagttgtatttgatgccttcatcacggggcagggaaagaaagactggtccctcttccggatgttctcccgaaccctcacggagccctgccccctggcttcagagagccgagtctatgtggacatcaccacctacaaccaggacaacgagacattagaggtgcacccacccccgacacttacatatcaggacgtcatcctaaggcactcggaaaaacttatgnccatctatgacttggcttgaaaccgccatgatcaacacttcttgaaaactcaacatccagcttcagtggaagaaaaccccaaagaatgtagggcccccccggggccccttcttgaatggccccacgggaaccggggaaggc

SEQ ID NO: 71206 - DNA, 588 bp, Homo Sapiens
  misc_feature (91)..(186): n is a, c, g, or t
  misc_feature (525)..(525): n is a, c, g, or t
cacggaaacagccgtttttattccacaaacagtaaactccatccactacacagtgacatacactgtgtagcacaccccatcaccttggccnnnnnnnnnnnnnnnnnnnnnnnnnnnnnnnnnnnnnnnnnnnnnnnnnnnnnnnnnnnnnnnnnnnnnnnnnnnnnnnnnnnnnnnnnnnnnnnntatagaggtggccactacaggtgaggaaatgaatttctaagttaattcaaattcaaatgccacatttggctcgtggctcctgtactggacaacacagctgtaggccctgacctggtccagggcactttggttcaaaagccaactctgaggagagcaagtggcagaaacagcccttgtggctcccctccccagagagaaacggcagctgcagctgctggaaagggcaagaatcagagtggggggacacctcgggcgcgccggataaggttggccagccgcttggccaggccacctgtgcggggctcctcgatgtggaaggttcgggtgaggagattgtanaaggagccgtagcacacggccaccacagtgcacgtgaggcagatcacgttgtagggcatgctg

SEQ ID NO: 71207 - DNA, 448 bp, Homo Sapiens
  misc_feature (26)..(26): n is a, c, g, or t
  misc_feature (259)..(354): n is a, c, g, or t
ggggcgcccgaggtgtccccccactntgattcttgccctttccagcagctgcagctgccgtttctctctggggaggggagcccaagggctgtttctgccacttgctctcctcaaagttggcttttgaaccaaagtgccctggaccaggtcagggcctacagctgtgttgtccagtacaggagccacgagccaaatgtggcatttgaatttgaattaacttagaaattcatttcctcacctgtagtggccacctctatannnnnnnnnnnnnnnnnnnnnnnnnnnnnnnnnnnnnnnnnnnnnnnnnnnnnnnnnnnnnnnnnnnnnnnnnnnnnnnnnnnnnnnnnnnnnnnnggccaaggtgatggggtgtgctacacagtgtatgtcactgtgtagtggatggagtttactgtttgtggaataaaaacggctgtttccgtgaaaa

SEQ ID NO: 71208 - DNA, 919 bp, Homo Sapiens
tcggacatcccggtgatggcatggcggcggctatgccgcttgctctgctcgtcctgttgctcctggggcccggcggcgtggtgccttgcagaacccccacgcgacagcctgcgggaggaacttgtcatcaccccgctgccttccggggacgtagccgccacattccagttccgcacgcgctgggattcggagcttcagcgggaaggagtgtcccattacaggctctttcccaaagccctggggcagctgatctccaagtattctctacgggagctgcacctgtcattcacacaaggcttttggaggacccgatactgggggccacccttcctgcaggccccatcagacactgaccactactttctgcgctatgctgtgctgccgcgggaggtggtctgcaccgaaaacctcaccccctggaagaagctcttgccctgtagttccaaggcaggcctctctgtgctgctgaaggcagatcgcttgttccacaccagctaccactcccaggcagtgcatatccgccctgttttgcagaaatgcacgctgtactagcatctcctgggagctgaggcagaccctgtcagttgtatttgatgccttcatcacggggcagggaaagaaagactggtccctcttccggatgttctcccgaaccctcacggagccctgccccctggcttcagagagccgagtctatgtggacatcaccacctacaagcaggacaacgagacattagaggtgcacccaaccgcgaccactacatatcaggacgtcatcctagggcactccggaagaaccttattgccatctatgacttggcgtggaaccggccatgatcaacaaatctcgaaacctccaacatccaaggtcaagtgtgaagagaaccccagaagaattgggggccccccccaatggcca

SEQ ID NO: 71209 - DNA, 705 bp, Homo Sapiens
  misc_feature (19)..(19): n is a, c, g, or t
  misc_feature (163)..(201): n is a, c, g, or t
  misc_feature (205)..(213): n is a, c, g, or t
ctcctttctctccctgctntctgtgaaggagaaattagcctggcctctaccccctattccctgtgtctgccaaccccaggatcccagggctccctgccattttagtgtcttggtgtagtgtaaccatttagtggttggtggcaacaattttatgtacaggtgnnnnnnnnnnnnnnnnnnnnnnnnnnnnnnnnnnnnnnntttnnnnnnnnncggacaggagatgggtgcaactccctcccatcctactctcacagaagggcctggatgcaaggttacccttgagctgtgtgccacagtctggtgcccagtctggcatgcagctacccaggcccacccatcacgtgtgattgacatgtaggtaccctgccacggcctatgccccacctgccctgcttcctggctccttatcagtgccatgagggcagaggtgctacctggccttcctgccaggagctctccacccactcacattccgtccccgccgcctcactgcagccagcgtggccctaggacaggaggagcttcgggcccagcttcaccctgcggtggggctgaggggtggccatctcctgccctggggccactggcttcacattctgggctgactcataggggagtaggggtggagtcaccaaaaccagtgctgggacaaagatggggaaggtgtgtgaactttttaaaataaacacaaaaacacagaaa

SEQ ID NO: 71210 - DNA, 747 bp, Homo Sapiens
gattcccgggatatcgtcgacccacgcgtccgcgactcggaggttcgcctccagcttgcgcatcatctgcggccgggtcccgatgagcctcctgttgcctccgctggcgctgctgctgcttctcgcggcgcttgtggccccagccacagccgccactgcctaccggccggactggaaccgtctgagcggcctaacccgcgcccgggtagagacctgcgggggatgacagctgaaccgcctaaaggaggtgaaggctttcgtcacgcaggacattccattctatcacaacctggtgatgaaacacctccctggggccgaccctgagctcgtgctgctgggccgccgctacgaggaactagagcgcatcccactcagtgaaatgacccgcgaagagatcaatgcgctagtgcaggagctcggcttctaccgcaaggcggcgcccgacgcgcaggtgccccccgagtacgtgtgggcgcccgcgaagcccccagaggaaacttcggaccacgctgacctgtaggtccgggggcgcggcggagctgggacctacctgcctgagtcctggagacagaatgaagcgctcagcatcccgggaatacttctcttgctgagagccgatgcccgtccccgggccagcagggatggggttggggaggttctcccaaccccactttattccttccccagctccactaaattccctcctgccttataaaaagaaacaacgatctccatacaaaaaaaggg

SEQ ID NO: 71211 - DNA, 158 bp, Homo Sapiens
actaagggcagggtattatatctgccagactgggtatttgttgaacaagcgagtattttcgcctattagcttagtttttaaggaaatcattttttacttgattcatcatagctttaattctattacatactacaataaaaatttgacaagactgatac

SEQ ID NO: 71212 - DNA, 1981 bp, Homo Sapiens
  misc_feature (1691)..(1691): n is a, c, g, or t
  misc_feature (1714)..(1773): n is a, c, g, or t
  misc_feature (1811)..(1829): n is a, c, g, or t
ggacgcgtgggcggacgcgtgggcggacgcgtgggcaagtgcccatgcccacctctactcccagcatcccagcttccaaactcagcaggccaagctgatctacaagtgcgccatgtgcgacacagtcttcactcacaaacccctcctctcctcacacttcgaccagcacttgctgccccagcgtgtcagtgtctttaagtgcccgtcttgtcctctgctctttgcccaaaaaaggaccatgctggaacatctcaagaacacccatcagtctgggcgcttggaggagactgctgggaaaggggccgggggtgccctgctgacccccaagactgagcctgaggagctggctgtttctcagggaggggcagcccctgctactgaggagtcgtcttcatcttcagaagaggaggaagtacccagctcccctgagcccccccgtccagccaaacggcctcggcgggaactagggagcaaaggcctcaagggtgggggtggggggcctggaggctggacctgtggcctgtgtcactcctggttccctgagcgtgatgaatacgtggcccacatgaagaaggagcatggcaagtcagtgaaaaagttcccctgtcgcctgtgtgagcgctccttctgctccgcccccagcctgaagcgccatgtcagagttaatcacgagggcatcaagcgagtttacccctgcaggtattgcacagagggaaaacgcaccttcagcagccgcctgatcctagagaaacatgtccaggtccggcacggcttgcagcttggggcccagtcccctggccgggggaccaccttggctcggggttccagtgccagagcccaggggccaggtcggaaacgccgccagtcttctgactcttgcagtgaggagcctgacagcacgacaccgccagccaagtcccccaggggcggacctggatctggaggccatggccctctgcgctaccggagcagcagctccacagaacagagcctcatgatggggttgagggtggaggatggtgcccagcagtgcctcgactgtggcttgtgctttgcctcccctggctccctgagccgacaccgtttcatcagccacaagaagagacggggtgtgggtaaagccagtgccctggggctgggggatggggaggaagaggcccctccatcaaggtctgaccccgatggtggagactcacccctgcctgcttctggaggcccactgacctgtaaggtctgtggcaagagctgcgacagccctctaaacctcaagacccacttccgcacgcatggcatggcgttcatcagggctcggcagggggctgttggggacaacaactagtctccaaggcctgggactgaccagccccttcctcttggagcctggttttccctactgctgcctgatccctcggctggggagttttcattaacattaatattttgttaattcctgtctctccaacctgaagaagaagagcatttgaggattattctagttatttgcaacctccctttgggtttggccctggagtcctagtagagtggaccctccattcctcctttctgagcccaacactaattaattttatgctcctgctgcagaacccccagtggggggcctgggggtgggaggatgggacttaggtatgcctgctagacaggttcaggcatggactggaactttcctcctntaggccgggccctgccctagtgnnnnnnnnnnnnnnnnnnnnnnnnnnnnnnnnnnnnnnnnnnnnnnnnnnnnnnnnnnnntgcagtgcctttcacttctttttttccccagaaatccnnnnnnnnnnnnnnnnnnnttggtagggatgagtcctgtcaagggggccacaggagaggaggggacaggctctcaggaatcctttattcttgtagtaataataatactaacaaacagttggggaactagggagaaaaccagaccattaaaactgtttgtggtcgaatctcc

SEQ ID NO: 71213 - DNA, 1670 bp, Homo Sapiens
gcggccgctgtcagggaagcgcaggcggccaatggaacccgggagcggtcgctgctgctgaggcggcagtgtcggcagtccaaccgcgactgcccgcaccccctccgcgggggtcccccagagcttggaagctcgaagtctggctgtggccatgggagatacagtagtggagcctgcccccttgaagccaacttctgagcccacttctggcccaccagggaataatggggggtccctgctaagtgtcatcacggagggggtcggggaactatcagtgattgaccctgaggtggcccagaaggcctgccaggaggtgttggagaaagtcaagcttttgcatggaggcgtggcagtctctagcagaggcaccccactggagttggtcaatggggatggtgtggacagtgagatccgttgcctagatgatccacctgcccagatcagggaggaggaagatgagatgggggccgctgtggcctcaggcacagccaaaggagcaagaagacggcggcagaacaactcagctaaacagtcttggctgctgaggctgtttgagtcaaaactgtttgacatctccatggccatttcatacctgtataactccaaggagcctggagtacaagcctacattggcaaccggctcttctgctttcgcaacgaggacgtggacttctatctgccccagttgcttaacatgtacatacacatggatgaggacgtgggtgatgccattaagccctacatagtccaccgttgccgccagagcattaacttttccctccagtgtgccctgttgcttggggcctattcttcagacatgcacatttccactcaacgacactcccgtgggacaaagctacggaagctgatcctctcagatgagctaaagccagctcacaggaagagggagctgccctccttgagcccggcccctgacacagggctgtctccctccaaaaggactcaccagcgctctaagtcagatgccactgccagcataagtctcagcagcaacctgaaacgaacagccagcaaccctaaagtggagaatgaggatgagcctgttcgactggctcctgagagagaattcatcaagtccctgatggcgatcggcaagcggctggccacgctccccaccaaagagcagaaaacacagaggctgatctcagagctctccctgctcaaccataagctccctgcccgagtctggctgccactgctggctttgaccaccacgtggtccgtgtaccccacacacaggctgttgtcctcaactccaaggacaaggctcctacctgatttatgtggaagtccttgaatgtgaaaacttttgacaccaccagtgtccctgcccggatcccgagaaccgaattcggagtacgagggtccgtagaaaacttgcccgaatgtggtatttaccatgaggcagcgagctggagcttcagcactgtgccaactattgaaaagatggataaggctggtcggtggatgacataggcaagctgcaagtggagtccccgaattgctaccacagttgtgacagctttctcccgtttgtggcgtcccagccaggagcatgggcctgtcatgggcggaatccgcgcgcttcggaaagggtcacccgcagtcagagaccaacttgggtttcaaagcgcggaaaaggaaaggcc

SEQ ID NO: 71214 - DNA, 672 bp, Homo Sapiens
  misc_feature (172)..(203): n is a, c, g, or t
  misc_feature (269)..(287): n is a, c, g, or t
gctgcagaacccccagtgtgggcctgggggtgggaggatgggacttaggtatgcctgctagacaggttcagggaaggactgatgggggtgtcatggatggacacacctctccacaattccttcaggcatggactggaactttccacctctaggccgggccctgccctagtgnnnnnnnnnnnnnnnnnnnnnnnnnnnnnnnnactcactggcactcaagccccctacccctgcagtgcctttcacttctttttttccccagaaatccnnnnnnnnnnnnnnnnnnnttggtagggatgagtcctgtcaagggggccacaggagaggaggggacaggctctcaggaatcctttattcttgtagtaataataatactaacaaacagttggggaactagggagaaaaccagaccattaaaactgtttgtggtcgaatctccattcaggcctctctttttctgtgacttggacaatgtggagttgaagcgggtgagagaacatggaaggaaaagttaatgctctggcggcaacggtggactatgtagggcttaatggcatcacccacgtcctcatccatgtggatgtacatgttaagcaactggggcagatagaagtccacgtcctcgttgcgaaagcagaagagccggttgccaatggtagcttgtactccagc

SEQ ID NO: 71215 - DNA, 2702 bp, Homo Sapiens
  misc_feature (2312)..(2330): n is a, c, g, or t
  misc_feature (2357)..(2361): n is a, c, g, or t
  misc_feature (2363)..(2363): n is a, c, g, or t
  misc_feature (2365)..(2378): n is a, c, g, or t
  misc_feature (2380)..(2381): n is a, c, g, or t
  misc_feature (2383)..(2387): n is a, c, g, or t
  misc_feature (2389)..(2452): n is a, c, g, or t
  misc_feature (2459)..(2513): n is a, c, g, or t
  misc_feature (2642)..(2650): n is a, c, g, or t
agagagtatgaagtcgacggcgcgccgaattcggcacgaggctcaccagcgctctaagtcagatgccactgccagcataagtctcagcagcaacctgaaacgaacagccagcaaccctaaagtggagaatgaggatgagcctgttcgactggctcctgagagagaattcatcaagtccctgatggcgatcggcaagcggctggccacgctccccaccaaagagcagaaaacacagaggctgatctcagagctctccctgctcaaccataagctccctgcccgagtctggctgcccactgctggctttgaccaccacgtggtccgtgtaccccacacacaggctgttgtcctcaactccaaggacaaggctccctacctgatttatgtggaagtccttgaatgtgaaaactttgacaccaccagtgtccctgcccggatccccgagaaccgaattcggagtacgaggtccgtagaaaacttgcccgaatgtggtattacccatgagcagcgagctggcagcttcagcactgtgcccaactatgacaacgatgatgaggcctggtcggtggatgacataggcgagctgcaagtggagctccccgaagtgcataccaacagctgtgacaacatctcccagttctctgtggacagcatcaccagccaggagagcaaggagcctgtgttcattgcagcaggggacatccgccggcgcctttcggaacagctggctcataccccgacagccttcaaacgagacccagaagatccttctgcagttgctctcaaagagccctggcaggagaaagtacggcggatcagagagggctccccctacggccatctccccaattggcggctcctgtcagtcattgtcaagtgtggggatgaccttcggcaagagcttctggcctttcaggtgttgaagcaactgcagtccatttgggaacaggagcgagtgcccctttggatcaagccatacaagattcttgtgatttcggctgatagtggcatgattgaaccagtggtcaatgctgtgtccatccatcaggtgaagaaacagtcacagctctccttgctcgattacttcctacaggagcacggcagttacaccactgaggcattcctcagtgcacagcgcaattttgtgcaaagttgtgctgggtactgcttggtctgctacctgctgcaagtcaaggacagacacaatgggaatatccttttggacgcagaaggccacatcatccacatcgactttggcttcatcctctccagctcaccccgaaatctgggctttgagacgtcagcctttaagctgaccacagagtttgtggatgtgatgggcggcctggatggcgacatgttcaactactataagatgctgatgctgcaagggctgattgccgctcggaaacacatggacaaggtggtgcagatcgtggagatcatgcagcaaggttctcagcttccttgcttccatggctccagcaccattcgaaacctcaaagagaggttccacatgagcatgactgaggagcagctgcagctgctggtggagcagatggtggatggcagtatgcggtctatcaccaccaaactctatgacggcttccagtacctcaccaacggcatcatgtgacacgctcctcagcccaggagtggtggggggtccagggcaccctccctagagggcccttgtctgagaaaccccaaaccaggaaaccccacctacccaaccatccacccaagggaaatggaaggcaagaaacacgaaggatcatgtggtaactgcgagagcttgctgaggggtgggagagccagctgtggggtccagacttgttggggcttccctgcccctcctggtctgtgtcagtattaccaccagactgactccaggactcactgccctccagaaaacagaggtgacaaatgtgagggacactggggcctttcttctccttgtaggggtctctcagaggttctttccacaggccatcctcttattccgttctggggcccaggaagtggggaagagtaggttctcggtacttaggacttgatcctgtggttggccactggccatgctgctgcccagctctacccctcccagggacctacccctcccagggaccgacccctggcccaagctccccttgctggcgggcgctgcgtgggccctgcacttgctgaggttccccatcatgggcaaggaagggaattcccacagccctccagtgtactgagggtactggcctagccatgtggaattccctaccctgactccttccccaaacccagggaaaagagctctcaannnnnnnnnnnnnnnnnnngtttgaaataaagtccttagttagccnnnnnanannnnnnnnnnnnnnannannnnnannnnnnnnnnnnnnnnnnnnnnnnnnnnnnnnnnnnnnnnnnnnnnnnnnnnnnnnnnnnnnnnggggggnnnnnnnnnnnnnnnnnnnnnnnnnnnnnnnnnnnnnnnnnnnnnnnnnnnnnnngtaaaaggggccccctaagaggaggggtctattaaaaaaaggcgcgggggcccctttttattcaccccggggggtgggaaaaaacgccgcccttgggaggttttttggagagagaacccttcttctgtnnnnnnnnncactatttggggcaacacttcccctccaaagtttttaaagccctctcggggg

SEQ ID NO: 71216 - DNA, 1044 bp, Homo Sapiens
  misc_feature (358)..(379): n is a, c, g, or t
  misc_feature (428)..(428): n is a, c, g, or t
cccaaaggtatttcttttgtaaaggagccagatttggcaactagactgaaaatcttccaaaattctgtacaaatgtgtaatatacaaatatacacaaggcttttgccaagaaaagacatcacaacaaatgacagaggtggctttggtgtcacataccacctacagcatctcaaacccctaggaatgtgaggggctgatggaccacaacataggctacacatgtaaacacgctacattacactatgtacactggagtataaacaatccactgtcctctccggtctgttcacaagcccttaaagagacaggcggtaacagcgaattcgggagatggaccacttcttgtgctccttgtcannnnnnnnnnnnnnnnnnnnnnactccatctcagtgaaccgggcaaacatggctttccggacagcatcttntgtaggaatcggcgcccgacaaaccatatgcgctgcctttggctcctaggccagctccctttagccgaacttgagcctgggaaagcacagagactgtcagctgggaggtagggtatgggctgctccacctctcaccatacccgctccttacccagcaggaccacccaccaggagacagaagagagaaaactgtatatgaagacaaggatttctccagaagagaccaggagcaagtataaggactggaggaataaaatgggctacggaacacaggcagatgaagcaaatcacccacccctcaatgcctgctcaacaagcatccacgcctaggaaagggccccaaagtattcctctgaaggtctgggaaaggtatggtaattacaggcacacattatacaggatagctcaatgtcagcagaactcacataaacaggatgaacatggtctacaagagtctgacctaagctgtgctcccaggacagagcaggggcaattacgggtggagctcctgcctagaaggccagtgggtaggggcctccgatcctgggatatgatgcctcaatgtgggctctgatcaatttaaagatttcttatcatgggtgaaaaccctactaaa

SEQ ID NO: 71217 - DNA, 731 bp, Homo Sapiens
  misc_feature (220)..(241): n is a, c, g, or t
cacagtaacattggaacatagatggtgcaggccatgggctacgggaaggatctgacttgggacgaaagtgtcaaggcattacggctcccattgaggctcaagttcggctaaagggagctggcctaggagccaaaggcagcgcatatggtttgtcgggcgccgattcctacaaagatgctgtccggaaagccatgtttgcccggttcactgagatggagtnnnnnnnnnnnnnnnnnnnnnntgacaaggagcacaagaagtggtccatctcccgaattcgctgttaccgcctgtctctttaagggcatgccttgtgctgttaatagatcttagggtgaaccacttcattctgcagggttctccctcccaccttaaagaagttccccttatgtgggttgcctggtgaatggccttccttcccgccagagggcttgtgaacagaccggagaggacagtggattgtttatactccagtgtacatagtgtaatgtagcgtgtttacatgtgtagcctatgttgtggtccatcagcccctcacattcctaggggtttgagatgctgtaggtggtatgtgacaccaaagccacctctgtcatttgttgtgatgtcttttcttggcaaaagccttgtgtatatttgtatattacacatttgtacagaattttggaagattttcagtctagttgccaaatctggctcctttacaaaagaaataccttgagaaatgggaa

SEQ ID NO: 71218 - DNA, 741 bp, Homo Sapiens
gagcagaggcaggcattcttgctgtgcgttgtgaaagggtagagtcctgcgctcctttcttgtagtagtccaatggctcatgcaggtgcctctgactcccctatgggaactggggcttgggagggtggtggaaaatgctgatgctctggctattgctattgttttgaataatcagtggtcccttgtccctaatcgaggaattttgtattttctaccagtgtccatgaaactgggaggcgaccgtgttagctgccagttcctgacagccacctctcaccagtggcttcactctgtgtccctgacccagcacatggcacaagagtgcctgccatccgtcagtgtttctacagcagcaatcccaagatgctggagctagaggggacctgacctgagagaagataccttcagtggctgccaggctgttccttggaacctgtgcagggatgaggcctgcctgtgttaatacacctagtgaggagtggagctgaatttgaatgcaagccttggcaccttaattgagcaagtttgaaacctcgcttgttgcccttctggaaggagtcaggaatttccagttctgggcctgggctgtgggtctggcagacagacctctggccctaggtttgggtgccaggttctctgcttccagaatgagaagctttgctgtgcaccaggacctgggcccttctggtatctcctgaatgaaaaacaagggatatttaataaatatggatttaaatatga

SEQ ID NO: 71219 - DNA, 960 bp, Homo Sapiens
gggggcgcagcgcgcggcgtcagtcttggctggcagacctgtactccgtactccgtacttcgtagtcgcagcggcgcggtcttcggcagtctagtcatccaccgccatcctgggccccacgtgttgcctgaccattcctgagcccaggtgggagccgtggctgaggtgacggtctcaaagtggaagagcttactgtcacagcaactcctttgcaagatgccccggtaaatcacgttgcagagaccccaactctgccttcctggaactaggcctgcgttttctctgaaccattatttcatggagaaaatgaaatctacttcatgtgcctggtctacttactcccttcagaagtgatttctgagccgccaggaatagttgctgaacaccccaggcctgctgaggtccctccttgagtctcatgttcaagcagtctttgtccatgaaactgggaggcgaccgtgttagctgccagttcctgacagccacctctcaccagtggcttcactctgtgtccctgacccagcacatggcacaagagtgcctgccatccgtcagtgtttccacagcagcaatcccaagatgctggagctagaggggacctgacctgagagaagataccttcagtggctgccaggctgttccttggaacctgtgcagggatgaggcctgcctgtgttaatacacctagttgaggagtggaactgaattttgaatgcaagcccttggcacccttaattgagcaagtttgaaacctcgcttgttgcccttctggaaggagtcaggaatttccagttctgggcctgggctgtgggtctggcagacagacctctggccctaggtttgggtgccaggttctctgcttccagaatgagaagctttgctgtgcaccaggacctgggcccttctggtatctcctgaatgaaaaacaagggatatttaataaatatggatttaaatatg

SEQ ID NO: 71220 - DNA, 865 bp, Homo Sapiens
cagtcgacggtaccggacatatgcccgggaattcggccattacggccgggggcagcgcgcggcgtcagtcttggctggcagacctgtactccgtactccgtacttcgtagtcgcagcggcgcggtcttcggcagtctagtcatccaccgccatcctgggccccacgtgttgcctgaccattcctgagcccaggtgggagccgtggctgaggtgacggtctcaaagtggaagagcttactgtcacagcaactcctttgcaagatgccccggccaggaatagttgctgaacaccccaggcctgctgaggtccctccttgagtctcatgttcaagcagtctttgtccatgaaactgggaggcgaccgtgttagctgccagttcctgacagccacctctcaccagtggcttcactctgtgtccctgacccagcacatggcacaagagtgcctgccatccgtcagtgtttctacagcagcaatcccaagatgctggagctagaggggacctgacctgagagaagataccttcagtggctgccaggctgttccttggaacctgtgcagggatgaggcctgcctgtgttaatacacctagtgaggagtggagctgaatttgaatgcaagccttggcaccttaattgagcaagtttgaaacctcgcttgttgcccttctggaaggagtcaggaatttccagttctgggcctgggctgtgggtctggcagacagacctctggccctaggtttgggtgccagggtctctgcttccagaatgagaagctttgctgggcaccaggacctgggcccttctggtatctcctggatgaaaaacaagggatatttaataatatggatttaaataccaaaag

SEQ ID NO: 71221 - DNA, 2180 bp, Homo Sapiens
  misc_feature (1814)..(1836): n is a, c, g, or t
ggcagtaactctaacggttctaaggtagcgaggcctgggtggcgaattcggcacgaggttgatgctgctccgtcatcgtgcggcccgacgctatctcgcgctcgtgtgcaggcccggctcggctcctggtccccggtgcgagggttaacgcgaggccccggcctcggtccccggactaggccgtgaccccgggtgccatgaagcaggagggctcggcgcggcgccgcggcgcggacaaggcgaaaccgccgcccggcggaggagaacaagaacccccaccgccgccggccccccaggatgtggagatgaaagaggaggcagcgacgggtggcgggtcgacgggggaggcagacggcaagacggcggcggcagcggctgagcactcccagcgagagctggacacagtcaccttggaggacatcaaggagcacgtgaaacagctagagaaagcggtttcaggcaaggagccgagattcgtgctgcgggccctgcggatgctgccttccacatcacgccgcctcaaccactatgttctgtataaggctgtgcagggcttcttcacttcaaataatgccactcgagactttttgctccccttcctggaagagcccatggacacagaggctgatttacagttccgtccccgcacgggaaaagctgcgtcgacacccctcctgcctgaagtggaagcctatctccaactcctcgtggtcatcttcatgatgaacagcaagcgctacaaagaggcacagaagatctctgatgatctgatgcagaagatcagtactcagaaccgccgggccctagaccttgtagccgcaaagtgttactattatcacgcccgggtctatgagttcctggacaagctggatgtggtgcgcagcttcttgcatgctcggctccggacagctacgcttcggcatgacgcagacgggcaggccaccctgttgaacctcctgctgcggaattacctacactacagcttgtacgaccaggctgagaagctggtgtccaagtctgtgttcccagagcaggccaacaacaatgagtgggccaggtacctctactacacagggcgaatcaaagccatccagctggagtactcagaggcccggagaacgatgaccaacgcccttcgcaaggcccctcagcacacagctgtcggcttcaaacagacggtgcacaagcttctcatcgtggtggagctgttgctgggggagatccctgaccggctgcagttccgccagccctccctcaagcgctcactcatgccctatttccttctgactcaagctgtcaggacaggaaacctagccaagttcaaccaggtcctggatcagtttggggagaagtttcaagcagatgggacctacaccctaattatccggctgcggcacaacgtgattaagacaggtgtacgcatgatcagcctctcctattcccgaatctccttggctgacatcgcccagaagctgcagttggatagccccgaagatgcagagttcattgttgccaaggccatccgggatggtgtcattgaggccagcatcaaccacgagaagggctatgtccaatccaaggagatgattgacatctattccacccgagagccccagctagccttccaccagcgcatctccttctgcctagatatccacaacatgtctgtcaaggccatgaggtttcctcccaaatcgtacaacaaggacttggagtctgcagaggaacggcgtgagcgagaacagcaggacttggagtttgccaaggagatggcagaagatgatgatgacagcttcccttgagctgggggctgnnnnnnnnnnnnnnnnnnnnnnnacaggcactttcccccttgggggtcccctgcccagggcactgtccccattttcccacacacagctcatatgctgcattcgtgcagggggtgggggtgctgggagccagccaccctgacctcccccagggctcctccccagccggtgacttactgtacagcaggcaggagggtgggcaggcaacctccccgggcagggtcctggccagcagtgtgggagcaggaggggaaggatagttctgtgtactcctttagggagtgggggactagaactgggatgtcttggcttgtatgttttttgaagcttcgattatgatttttaaacaataaaaagttctccacagtg

SEQ ID NO: 71222 - DNA, 361 bp, Homo Sapiens
ttttgtatatgtaggcttttattagggcaagcatttccatatccatacagatttcattaaaacaaatggatgtctcaagtatctttgttaaacaggatccgaaatgaagtaaatagtagttaaaattaattataaataaagacatttcagcacataaaccaacaagtcttttctagatttttaataccaggacctaacagcatcattttccaagtaagtgacaaataactaatgtgaaaaccatatttaatatagatgatgtcacaaatgacaatgtggttttccatagtaaagaaatacgttaattttcttaaatcctatttggtattacaaaataaattttactggtcaaaaaacaacc

SEQ ID NO: 71223 - DNA, 1517 bp, Homo Sapiens
cggctaggtagcgaggctgggtgggaatcggccgaggctggtgacactggatagaacagctcaagccttgccacttcgggcttctcactgcagctgggcttggacttcggagttttgccattgccagtgggacgtctgagactttctccttcaagtacttggcagatcactctcttagcagggtctgcgcttcgcagccgggatgaagctggtttccgtcgccctgatgtacctgggttcgctcgccttcctaggcgctgacaccgctcggttggatgtcgcgtcggagtttcgaaagaagtggaataagtgggctctgagtcgtgggaagagggaactgcggatgtccagcagctaccccaccgggctcgctgacgtgaaggccgggcctgcccagacccttattcggccccaggacatgaagggtgcctctcgaagccccgaagacagcagtccggatgccgcccgcatccgagtcaagcgctaccgccagagcatgaacaacttccagggcctccggagctttggctgccgcttcgggacgtgcacggtgcagaagctggcacaccagatctaccagttcacagataaggacaaggacaacgtcgcccccaggagcaagatcagcccccagggctacggccgccggcgccggcgctccctgcccgaggccggcccgggtcggactctggtgtcttctaagccacaagcacacggggctccagcccccccgagtggaagtgctccccactttctttaggatttaggcgcccatggtacaaggaatagtcgcgcaagcatcccgctggtgcctcccgggacgaaggacttcccgagcggtgtgggggaccgggctctgacagccctgcggagaccctgagtccgggaggcaccgtccggcggcgagctctggctttgcaagggcccctccttctgggggcttcgcttccttagccttgctcaggtgcaagtgccccagggggcggggtgcagaagaatccgagtgtttgccaggcttaaggagaggagaaactgagaaatgaatgctgagacccccggagcaggggtctgagccacagccgtgctcgcccacaaactgatttctcacggcgtgtcaccccaccagggcgcaagcctcactattacttgaactttccaaaacctaaagaggaaaagtgcaatgcgtgttgtacatacagaggtaactatcaatatttaagtttgttgctgtcaagattttttttggaacttcaaatatagagatatttttgtacgttatatattgtattaagggcattttaaaagcaattatattgtcctccccctattttaagacgtgaatgtctcagcgaggtgtaaagttgttcgccgcgtggaatgtgagtgtgtttgtgtgcatgaaagagaaagactgattacctcctgtgtggaagaaggaaacaccgagtctctgtataatctatttacataaaatgggtgatatgcgaacagcaaaccaataaactgtctcaatgctg

SEQ ID NO: 71224 - DNA, 1052 bp, Homo Sapiens
  misc_feature (448)..(456): n is a, c, g, or t
ctgaattcagactgattaaagaaggtgaaacaataactgaagtgatccatggagagccaattattaaaaaatacaccaaaatcattgatggagtgcctgtggaaataactgaaaaagagacacgagaagaacgaatcattacaggtcctgaaataaaatacactaggatttctactggaggtggagaaacagaagaaactctgaagaaattgttacaagaagacacacccgtgagaaagttgcaagccaacaaaaaagttcaaggatctagaagacgattaagggaaggtcgttctcagtgaaaatccaaaaaccagaaaaaaatgtttatacaaccctaagtcaataacctgaccttagaaaattgtgagagccaagttgacttcaggaactgaaacatcagcacaaagaagcaatcatcaaataattctgaacacaaatttaatannnnnnnnnctgaatgagaaacatgagggaaattgtggagttagcctcctgtggtaaaggaattgaagaaaatataacaccttacaccctttttcatcttgacattaaaagttctggctaactttggaatccattagagaaaaatccttgtcaccagattcattacaattcaaatcgaagagttgtgaactgttatcccattgaaaagaccgagccttgtatgtatgttatggatacataaaatgcacgcaagccattatctctccatgggaagctaagttataaaaataggtgcttggtgtacaaaactttttatatcaaaaggctttgcacatttctatatgagtgggtttactggtaaattatgttattttttacaactaattttgtactctcagaatgtttgtcatatgcttcttgcaatgcatattttttaatctcaaacgtttcaataaaaccatttttcagatataaagagaattacttcaaattgagtaattcagaaaaactcaagatttaagttaaaaagtggtttggacttgggaacaggactttatacctcttttactgtaacaagtactcattaaaggaaattgaatgaaaaa

SEQ ID NO: 71225 - DNA, 637 bp, Homo Sapiens
accagatgacttccagggagtctctcgctttgagtccaccctggcatggttgcagtctgtgggaaagtggggcaggcaggtggacttcagaagagcttgaggggtcagcactccgcacacccatgccctcaggtgcgatggataaacagaatggctttaggtgccgtctgtccaaattaccagcggaaccttccttcccatgcagtattgttgtatgtacttgtaacctttgattaggtttctctctgtactcttagatgtccttgcttttcttccccatcctgcctttaacctttctaatcttgccaaagctcttgagtgtttccccatcagtttccttctctcttatatttcagttttttaattgagttcatgatcaaaccttcatctgatcacatcacatgtactgtgcatccactgtgattagatagcttatgggatccttgaaatcacattgacaggcactgtaaagtcacagccaagttagcaattattagttgcacctcagagaatgttggaataatgatctttgaagatgggattgttcatatatttggataattattgctgtggatttctctctagcattttagctcattccagtaaatgatttttttctttatgaaatagaactccc

SEQ ID NO: 71226 - DNA, 876 bp, Homo Sapiens
  misc_feature (672)..(715): n is a, c, g, or t
ttgtcttgtattttccaaatgttaatacatttactttagcattgaagccactttgaaacctgagataaatgaatgtgaggtatcttttctgctttcctcatttgtgtagatgtactgtctgttctgttgatttaaattatttttttccagattggcacatgaaatatttaaacttttttgtgtgcctttctgtccaaatgttgcatagttaccagggaagattagtccagtgattacataagagttgggcaccataaattctctatattttgcctcccatggaggcctttgaaatgcatctttattaaaaatcaaaatataaccaggatactgaaagtcagtatatgaatggtaaaattgttacatatcctatttcatgccattcttgttagttgactggtattttttactgaggagcaactcattccagcatcaacaataagataacctttaagtatggcacacttgtatttttgaggtgtaaaattaacttggcatgataattcctgatcattatttaccccacaacttcaaatagtttcttcacggactaggcatgcagaaataagcagtggattttattgaaacctaaaggcattttgaatgacattgttaccaaccattaattggctcaggacctttgtaatttttatttaactatatgagttgtcnnnnnnnnnnnnnnnnnnnnnnnnnnnnnnnnnnnnnnnnnnnnagtttcatgaatgcatgctcagtttattaaaatccataaccatgtaattcttgtaatatgttgattcagtgttttgtaaatgaagtcgtatgtattttcagagtatttttgtatgtactgtaagataccatcttttcaaagagaaacgtttaaaaccttta

SEQ ID NO: 71227 - DNA, 796 bp, Homo Sapiens
  misc_feature (44)..(44): n is a, c, g, or t
ataactgcattcagccaaggagctcgagcagttaggaccagtcncctgagagtcagagggcctctgtgggtgctgggtactccagaggtgccactggtggaagggtcagcggagccccagcaggaagggtgggccagccaggccattcttagtccctgggttggggaggcagggagctagggcagggaccaaatgaacagaaagtctcagcccaggatgggcttcttcaacagggcccctgccctcctgaagcctcagtccttcaccttgccaggtgccgtttctcttccgtgaaggccactgcccaggtccccagtgcgccccctagtggccatagcctggttaaagttccccagtgcctccttgtgcatagaccttcttctcccacccccttctgcccctgggtccccggccatccagcggggctgccagagaaccccagacctgcccttacagtagtgtagcgccccctccctctttcggctggtgtagaatagccagtagtgtagtgcggtgtgcttttacgtgatggcgggtgggcagcgggcggcgggctccgcgcagccgtctgtccttgatctgcccgcggcggcccgtgttgtgttttgtgctgtgtccacgcgctaaggcgaccccctcccccgtactgacttctcctataagcgcttctcttcgcatagtcacgtagctcccaccccaccctcttcctgtgtctcacgcaagttttatactctaatatttatatggctttttttcttcgacaaaaaaataataaaacgtttcttctgaaaagctg

SEQ ID NO: 71228 - DNA, 1342 bp, Homo Sapiens
  misc_feature (100)..(100): n is a, c, g, or t
  misc_feature (120)..(120): n is a, c, g, or t
  misc_feature (147)..(147): n is a, c, g, or t
  misc_feature (1291)..(1291): n is a, c, g, or t
atgcctccctcctccccaccccactccaacagttcctctttcccgagtaaggtggttggggtgttgaagtaccaagtaacctacaagcctcctagttctnaaaagttggaagggcatcangacctcttggcctctcctttaattctnaatcttcccccaaagcatggtttggtgccagccccttcacctccttccagagcccaagatcaatgctcaagttttggaggacatgatcaccatccccatggtacttgatgcttgctggatttagggagggcattttgctaccaagcctcttcccaacgccctggggaccagtcttctgttttgtttttcattgtttgacgtttccactgcatgccttgacttcccccacctcctcctcaaacaagagactccactgcatgttccaagacagtatggggtggtaagataaggaagggaagtgtgtggatgtggatggtgggggcatggacaaagcttgacacatcaagttatcaaggccttggaggaggctctgtatgtcctcaggggactgacaacatcctccagattccagccataaaccaataactaggctggacccttcccactacataatagggctcagcccaggcagccagctttgggctgagctaacaggaccaatggattaaactggcatttcagcccaaggaagctcgaagcaggtttaggaccaggtccccttgagaggtcagaggggcctctgtgggtgctgggtactccagaggtgccactggtggaaaggtcagcgggagccccagcaggaagggggggccagccaggccattcttactccctggggtggggaggcagggaactagggcagggaccaaatgaacagaaagtctcagcccaggatggggcttcttcaacagggcccctgccctcctgaagcctcagtccttcaccttgccaggtgccgtttctcttccgtgaaggccactgcccaggtccccagtgcgccccctagtggccatagcctggttaaagttccccagtgcctccttgtgcatagaccttcttctcccacccccttctgcccctgggtccccggccatccagcggggctgccagagaaccccagacctgcccttacagtagtgtagcgccccctccctctttcggctggtgtagaatagccagtagtgtagtgcggtgtgcttttacgtgatggcgggtgggcagcgggcggcgggctccgcgcagccgtctgtccttgatctgcccgcggcggcccgtgttgtgttttgtgctgtgtccacgcgcntaggcgaccccctcccccgtactgacttctccctatagcgcttctcttcgc

SEQ ID NO: 71229 - DNA, 360 bp, Homo Sapiens
aagaaaaaataaaaggtggatttgagctgtggctgtgaggggtgtttgggagctgctgggtggcaggggggctgtggggtcgggctcacgtcgcggccgcctttgcgctctcgggtcaccccgctttggcggcccggccggagggcaggaccctcacctctcccccaaggccactgcgctcttgggaccccagagaaaacccggagcaagcaggagtgtgcggtcaatatttatatcatccagaaaagaaaaacacgagaaacgccatcgcgggatggtgcagacgcggcggggactcggagggtgccgtgcgggcgaggccgcccaaatttggcaataaataaagcttgggaagcttgg

SEQ ID NO: 71230 - DNA, 415 bp, Homo Sapiens
  misc_feature (123)..(304): n is a, c, g, or t
gcacgaggaaattacaagtaggagcccattacaatcgtaacaggtataacactaaagcatttttgctattttcgtcatgcctttgagactgagtcttactccgtcccccagcgtggtggcgcnnnnnnnnnnnnnnnnnnnnnnnnnnnnnnnnnnnnnnnnnnnnnnnnnnnnnnnnnnnnnnnnnnnnnnnnnnnnnnnnnnnnnnnnnnnnnnnnnnnnnnnnnnnnnnnnnnnnnnnnnnnnnnnnnnnnnnnnnnnnnnnnnnnnnnnnnnnnnnnnnnnnnnnnnnnnnnnnnnnnnnccacaatagtttgaagcagtaagggggaaggagggtgattatattgctttgtaatggtttgtgatacttgaaacatcacggtgcataataaagtaggtctgcagtaaatac

SEQ ID NO: 71231 - DNA, 1645 bp, Homo Sapiens
  misc_feature (1359)..(1540): n is a, c, g, or t
ggcagtaactctaacggtttaaggtagcgaggcctgggtgtgcgaattcggcacgagggcttgaagccaatatggagtccgtcagttgctccgctgctgctgtcaggaccggagacatggagtcccagcgggacctgagcctggtgcctgagcggcttcagagacgcgaacaagaacggcagctggaagttgaaaggcggaaacaaaagcggcagaaccaggaggtagagaaggagaacagccactttttcgtcgccacctttgctcgggagcgagcggccgtggaagagcttctggagcgcgcggagtcggtcgagcggctggaggaggcggcctctcggctccaggggctgcagaaactaatcaacgactcagtttttttcctagccgcttacgacctgcggcagggacaagaggcgctggcgcggctgcaggcggccttggccgagcggcgccgggggctgcagcccaagaagcgtttcgctttcaagacccggggaaaggatgctgcttcgtctaccaaagtagacgcggctcctggcatccccccggcagttgaaagcatacaggactccccgctgcccaagaaggcggaaggagacctcggccccagctgggtctgcggtttctccaacctggagtcccaagtcttggagaagagagccagcgagttgcaccagcgcgacgttcttttgaccgaactgagcaactgcacggtcagactgtatggaaatcccaacaccctgcggctaaccaaggcccacagctgcaagctgctctgcggtccggtgtctacctctgttttcctggaggactgcagtgactgcgtgctggcagtggcctgccaacagctccgcatacacagtacgaaagacacccgcatcttcctgcaggtgaccagcagggccatcgtggaggactgcagtgggatccagttcgccccttacacctggagctacccggagatcgacaaggacttcgagagctctggtttagataggagcaaaaataactggaacgatgttgacgattttaactggctggcccgggatatggcctccccaaactggagtattcttcctgaagaggagcgaaatatccagtgggactaagcagttgtcactctgttcttcactcctaccaaatactttccacgttggactttcccccttattgggtctcgaagtttacttattgtcacactgtgtatgttttcagcattttaaggctagagattgtaatgggctcctacttgtaatttccattaaattcgtaacaggtataacactaaagcatttttgctattttcgtcatgcctttgagactgagtcttactccgtcccccagcgtggtggcgcnnnnnnnnnnnnnnnnnnnnnnnnnnnnnnnnnnnnnnnnnnnnnnnnnnnnnnnnnnnnnnnnnnnnnnnnnnnnnnnnnnnnnnnnnnnnnnnnnnnnnnnnnnnnnnnnnnnnnnnnnnnnnnnnnnnnnnnnnnnnnnnnnnnnnnnnnnnnnnnnnnnnnnnnnnnnnnnnnnnnnnccacaatagtttgaagcagtaagggggaaggagggtgattatattgctttgtaatggtttgtgatacttgaaacatcacggtgcataataaagtaggtctgcagt

SEQ ID NO: 71232 - DNA, 494 bp, Homo Sapiens
  misc_feature (194)..(194): n is a, c, g, or t
  misc_feature (207)..(387): n is a, c, g, or t
cacgttggactttcccccttattgggtctcgaagtttacttattgtcacactgtgtatgttttcagcattttaaggctagagattgtaatgggctcctacttgtaatttccattaaattcgtaacaggtataacactaaagcatttttgctattttcgtcatgcctttgagactgagtcttactccgtcccccncaccggtggagcnnnnnnnnnnnnnnnnnnnnnnnnnnnnnnnnnnnnnnnnnnnnnnnnnnnnnnnnnnnnnnnnnnnnnnnnnnnnnnnnnnnnnnnnnnnnnnnnnnnnnnnnnnnnnnnnnnnnnnnnnnnnnnnnnnnnnnnnnnnnnnnnnnnnnnnnnnnnnnnnnnnnnnnnnnnnnnnnnnnnnccacaatagtttgaagcagtaagggggaaggagggtgattatattgctttgtaatggtttgtgatacttgaaacatcacggtgcataataaagtaggtctgcagtaa

SEQ ID NO: 71233 - DNA, 323 bp, Homo Sapiens
cttttattcaaattttattggaagtttacaaatgtattacagacatcagtaaaacatcatatccattttacagggcacggatctcaagcaaagtgttcagaacagtctctggcagagccacaccaaaggcctgttgcagaccttcttaacaaatagcttgacactcaacacagaacacagactctggcctgcctcaccttcccaggccctttgaggttttgtttatgcacttgaaatgaaagcaggagatggacaaagcaatcctgtggagggaaagaatgagtttagggagagggaaaacctgccgaaggtcctaatttgct

SEQ ID NO: 71234 - DNA, 715 bp, Homo Sapiens
  misc_feature (416)..(437): n is a, c, g, or t
gaaaaagaaaaggaaaggaaaatcatgcagaatcgcaagcattcagactggacgaccggctcgtattccgatcagtcgcttccattgttagcatcgtacacgattgtgatttttatgtcaaaagaagccaaaacttgcaatactatttttagcagacaaaaaaaagaactaagtataaaatgtataaatatttttgacttgaacatttggatggcactgggtgcaagtagagcatccatccttcggatggaatgtttggaaaaaagagacttttaaaaaggagacggttgttttaaagagtctgtttaggggttaaagtactgtaactcacgactgttaaaaaataaattttcctgtgctgtaaaggaaggtttcacagtaccactgagttagatttcagccacagatgcttagcnnnnnnnnnnnnnnnnnnnnnnaaggaggaagcctttgttttgttttcctgagccctcactctgtttttgtgctgttactcggtagagtcaagactgttactttttagccatggctgacattgtatcaataactaaaactgaaacattcaaaagcgaacagggaaaccgagggcttcaagcgtgctcagagccgtttcagacagtggaaatccatgacaaacaaaaggatgtgatcattaattgtaaagcgctttgtaaaattcacatttacaaaataataaagtcagttcaaccctaaa

SEQ ID NO: 71235 - DNA, 1352 bp, Homo Sapiens
tagggctaggtacgaggcctgggttgtgaattcggcacgagggctgcgcgcaccgcgggctccgggctcagaagtgcggacgcccggctcccggcgtggacgccatggtgctgtgcccggtgattgggaagctgctgcacaagcgcgtggtgctggccagcgcctccccacgccgtcaggagatcctcagcaacgcgggtctcaggtttgaggtggtcccctccaagtttaaagagaagctggacaaagcctccttcgctactccgtatgggtacgccatggagaccgccaagcagaaggccctggaggtggccaaccggctgtaccagaaagacctgcgggcccccgacgtggtcattggagcggacacgatcgtgacagtcggggggctgattctggagaagccggtggacaagcaggacgcctacaggatgctgtcccggttgagtgggagagaacacagcgtgttcacaggtgtcgcgatcgtccactgctccagcaaagaccatcagctggacaccagggtctcggaattctacgaggaaacgaaggtgaagttctcggagctgtccgaggagctgctctgggaatacgtccacagcggggagcccatggacaaagctggcggctacgggatccaggccctgggcggcatgctggtggagtccgtacacggggactttctgaacgtggtgggattcccgctgaaccacttctgcaagcagctggtgaagctctactacccgccccgcccggaggacctgcggcggagtgtcaagcacgactccatcccggccgcggacaccttcgaagacctcagtgacgtggaggggggtggctcggagcccactcagagggacgcgggcagccgcgatgagaaggccgaggcgggagaggcgggacaggccacggcagaggctgagtgtcacaggactcgggagaccctgcctccgttcccgacacgcctcctggagctgattgagggctttatgctatccaagggcctgctcaccgcttgcaaactgaaggtgttcgatttgttaaaagatgaagcaccccagaaggctgcggatattgccagcaaagtggacgcctctgcgtgtggaatggagaggcttctggacatctgtgctgccatggggctcctggagaagacagagcaaggttacagtaacacagagacagcgaacgtctacctggcatcggatggcgaatactctctgcacggcttcatcatgcacaataatgacctcacatggaacctctttacatacctgggagtttgccatccgagagggaacaaccacaccccaggcgttggggaagaaggcggggaaatttttcacgatgct

SEQ ID NO: 71236 - DNA, 1181 bp, Homo Sapiens
cagtcgacggtaccggacatatgcccgggaattcggccattacggccggggattctcagcacagcctttaaggttccaaacatctgctagaagaggaatgcagatttaaactgagtgaggtgtgcagtgggggaagttgattgggtctagaccaaagaactttgaggaacttgcccagagccctgcatgcatcagacctacagcagacattgcaggcctgaagaaagcaccttttctgctgccatgacaaccatgcaaggaatggaacaggccatgccagggctggccctggtgtgccccagctgggaaacatggctgtcatacattcacatctgtggaaaggattgcaagagaagttcttgaagggagaacccaaagtccttggggttgtgcagattctgactgccctgatgagccttagcatgggaataacaatgatgtgtatggcatctaatacttatggaagtaaccctatttccgtgtatatcgggtacacaatttgggggtcagtaatgtttattatttcaggatccttgtcaattgcagcaggaattagaactacaaaaggcctggtccgaggtagtctaggaatgaatatcaccagctctgtactggctgcatcagggatcttaatcaacacatttagcttggcgttttattcattccatcacccttactgtaactactatggcaactcaaataattgtcatgggactatgtccatcttaatgggtctggatggcatggtgctcctcttaagtgtgctggaattctgcattgctgtgtccctctctgcctttggatgtaaagtgctctgttgtacccctggtggggttgtgttaattctgccatcacattctcacatggcagaaacagcatctcccacaccacttaatgaggtttgaggccaccaaaagatcaacagacaaatgctccagaaatctatgctgactgtgacacaagagcctcacatgagaaattaccagtatccaacttcgatactgatagacttgttgatattattattatatgtaatccaattatgaactgtgtgtgtatagagagataataaattcaaaattatgttctcatttttttccctggaactcaataactcatttcactggctctttatcgagagtactagaagttaaattaataaataatgcaattaatgaggc

SEQ ID NO: 71237 - DNA, 3601 bp, Homo Sapiens
ggctggtactgcccgggatttatgggataaaagccgaaagcgaagagggcccgggctgcacacacctggctgggaggcagccgtctgtgcagcgagcagccggcgcggggaggcctgcagtgcacggggcgtcacagtcgtgcaggcagcatggggaagggagggaaccaggccgagggggccgccgagcgcgaggtgtcggtgcccaccttcagctgggaggagattcagaagcataacctgcgcaccgacaggtggctggtcattgaccgcaaggtttacaacatcaccaaatggtccatccagcacccggggggccagcgggtcatcgggcactacgctggagaagatgcaacggatgccttccgcgccttccaccctgacctggaattcgtgggcaagttcttgaaacccctgctgattggtgaactggccccggaggagcccagccaggaccacggcaagaactcaaagatcactgaggacttccgggccctgaggaagacggctgaggacatgaacctgttcaagaccaaccacgtgttcttcctcctcctcctggcccacatcatcgccctggagagcattgcatggttcactgtcttttactttggcaatggctggattcctaccctcatcacggcctttgtccttgctacctctcaggcccaagctggatggctgcaacatgattatggccacctgtctgtctacagaaaacccaagtggaaccaccttgtccacaaattcgtcattggccacttaaagggtgcctctgccaactggtggaatcatcgccacttccagcaccacgccaagcctaacatcttccacaaggatcccgatgtgaacatgctgcacgtgtttgttctgggcgaatggcagcccatcgagtacggcaagaagaagctgaaatacctgccctacaatcaccagcacgaatacttcttcctgattgggccgccgctgctcatccccatgtatttccagtaccagatcatcatgaccatgatcgtccataagaactgggtggacctggcctgggccgtcagctactacatccggttcttcatcacctacatccctttctacggcatcctgggagccctcctttttcctcaacttcatcaggttcctggagagccactggtttgtgtgggtcacacagatgaatcacatcgtcatggagattgaccaggaggcctaccgtgactggttcagtagccagctgacagccacctgcaacgtggagcagtccttcttcaacgactggttcagtggacaccttaacttccagattgagcaccacctcttccccaccatgccccggcacaacttacacaagatcgccccgctggtgaagtctctatgtgccaagcatggcattgaataccaggagaagccgctactgagggccctgctggacatcatcaggtccctgaagaagtctgggaagctgtggctggacgcctaccttcacaaatgaagccacagcccccgggacaccgtggggaaggggtgcaggtggggtgatggccagaggaatgatgggcttttgttctgaggggtgtccgagaggctggtgtatgcactgctcacggaccccatgttggatctttctccctttctcctctcctttttctcttcacatctcccccatagcaccctgccctcatgggacctgccctccctcagccgtcagccatcagccatggccctcccagtgcctcctagccccttcttccaaggagcagagaggtggccaccgggggtgggctctgtcctacctccactctctgcccctaaagatgggaggagaccagcggtccatgggtctggcctgtgagtctccccttgcagcctggtcactaggcatcacccccgctttggttcttcagatgctcttggggttcataggggcaggtcctagtcgggcagggcccctgaccctcccggcctggcttcactctccctgacggctgccattggtccaccctttcatagagaggcctgctttgttacaaagctcgggtctccctcctgcagctcggttaagtacccgaggcctctcttaagatgtccagggccccaggcccgcgggcacagccagcccaaaccttgggccctggaagagtcctccaccccatcactagagtgctctgaccctgggctttcacgggccccattccaccgcctccccaacttgagcctgtgaccttgggaccaaagggggagtccctcgtctcttgtgactcagcagaggcagtggccacgttcagggaggggccggctggcctggaggctcagcccaccctccagcttttcctcagggtgtcctgaggtccaagattctggagcaatctgacccttctccaaaggctctgttatcagctgggcagtgccagccaatccctggccatttggccccaggggacgtgggccctgcaggctgcaggagggcactggagctgggaggtctcgtcccagccctccccatctcggggctgctgtgtggacggcgctgcctcaggcactctcctgtctgaacctgcccttactgtgtttaacctgttgctccaggatgcattctgataggagggggcggcagggctgggccttgtgacaatctgcctttcaccacatggccttgcctcggtggccctgactgtcagggagggccagggaggcagagcgggagggagtctcaggaggaggctgccctgaggggctggggagggggtacctcatgaggaccagggtggagctgagaagaggaggaggtgggggctggaggtgctggtagctgaggggacgggcaagtgagaggggagggagggaagtcctgggaggatcctgagctgctgttgcagtctaacccactaatcagttcttagattcaggggaagggcaggcaccaacaactcagaatgggggctttcggggagggcgcctagtccccccagctctaagcagccaggagggacctgcatctaagcatctgggttgccatggcaatggcatgccccccagctactgtatgcccccgacccccgcagaggcagaatgaacccatagggagctgatcgtaatgtttatcatgttacttccccacccctacattttttgaaataaaataaggaattttattctcacttcctgtgtttcctgcacgccaatgccaggcatggtattgggtgatagatgaggcccttctagctgggccgtgggcaccgaggaggggtccgccatgcttgcatctctctggtattccccatccctcccctgtgggcggtcgcaccgctctccctggttgctgctgaaagtcatttctgggggccgggacctgggtgggaggtgaccgcaatgagctatggccccatcttgcctacatcattcagaagcagagccaggcgcaagctaagaaagggcaggaaagcccgtataacgagtatgaacccttaccaaggagggcgtggaggaggagagctacagaggcaccagagactcacgcgagaggagccaccaggggatagacaggcacacagagaggaacgcgaaaagacgggagagaatagagcacaaagagagcacgcacagagat

SEQ ID NO: 71238 - DNA, 1564 bp, Homo Sapiens
  misc_feature (68)..(76): n is a, c, g, or t
  misc_feature (289)..(340): n is a, c, g, or t
catatcatatcacagtttgcatggactgattatcttagttttatgataaaactagaagaaatgagggnnnnnnnnnaatgaatagattttgaattgattctttagaccccccaaaaagtgtcagttctaatggggaaatatattccatcaagtcaaagagtaataactgctcactagttgctttttagcatctctggtcttatcagccatgctaaatcactttaattagccttagtgattctgtggttgagtaatctctacttgaactaaacaaacatcttttgtttcnnnnnnnnnnnnnnnnnnnnnnnnnnnnnnnnnnnnnnnnnnnnnnnnnnnntttaatggagtgttgccttgaatgaatcactgggaagccagccatggtaagggctggtgaggttggggagaaaggaagagctttatgtttctctgttgtttggaccctacttggcatgaaaaaggaagctcagttccagccccttggatcaacgaaaatcagaggattctggaaaggcagccaacttgcgcctcttagaaggatcagaggcaagatgagatggcagcctgcagagtaaatgcttgaaaaaagaggggtgattttcaatggtttgcttaagtcactgttttctagacaccaaaatagctgttttgaaactgttttaattgcttgggtagcaatgtgcactttaaacaatttggatattggaatgcagtctcatactgagtgatttgagtagaaccactgatgatgattttataaattgtgtgaagcgaatttcccatttggcaatcatttactgatttgcagtgatgaatatttttatgagaatttaaacttagcaagaatggccatggaggcaaagccttcacccagacccatcccactctcctgtgatccaggtggtccaggagcccaggacaggccttttctgtgggccctggccagacagggttacctggtgaggtgcagagagtccctctagtggccattttgtatggtagttgctaatgcagaacaagttctgtcttgggcttaaattgactgaagactttagggggaaagaatagtaaatgcatgtaaacaaatggggacactctgttcaggagaataatccgactggcatttgtggcagtttttgaaatgtaaatgtattcatgtgtgttcttgtaaatacgtgtcgctcagatgtcctttgaagtgggagggaatcaatccggggataatttcaaatggaatagagtattttgatattgttcattcagagggtgatgtgtacatatctatattgtatatatgtgatgaaaatgcattggctttttgtgcagatacaacctgctctctgtactgctgttggacagtcagtgttttaatgtttctacagttttgctattgcacgatttcatattttgcctctatgatgaacggcaaccattatttgtaactgtttagtgctgtaaagaaatattccaagtgtcattaggattgttgctgccagaactgatatgcatgaatggcacttaaaataaatatattatgttaactctatttacaacaaaaaaa

SEQ ID NO: 71239 - DNA, 1319 bp, Homo Sapiens
  misc_feature (164)..(221): n is a, c, g, or t
gaaaaaaatgtggtttggcctgctgctgttttgatttatggaatttgaaaaagataattataatgcctgcaatgtgtcatatactcgcacaacttaaataggtcatttttgtctgtggcatttttactgtttgtgaaagtatgaaacagatttgttaactgaannnnnnnnnnnnnnnnnnnnnnnnnnnnnnnnnnnnnnnnnnnnnnnnnnnnnnnnnncgtgaagtgatgaaatttagaatgacctctaacactcctgtaattgtcttttaaaatactgatatttttatttgttaataatactttgccctcagaaagattctgataccctgccttgacaacatgaaacttgaggctgctttggttcatgaatccaggtgttcccccggcagtcggcttcttcagtcgctccctggaggcaggtgggcactgcagaggatcactggaatccagatcgagcgcagttcatgcacaaggccccgttgatttaaaatattggatcttgctctgttagggtgtctaatccctttacacaagattgaagccaccaaactgagaccttgatacctttttttaactgcatctgaaattatgttaagagtctttaacccatttgcattatctgcagaagagaaactcatgtcatgtttattacctatatggttgttttaattacatttgaataattatatttttccaaccactgattacttttcaggaatttaattatttccagataaatttctttattttatattgtacatgaaaagttttaaagatatgtttaagaccaagactattaaaatgatttttaaagttgttggagacgccaatagcaatatctaggaaatttgcattgagaccattgtattttccactagcagtgaaaatgatttttcacaactaacttgtaaatatattttaatcattacttctttttttctagtccatttttatttggacatcaaccacagacaatttaaattttatagatgcactaagaattcactgcagcagcaggttacatagcaaaaatgcaaaggtgaacaggaagtaaatttctggcttttctgctgtaaatagtgaaggaaaattactaaaatcaagtaaaactaatgcatattatttgattgacaataaaatatttaccatcacatgctgcagctgttttttaaggaacatgatgtcattcattcatacagtaatcatgctgcagaaatttgcagtctgcaccttatggatcacaattacctttagttgttttttttgtaataattgtagccaagtaaatctccaataaagttatcgtctgttcaa

SEQ ID NO: 71240 - DNA, 698 bp, Homo Sapiens
ctcatagatttgtattctccagagtatccaggtccttctcacagaattaaaaagactgtacagctggcagcctgttatcgattacattgatagtaaatttgaggactacctaaatgcagaatcatgcgtgaacagacatcagatgcctgataacagggtgcagtgttgttcatacttcatggctccttcaggacatggacttaaaccattggatattgagtttatgaagcgtttgcatgaaaaagtgagtatcaccccacttattgccaaagcagacacactcacaccagaggaatgccaacagtttaaaaaacagttgaaaatggtgaacattgttattttacaattctaagaaatatgttgataaggtaacttttccggtcacacacaacagactgattttcctgtggaagacctcacaggagttctcttgaaccaggagactattttgagctgaaatacctggagccctctcaagctatttgggcctttcaatttgaaacccaggtttggatgattctaagctctatggcagagactgtaatcattttctcttcaccctcaggttggggactcaccctcagggttgggagtgactgctgtctctccagcccccaccaattacaccatgttctggttgttaaaatccagtgtatgcatgaaatgtaataaaagtatcttcgcagcaaatacaaaaa

SEQ ID NO: 71241 - DNA, 611 bp, Homo Sapiens
caatcaaaagttttaatcagagaaggtggtgttcagttgttgcttacaatagttgataccccagtatttggagatgcagtggataacagtaattgctggcagcctgctatcaattacattgatagtaaatttgaggactacctaaatgcagaatcgcgagtgaacagatgtcagatgcctggtaacagggtgcagtgttgtttatacttcattgctccttcaggacatggctctgttcacggaaagggcctgggagctgcaacacctcaacagcaacaagcacacctgctacctagaacttggtttctaaaaaccatcctcctctaaaaggaaacagagctctttgaagaaacggtaatttcaaagctagagcacagaaagtataagatgagcccagaatatctttttgtacaagaaagtaaggcaatgctcaaagaatgatggagacatgcccaaaaaaagcagagaagccaacttgaaaagattccaacaggccaaatatgggacaatttgaacatcagaataaaatggtgacagtcacagaattataacccagtgaagaaaggaattcatgacatcatattaatataaataataattgaatattgaaa

SEQ ID NO: 71242 - DNA, 974 bp, Homo Sapiens
  misc_feature (45)..(86): n is a, c, g, or t
  misc_feature (90)..(124): n is a, c, g, or t
tagaaatgtatagactccactatagggcgctagcggtcggtattnnnnnnnnnnnnnnnnnnnnnnnnnnnnnnnnnnnnnnnnnnccgnnnnnnnnnnnnnnnnnnnnnnnnnnnnnnnnnnncagtcgacggtaccggacatatgcccgggaattcggccattacggccggggagtgcgagatccgctgctgctgaggagaggagcgtcaacagcagcaccatggtagctcaacagaagaaccttgaaggctatgtgggatttgccaatctcccaaatcaagtatacagaaaatcggtgaagagaggttttgaattcacgcttatggtagtgggtgaatctggattgggaaagtcgacattaatcaactcattattcctcacagatttgtattctccagagtatccaggtccttctcatagaattaaaaagactgtacaggtggaacaatccaaagttttaatcaaagaaggtggtgttcagttgctgctcacaatagttgataccccaggatttggagatgcagtggataatagtaattgctggcagcctgttatcgactacattgatagtaaatttgaggactacctaaatgcagaatcacgagtgaacagacgtcagatgcctgataacagggtgcagtgtcgtttatacttcattgctccttcaggacatggacttaaaccattggatattgagtctatgaagcgtgtgcatgaaaaaagtgaactatcatcccacttatcgccaaagcagacacactcacaccagaggaatgccaacagtttaaaaaacagataatgacacgaaatccaagaacattaaagttaagatatacgaaatttccaggaaaaccagatgatgaaggaaggaaaagtcaacttggttaaaagataaagggaccgtttagctcttgactgtggtaaggtagtaataactatcaattggaagttaatggccacaggggtcacga

SEQ ID NO: 71243 - DNA, 2496 bp, Homo Sapiens
  misc_feature (1995)..(2005): n is a, c, g, or t
gggggaggagggagcgggagtcgagcgagagcctgtggaggagtccgcctgctgtagcgtgcgtaagcaaggcagctacgccgggcggctacgctgcggaatcggcgtaggcgcctttggagaatcggcgggctgcgctccgctggggctggtcgcggagggggggaggggatgtcggtcagtgcgagatccgctgctgctgaggagaggagcgtcaacagcagcaccatggctcaacagaagaaccttgaaggctatgtgggatttgccaatctcccaaatcaagtatacagaaaatcggtgaagagaggttttgaattcacgcttatggtagtgggtgaatctggattgggaaagtcgacattaatcaactcattattcctcacagatttgtattctccagagtatccaggtccttctcatagaattaaaaagactgtacaggtggaacaatccaaagttttaatcaaagaaggtggtgttcagttgctgctcacaatagttgataccccaggatttggagatgcagtggataatagtaattgctggcagcctgttatcgactacattgatagtaaatttgaggactacctaaatgcagaatcacgagtgaacagacgtcagatgcctgataacagggtgcagtgttgtttatacttcattgctccttcaggacatggacttaaaccattggatattgagtttatgaagcgtttgcatgaaaaagtgaatatcatcccacttattgccaaagcagacacactcacaccagaggaatgccaacagtttaaaaaacagataatgaaagaaatccaagaacataaaattaaaatatacgaatttccagaaacagatgatgaagaagaaaataaacttgttaaaaagataaaggaccgtttacctcttgctgtggtaggtagtaatactatcattgaagttaatggcaaaagggtcagaggaaggcagtatccttggggtgttgctgaagttgaaaatggtgaacattgtgattttacaatcctaagaaatatgttgataagaacacacatgcaggacttgaaagatgttactaataatgtccactatgagaactacagaagcagaaaacttgcagctgtgacttataatggagttgataacaacaagaataaagggcagctgactaagagccctctggcacaaatggaagaagaaagaagggagcatgtagctaaaatgaagaagatggagatggagatggagcaggtgtttgagatgaaggtcaaagaaaaagttcaaaaactgaaggactctgaagctgagctccagcggcgccatgagcaaatgaaaaagaatttggaagcacagcacaaagaattggaggaaaaacgtcgtcagttcgaggatgagaaagcaaactgggaagctcaacaacgtattttagaacaacagaactcttcaagaaccttggaaaagaacaagaagaaagggaagatcttttaaactctctattgaccaccagttaacgtattagttgccaatatgccagcttggacatcagtgtttgttggatccgtttgaccaatttgcaccagttttatccataatgatggatttaacagcatgacaaaaattatttaattatgggttcttgatggagattaagatgccttgaattgtctagggtgtcctgtacttagaaagtaagagctctaagtacctttcctacattttctttttttattaaacagatatcttcagtttaatgcaagagaacattttactgttgtacaatcatgttctggtggtttgattgtttacaggatattccaaaataaaaggactctggaagattttcattgaggataaattgccataatatgatgcaaactgtgcttctctatgataattacaatacaaaggttccattcagtgcagcatatacaataatgtaatttagtctaacacagttgaccctattttttgacacttccattgtttaaaaatacacatggnnnnnnnnnnnccctatatgcttactgtgcacctagagcttttttataacaacgtctttttgtttgtttgttttggattctttaaatatatattattctcatttagtgccctctttagccagaatctcattactgcttcatttttgtaataacatttaatttagatattttccatatattggcactgctaaaatagaatatagcatctttcatatggtaggaaccaacaaggaaactttcctttaactccctttttacactttatggtaagtagcagggggggaaatgcatttatagatcatttctaggcaaaattgtgaagctaatgaccaacctgtttctacctatatgcagtctctttattttactagaaatgggaatcatggcctcttgaagagaaaaaagtcaccattctgcatttagctgtattcatatattgcatttctgtattttttgtttgtattgtaaaaaattcacataataaacgatgttgtgatgtacc

SEQ ID NO: 71244 - DNA, 659 bp, Homo Sapiens
  misc_feature (395)..(414): n is a, c, g, or t
ggcttaagacatctagccccgtctctaatagacaacacatttatattgcagatattacttttttttcagtttatgaccaggtatttatgaaggactattggcagggaaaatatgaatatgttaactttagcttatggcatcaatttactaaggaacaacaggctcaccaactgatgtcaaacataaaaacccccacatcagtctgatacgatatggtactactttgaatctgttactagtaccatcttgacagaggatacatgctcccaaaacgtttgttaccacacttaaaaatcactgccatcattaagcatcagtttcaaaattatagccattcatgatttactttttccagatgactatcattattctagtcctttgaatttgtaaggggnnnnnnnnnnnnnnnnnnnncttacgatgcacttttctccagcacatcagatttcaaattgaaaattaaagacatgctatggtaatgcacttgctagtactacacactttgtacaacaaaaaacagaggcaagaaacaacggaaagagaaaagccttcctttgttggcccttaaactgagtcaagatctgaaatgtagagatgatctctgacgatacctgtatgttcttattgtgtaaataaaattgctggtatgaaatgacaaa

SEQ ID NO: 71245 - DNA, 387 bp, Homo Sapiens
  misc_feature (14)..(14): n is a, c, g, or t
  misc_feature (32)..(32): n is a, c, g, or t
aatgatttagtatntggagagattgtagtatntggagagatggattaatgtttcctagaaagggaaactcttatgtccctctaactgtccaaaaggtactgtgtgagctactggaggcctttcccctttaggatcagacatatccctactaatgaaggacacttacacatcattagcagactccctgctgagcgccctgcatgcacgctcttatttactcttcacacaacattaggagagagctctgtttcccattttgccttggagggaataaagccttagcagagattttggacttcgctcaaggttatacctctaataagtgcaagatccaggacttacatccatgctccaaagctgatgctgttaaaaaatttattattttgt

SEQ ID NO: 71246 - DNA, 693 bp, Homo Sapiens
  misc_feature (28)..(28): n is a, c, g, or t
ggaacacgtagaaagtgcaagcaaagtntcagctcaaattctcaagagcaaccttgcatcaatggaacaacaaattgttcatctggaacgtgacatcaagaaattcccccaagcagaaaatcaacacgataagtttgtggaaaagatgaccagctttacaaagactgcccgagaacagtatgaaaaactctccaccatgcacaacaacatgatgaagctctatgagaatcttggagaatacttcatttttgactcaaagacagtgagcatagaagagttctttggtgatctcaacaacttccgaactttgtttttggaagcagtgagagaaaacaataagagaagagaaatggaagagaagaccaggagggcaaaacttgcaaaagagaaagctgaacaagaaaagttagaacgccagaagaaaaagaaacaactcattgatataaacaaagagggtgatgagactggtgtgatggataatcttctagaagccctacaatcaggtgcagcattcagagaccgtcgaaagcggattccaaggaatccagtggtaaatcatccctgtgcaacaagggctaatccaagatcagctacataaacggcctgagtgctgttttaaacaggattgggtgatggtacaacatgactttttaagataatcaagtagtaaaagtttctagtggaaacatgata

SEQ ID NO: 71247 - DNA, 1035 bp, Homo Sapiens
ggcgtcgcgatggaggagagcgggtacgagtcggtgctctgtgtcaagcctgacgtccacgtctaccgcatccctccgcgggctaccaaccgtggctacagggctgcggagtggcagctggaccagccatcatggagtggccggctgaggatcactgcaaagggacagatggcctacatcaagctggaggacaggacgtcaggggagctctttgctcaggccccggtggatcagtttcctggcacagctgtggagagtgtgacggattccagcaggtacttcgtgatccgcatcgaagatggaaatgggcgacgggcgtttattggaattggcttcggggaccgaggtgatgcctttgacttcaatgttgcattgcaggaccatttcaagtgggtgaaacagcagtgtgaatttgcaaaacaagcccagaacccagaccaaggccctaaactggacctgggcttcaaggagggccagaccatcaagctcaacatcgcaaacatgaagaagaaggaaggagcagctgggaatccccgagtccggcctgccagcacaggagggctgagcctgcttccccctcccccaggggggaaaacctccaccctgatccctccccctggggagcagttggctgtggggggatccctcgtccagccagcagttgctcccagttcaggaggtgctcctgtaccctggccacagcccaatcctgccactgctgacatctggggagactttaccaaatctacaggatcaacttccagccagacccagccaggcacaggctgggtccagttctgacctgagcacggtttttcctcatgtgacttctgggaaggcgctccctcatctgggccaaaggaaggaggaccaaggccctcctcagctggactgtggttggggcatgaactctcctctcctccttgtctggctctgttgacaaaccgggcatgtttggcagtaaattggcaccgtgtcacactgtttcctgggattcaagtatgcaaccagaacacaggagaagaaaagctccag

SEQ ID NO: 71248 - DNA, 1686 bp, Homo Sapiens
atagtaaattttaaatagatttcaacataaatggttgataacaaagtcagcttcaggtatgcatgttagatgacgtgagactaaccacccatcccgcgggcacccctcgttccaccttgtatgtggctttctgcgttttctccagagcgcacaagggctggtgagaagatgctggaagtgtggcaactcagggtgtttggttgcccaaaagcatgtctggtgtggctttcccagctacctggtgtcatgagactgatcactgagtctcatgatttggtcattgaaacaaccagaaaggtctctgacttctctgtcccctcttctcttcctacgggtcggactcgggaacatcaataggaggtgctcctgtaccctggccacagcccaatcctgccactgctgacatctggggagactttaccaaatctacaggataaggacggccatgccagacccagccaggcacaggctgggtccagttctgacctgagcacggtttttcctcatgtgacttctgggaaggcgctccctcatctgggccaaaggaaggaggacgaagccctcctcagctggcctgtgtttggggcatgaatctctcctctcctccttgtctggctctgttgacaaaccgggcatgtttggcagtaaattggcaccgtgtcacactgtttcctgggattcaagtatgcaaccagaacacaggagaagaaaagctccaggatccctggtccccatctgtcctcttgatgtgagagagactctgagacttcttccatcgcaatgacctgtattaaacacaagccccccaagcaaaagaagaggttgagtttgctgccaggaatcagatcagcccttcccagggtctgcaggtgtcacatgatcacagttcagcggggaggctttccgtacccacactggctgtagcccaccttcagtccatctgccctccagaggagcgtcttcttcctgatttttagcaggtttagaggctgcagcttgagctacaatcaggagggaaattggaaggattagcagcttttaaaaatgtttaaatattttgctttgctaatgtgctgatccgcactaactcatctttgcaaaaggaactgctccctcggcgtgccccagctggggcctctgaagggattcctcactgtgggcagctgccctgagcttcaggcagcagtgttcatctctggccagttgtctggtttccatgtattctaggccaggtaggcaacacagagccaaggcgggtgctggaagccagacggaacagtgttggggcaggaaggtggatgctgttgtcatggagctgtgggagttggcactctgtctgctggtggccctctcggctcacatgttcacagtgcagctcctggcagacttgggttttctctttggtggtttctaaagtgccttatctgcaaacaacttcttttctccttcaggaactgtgaatggctagaagaaggagctcagtaaactagaagtccagggttgcttggtttactggtttataagaaatctgaaagcacctctgacattccttttattaactcacctctcagttgaaagatttcttctttgaaaggtcaagaccgtgaactgaaaaaagtgttggcctttttgcgggaccagatttttaagataaaataaatatttttacttctgtcattgtatgtg

SEQ ID NO: 71249 - DNA, 983 bp, Homo Sapiens
ggaacggtggaagtcgccggaagttcggtgggctccaggcgtcgcgatggaggagagcgggtacgagtcggtgctctgtgtcaagcctgacgtccacgtctaccgcatccctccgcgggctaccaaccgtggctacagggctgcggagtggcagctggaccagccatcatggagtggccggctgaggatcactgcaaagggacagatggcctacatcaagctggaggacaggacgtcaggggagctctttgctcaggccccggtggatcagtttcctggcacagctgtggagagtgtgacggattccagcaggtacttcgtgatccgcatcgaagatggaaatgggcgacgggcgtttattggaattggcttcggggaccgaggtgatgcctttgacttcaatgttgcattgcaggaccatttcaagtgggtgaaacagcagtgtgaatttgcaaaacaagcccagaacccagaccaaggccctaaactggacctgggcttcaaggagggccagaccatcaagctcaacatcgcaaacatgaagaagaaggaaggagcagctgggaatccccgagtccggcctgccagcacaggagggctgagcctgcttccccctcccccaggggggaaaacctccaccctgatccctccccctggggagcagttggctgtggggggatccctcgtccagccagcagttgctcccagttcagatcaacttccagccagacccagccaagcacaggctgggtccagttctaacctgagcacggtttttccctcatgtgacttctgggaaggcgctccctcatctgggcccaaaggaaggaggaccaaacccctcctcacctgggcctgggtttgggggcatgaaatctctccccctccccctttggccgggctccggttgaaaaaccggggcatgttttggcacaaaaattggaaccgctggtcacactggttttcctggggaattcagataa

SEQ ID NO: 71250 - DNA, 700 bp, Homo Sapiens
  misc_feature (16)..(16): n is a, c, g, or t
  misc_feature (77)..(77): n is a, c, g, or t
gaggagtagttgctgnccagcctggatgacgacctctgacccatgtcgccactggagctggtggcagtggggctggngaggaaggaacgccaagggccgcagagagaacccaggctccatctgggccgagacatcctggcctctgagtctgacaggggagcccactgcccggccaaacaggagctggggctgggagctcagactcagtccagcccaggtgggagtcctggggaaggagatagcccacgagcctcaccagccctgggtgacagccagatggtgtccgaagccccaggcctggggcaggcagggggtgtctgggccagggatgaacggaggccaaactgggtaacaagcagagtcgggtgtgcagtgtctcataggcaacgtgaggagtgtttgagcaggagccggggcaggaggttgtggaaggccctggaaggtgccgaccagccaggccctctgatttggccggtgggggccatcggtgacgtgggaacgatggtttcagggaagcagtggctcagagctccgtgacgttttttggaacgggaggtgcgagatgcagacatttaacacatccggggctgtagccaggcagaggagcgtcagaccccccaccctgtttggaagggagaacccatcagattcgccttgggtgtagatgaaacagaaataaaagaatcaaagacgactcaag

SEQ ID NO: 71251 - DNA, 1232 bp, Homo Sapiens
tgagataccaggtgttaaaaaagcaggctggtaccggtcggaattcccgggatatcgtcgacccacgcgtcggaatgtcttaagggaaaaatcatgagggatgtgatagatggaggtgaccagtacagaaagacaacacctcaggaacttaagagatttgagaacttcataaaatctcgtcctccttttgatgttgtcattgatggtctcaatgttgccaaaatgtttcctaaagttcgtgaatctcaacttctcttgaatgtcgtctctcaactagccaaacggaatctgcgactgctggtcctaggccggaagcacatgctaagacggagttcccagtggagtcgggatgagatggaagaggtgcaaaagcaagccagctgtttttttgctgatgacatctcggaggatgatccattccttctgtatgccacactgcactccgggaatcactgcaggtttatcacaagagacctgatgcgggaccacaaggcctgtctgcctgatgccaagacccaacgcctgttttttaagtggcagcagggacatcagctggcaattgtaaataggtttccaggatcaaaactaacctttcagcgtattctcagctatgacacagtggtgcaaacaactggagactcgtggcacataccatatgatgaagacttggtagaaagatgttcctgtgaagtaccaaccaaattgctttgcctccaccaaaagacatagagattcttacctctatgctaagtttgtgtttgggtaccctctaggttggcatcagaggctcttgagctggtgtttgtttagggcattgcctctgtcctgaagataaaaggattctattaacagcattgacattgattttttaatgaaatgagatatatcttttcataaccagctgcgtttttttcccctaacatttgtttttggaggcttatcaagagttggagaacttagtgtagagcaaaacctgcatttctcctactgggccagctattccacttagcttgggtgactaatagtgcttttggtatccattttttgctacttctgaccttgccttccaggcctaccaatagcagaatcaatccatctgtccctgagatactcatgttgtttcaaatgcctcctcccatttctggcatagtctcattctctgtatgttatgccctatccacatggaatcatttatcgtcctctgtaataaactggccaagatactaaaaaaa

SEQ ID NO: 71252 - DNA, 2046 bp, Homo Sapiens
gtccggaattcccgggatctggcacttgtgggaagtgctgagggctcttaactacacccatctctcagcgcagtgtgaaggtgtgctacaggccagttacgctggccagcttgaaagtgaggggctctgggagtgggccatctttgtcctcctgcacattgacaactcaggcatacgtgagaaggctgttcgagagctgcttacccggcactgccagctgttggagacccctgaatcttgggctaaagagactttccttacccagaagctccgtgtacctgccaaatggatccacgaggccaaagctgtgcgagcacacatggaatctgacaagcacttagaggccctttgcttatttaaggctgagcactggaaccgctgccacaagctcatcatccgacacttagcttctgatgccatcattaatgagaactatgactacctgaaggggttcttggaagacctggcacctccagagcgcagcagcctaattcaggattgggaaacatctgggcttgtttacctggactatattagagtcattgaaatgctccgccatatacagcaggtggattgctcaggtaatgacctggagcagttacacatcaaagtgacttcactgtgcagtcggatagagcagattcagtgttacagtgctaaagatcgcctggctcagtcagacatggccaaacgtgtagccaacctgctgcgcgtggtgctgagtctgcatcatcctcctgatagaacctccgactcaacaccagaccctcagcgagtccctttgcgcctcttggctccccacattggccggcttcccatgcctgaggactatgccatggacgaactgcgcagccttacccagtcctatctgcgagaactggctgttgggagcctgtgagccccaggcactttgcatcacagtcacatgcccattcacaccacacagaggttccctgccttgtttggattggcactgtttgccattctctgggttggctgtggcatctaccctccctccctgctgccagaagcagcatcctccacttgttcagggcttttcttaatactgaacgtagcataagggcttctggaacccagaagaggagacagtttaccatcctcaagatcattcagtgtttttcctttaaaaaaatggtcaataaagctcctttggcagaatcccccaaagaaccagggtattctttttccatccctagccattctggatcttgtgaccctccatgccaaccagcttccctactcctaccctggcccttttatactaggactccttaggaggagtgagacaggtgataatggatccttaacagatgaactatccacagaaggaagagggatccgtctcttaagtaattggttagttaacactgaattttggaggcaaaggagggttggcctgagttaggaaacaaaatgggatctttctgacacacttagggcagaagtgaatgcctgtcacggagggattgatcttcagggctgtttttgttcctgcctttagagttccatgaacaccatacctttgctactactatgtgcaggaacccttggtcacatgtgacatgtctgtgggaagctcccagagtttggtttggtccctggttttcagtcttgctgagactctgtctggatttgcctgcagagtttggataaaaaatggcaggttgggtaaccctccctgttcatcccatgttagctccaaagcatttcccaccctccatctaccccttccagaagcaaaaacaaaccatgactgaggcaggcatggagttgggcgttaggggcaggcagagggcctttgctacactgctgacagctatagggagccccaggtaatggcatgagatagctggtgttagggctatctcaggcaatatggccacacctgggtctttatgcatgaagataatgtaaaggtttttattaaaaaatatatatatgtataaataaatgatctagatattttcctctttttctgaagctactttcttaaaaaataaataaaatgtttatagcattcctggt

SEQ ID NO: 71253 - DNA, 1152 bp, Homo Sapiens
  misc_feature (1089)..(1089): n is a, c, g, or t
cgcgagagagtatgaagtcgacggcgcgccgaattcggcacgagggaagaggaagtctccttaacccaaaaaaacagccctgtggaggctgtattcagctacctcacaggcaaaaggatcagtgaggcctgctctctggcccagcagtcaggggatcatcgtcttgctcttcttttatctcagtttgtgggtagccagtcagtccgggagctgctcaccatgcagttggtggactggcatcagctccaagcagactccttcatccaggatgagagactgcgcatctttgctctgttggctggaaaaccggtgtggcagctctcagaaaagaagcaaataaacgtgtgctcccagttggattggaaacgctccctggctatccatctttggtatttgcttccaccaacagcctccatttctagggcactcagcatgtatgaagaagcatttcagaatacctctgacagtgacagatatgcctgctccccacttccttcgtatctggagggttctggctgtgtgatagcggaggagcaaaactcacagacaccacttcgagatgtctgctttcaccttctaaaactctacagtgacagacattatgatctcaaccagctgctggagcctcgaagcataacagcagatcctttggactaccgcctaagctggcacttgtgggaagtgctgagggctcttaactacacccatctctcagcgcagtgtgaaggtgtgctacaggccagttacgctggccagcttgaaagtgaggggctctgggagtgggccatctttgtcctcctgcacattgacaactcaggcatacgtgagaaggctgttcgagagctgcttacccggcactgccagctgttggagacccctgaatcttggggctaaagagactttccttacccagaagctccgtgtacctgccaaatggatccacgaggccaaagctgtgcgagcacacatggaatctgacaagcacttagaggccctttgcttatttagggctgagcactggaaaccgctgccacaagctcatcatccgacacttagctttctggtggattgctcaggtaatgacctggnagcagttacacatcaaagtgacttcactgggcagtcgggatagagcagattcagtgttaccgg

SEQ ID NO: 71254 - DNA, 817 bp, Homo Sapiens
  misc_feature (22)..(22): n is a, c, g, or t
  misc_feature (43)..(43): n is a, c, g, or t
aaagaaaatccagttaaattantgaagtgagattttcagatcntagatcttgaataaaggaaagtcttttcatcttgatggccccaaagcttgttggtcatgtctttatttctggccactatcttcttaaataatatatttttaagccctcatttatttttggttttgggtgaggaaagtcatgttttctaagtcctctcccctaataaaacctacccaacaatagtgctttgaaaagtggtagttatcttgaagatactcttgccaaatgcaaagataaacattctttttgtctgctttataaatatgaaatatgccagatctatagtattttaatgtgcatctactttaaatgagtcatcttggggtttttataattcccttatgttcttgcccctctacacttgaaataacaaaatgccttaattttatggattagttctcttatagtagacaggcagctatatgcagcaaaaccaataaagttatttttcaactttcatagttgtaaaatatcttataacagaatacaaaacagctaagaaaacatgccacattttattttagcattttcaaataatttgtttttggtgtaagcacaggataaaaaaggagagcgtcaaagaaaagagacataacacctaacattcataaaaattaacaaagtatattttggatgatgtttttacaggaaatattttaaataagttggtagaacttttaaaatggtactgtattagctaataaaatattcagtacaaatatatgtttggatttatgcattaaaaaactaataaaattatttccaactttaaaa

SEQ ID NO: 71255 - DNA, 600 bp, Homo Sapiens
acttcgcctttttgtcaaacgtgagtctttttacctcatgcccctcagcttccacagcatcttcatctggatgtttatttctcaaagggagccaggggaagcgtgtgagagagtgagaccgacagagtgagcacctccccaagccgctaccaccagccctccaacatggcgcctggcacatcaccctaaaaagtcatttcttggagaagcgatggatgacagagattaatctgagagttactattaatggagaaacttagaacttaccatttttcctgtgaggtttcggtgctgatacttctattctgtgagttctggcaattgtgtccgttcacccagcctggtgatgcagcaggtgtcacagaaggaccctgtcccagctggtcctgctccactgctaggatggtgtggcctctgatctgtgaccgtgtcttgaggggagaccaggcccttgatcacaagcgtatccatggtgaggttccgtggatggaagctcatggatgttccttcctgatgttcatctgccaccatgctattgaatgcatcctgtttataactgtcttctaaatattgaatagaaataaagcatttgtacagtaa

SEQ ID NO: 71256 - DNA, 696 bp, Homo Sapiens
  misc_feature (206)..(216): n is a, c, g, or t
gggtgccgtaaggtgggaggtgacacatggagagcttcgtcctggccgagcaggcacccagccccatgtcccccgccagcattctggatgtcagaggagggtgcgtgtgatggcgtcacattcatctgaagcacactgattgattttccacaaggtggcaagtttgatcaaattgaccgcttttcatgagacaaccagatgctgtnnnnnnnnnnncagcactgggatgtgttgaggagggggcagtttgctgtgctctgttctgtctgctgctctctctgggggccgcacaatgtccgcacacatcacggaggggagaaaggcatcagtaccaaacggaacaacctcttttttctacattgtccatacccggacatgtgaggctctattatcaacaggtggtgagaaaaattctgtttttattcgctttctggtaacttctgtaggccctggctcaaggacttagcatttcgtctcatgtacatctttttcttaagtgttctttgccatttctggaattgtccttggtttttccttagctcataggtcatagatgcagaaatatagtatttaaggcatccgcatccagcatcagatggctttgcatccagaaaaacattgataactcagtttgaagcaccaagcatgtgtaatatggctctatacaatataataaatgcataatgttaagcttta

SEQ ID NO: 71257 - DNA, 824 bp, Homo Sapiens
  misc_feature (163)..(163): n is a, c, g, or t
cagtcgacggtaccggacatatgcccgggaattcggccattacggccgggatttcaaaaaaaatctgtattttctgggatatgtcatggcaagaggaagaactggtgtttgaaagcagtatggattctttaaatgcctctcactcttacaagatagtaggctntgagataataaacttacccgtgtcaattaacatttaaactggcatatagaaaaaaaggaggatttttctgcatcgtaaaataatcagtatggtttatatgtcgaatttgacatttgtgtgtaatttcatggtggcctagtgttgtggtgcttctggtaatggtaatagaagctcaactatttttttgtggatttcagtttttatcatcagaagtcctagacagtgacatttcttaatggtgggagtccagctcatgcatttctgattatacaaaacagtttgcagtaggttatttgtcatttcagttttttactgaaatttgagctaaacatttttacatgtaaatacttgtatttaccaaagatttaaatcagttgattaattaattaactcaaatactgtgaactatctttaaaacactagaaaaaagaaatgttagtatctcaattacaccaactgtgcaaatgaactttgataaaatagaaataatctacattggcctttgtgaaatctggggaagagctttaggattctagtagatggatactgaatactcaggcccacttaatttattaatgtatacattgtgtttttgtctttatgctatgtacagagaaatgtgataattttttataataaatattttttatgatgataaaaa

SEQ ID NO: 71258 - DNA, 780 bp, Homo Sapiens
ggagacagggcaatgtccgagtgtgaatcagctactaacagagatggatggtctggaagcacgccagcaggttttattatggcagccactaacaggccagatataattgaccctgcaatcctgcgcccgggccgcctggacaaaacactgtttgtgggtttaccgccccctgcagatcgccttgccatcttaaaaactatcacaaaaaatggtaccaaaccaccactggatgcagatgtaaatttggaagcaattgctggtgaccttcgctgtgattgctatacgggcgcagatctctctgctttggtacgagaagcttctatctgtgccctgagacaggaaatggcaagacagaagagtggaaatgaaaaaggtgaactcaaggttagtcataagcattttgaagaagctttcaagaaagtaagatcatctatatcaaaaaaggatcaaatcatgtatgaacgtttgcaggagtccctcagccggtgatgtctccagcagccggcttagaggagctagcccatcaagccggcagagaatcccccacacgctctgaaggacccactttcagctggacacaggcgcggcctcatgtaaacattttattttcaaatgaatgaggccaagctgaagctgaagctgaagattcttcccatctggccagccttgtgtgaaaatgccttcttcctctttaagaaaaaggacaatttttaaactgctgaaataaaatgactgttacatttttcaaataaaacttttactttgaactattttgactat

SEQ ID NO: 71259 - DNA, 635 bp, Homo Sapiens
gtgaagaaaggtgtctgtgatcaaagttttgggattcatgttgcagagcttgctaatttccctaagcatgtaatagagtgtgctaaacagaaagccctggaacttgaggagtttcagtatattggagaatcgcaaggatatgatatcatggaaccagcagcaaagaagtgctatctggaaagagagcaaggtgaaaaaattattcaggagttcctgtccaaggtgaaacaaatgccctttactgaaatgtcagaagaaaacatcacaataaagttaaaacagctaaaagctgaagtaatagcaaagaataatagctttgtaaatgaaatcatttcacgaataaaagttactacgtgaaaaatcccagtaatggaatgaaggtaatattgataagctattgtctgtaatagttttatattgttttatattaaccctttttccatagtgttaactgtcagtgcccatgggctatcaacttaataagatatttagtaatattttactttgaggacattttcaaagatttttattttgaaaaatgagagctgtaactgaggactgtttgcaattgacataggcaataataagtgatgtgctgaattttataaataaaatcatgtagtttgtggaatttg

SEQ ID NO: 71260 - DNA, 681 bp, Homo Sapiens
acacagagcagaccctgtaccaggtacaggagaggatggcaggtgcagagcgggcactgagctctgcaggtgaaagggctcggcagttggatgctctcctggaggctctgaaattgaaacgggcaggaaatagtctggcagcctctacagcagaagaaacggcaggcagtgcccagggtcgtgcccaggaggctgagcagctgctacgcggtcctctgggtgatcagtaccagacggtgaaggccctagctgagcgcaaggcccaaggtgtgctggctgcacaggcaagggcagaacaactgcgggatgaggctcgggacctgttgcaagccgctcaggacaagctgcagcggctacagggtaagaaatggggcaccagagacacaagactgcgggaaaccccccctaaactgacacctgcccttcctagaattggaaggcacctatgaggaaaatgagcgggcactggagagtaaggcagcccagttggacgggttggaggccaggatgcgcagcgtgcttcaagccatcaacttgcaggtgcagatctacaacacctgccagtgacccctgcccaaggcctaccccagttcctagcactgccccacatgcatgtctgcctatgcactgaagagctcttggcccggcagggcccccaataaaccagtgtgaacccccaaa

SEQ ID NO: 71261 - DNA, 2128 bp, Homo Sapiens
agatctccactgaggagatcctgggttgcagtgccatgcctgtgattgtgactctcgttggaatagatacacctcagtgtcaccgcttcacacggtcactgcagctgccgcccaggggtgtctggtgtgcgctgtgaccagtgtgcccgtggcttctcaggaatctttcctgcctgccatccctgccatgcatgcttcggggattgggaccgagtggtgcaggacttggcagcccgtacacagcgcctagagcagcgggcgcaggagttgcaacagacgggtgtgctgggtgcctttgagagcagcttctggcacatgcaggagaagctgggcattgtgcaggccatcgtaggtgcccgcaacacctcagccgcctccactgcacagcttgtggaggccacagaggagctgcggcgtgaaattggggaggccactgagcacctgactcagctcgaggcagacctgacagatgtgcaagatgagaacttcaatgccaaccatgcactaagtggtctggagcgagataggcttgcacttaatctcacactgcggcagcccgaccaccatcttgacttgctcaaacattcaaacttcctgggtgcctatgacagcatccggcatgcccatagccagtctgcagaggcagaacgtcgtgccaatacctcagccctggcagtacctagccctgtgagcaactcggcaagtgctcggcatcggacagaggcactgatggatgctcagaaggaggacttcaacagcaaacacatggccaaccagcgggcacttggcaagctctctgcccatacccacaccctgagcctgacagacataaatgagctggtgtgtggggcaccaggggatgcaccctgtgctacaagcccttgtgggggtgccggctgtcgagatgaggatgggcagccgcgctgtgggggcctcagctgcaatggggcagcggctacagcagacctagcactgggccgggcccggcacacacaggcagagctgcagcgggcactggcagaaggtggtagcatcctcagcagagtggctgagactcgtcggcaggcaagcgaggcacagcagcgggcccaggcagccctggacaaggctaatgcttccaggggacaggtggaacaggccaaccaggaacttcaagaacttatccagagtgtgaaggacttcctcaaccaggagggggctgatcctgatagcattgaaatggtggccacacgggtgctagagctctccatcccagcttcagctgagcagatccagcacctggcgggtgcgattgcagagcgagtccggagcctggcagatgtggatgcgatcctggcacgtactgtaggagatgtgcgtcgtgccgagcagctactgcaggatgcacggcgggcaaggagctgggctgaggatgagaaacagaaggcagagacagtacaggcagcactggaggaggcccagcgggcacagggtattgcccagggtgccatccggggggcagtggctgacacacgggacacagagcagaccctgtaccaggtacaggagaggatggcaggtgcagagcgggcactgagctctgcaggtgaaagggctcggcagttggatgctctcctggaggctctgaaattgaaacgggcaggaaatagtctggcagcctctacagcagaagaaacggcaggcagtgcccagggtcgtgcccaggaggctgagcagctgctacgcggtcctctgggtgatcagtaccagacggtgaaggccctagctgagcgcaaggcccaaggtgtgctggctgcacaggcaagggcagaacaactgcgggatgaggctcgggacctgttgcaagccgctcaggacaagctgcagcggctacaggaattggaaggcacctatgaggaaaatgagcgggcactggagagtaaggcagcccagttggacgggttggaggccaggatgcgcagcgtgcttcaagccatcaacttgcaggtgcagatctacaacacctgccagtgacccctgcccaaggcctaccccagttcctagcactgccccacatgcatgtctgcctatgcactgaagagctcttggcccggcagggcccccaataaaccagtgtgaacccccaaaa

SEQ ID NO: 71262 - DNA, 641 bp, Homo Sapiens
gaggtatcaaaaccaggtgtcagggataggggccagggatggggtcagaccttgcccgccgtgcatcctgcagtagctgctcggcacgacgcacatctcctacagtacgtgccaggatcgcatccacatctgccaggctccggactcgctctgcaatcgcacccgccaggtgctggatctgctcagctaaagctgggatggagagctctagcacccgtgtggccaccatttcaatgctatcaggatcagccccctcctctatagggacacagcaagaacttaagaacatagattctccagcatgggcatgaggatacagttttggggtatggactcaggacatgtacatgggataggggtttgttaccaggcataaggatataatcacaaggacagggactatacaaagggctcaaactcaagaacatggacctgggaccacatatgggcaataactcaggagccagtcaagggatcataaacactaatccagtgtagtccctgaggctcaagtatgaaccaagggagatacagacaccgggagttgccaaaggggacaaccacatggcctgggacacgtgggaggctcacggttgaggaagtccttcacactctggataagttcttgaagttcctggttg

SEQ ID NO: 71263 - DNA, 1369 bp, Homo Sapiens
gggagcggactcctttggctatggcctccaactttaagaaggcaaacatggcatcaagttctcagcgaaaaagaatgagccctaagcctgagcttactgaagagcaaaagcaggagatccgggaagcttttgatcttttcgatgcggatggaactggcaccatagatgttaaagaactgaaggtggcaatgagggccctgggctttgaacccaagaaagaagaaattaagaaaatgataagtgaaattgataaggaagggacaggaaaaatgaactttggtgactttttaactgtgatgacccagaaaatgtctgagaaagatactaaagaagaaatcctgaaagctttcaagctctttgatgatgatgaaactgggaagatttcgttcaaaaatctgaaacgcgtggccaaggagttgggtgagaacctgactgatgaggagctgcaggaaatgattgatgaagctgatcgagatggagatggagaggtcagtgagcaagagttcctgcgcatcatgaaaaagaccagcctctattaagatcagtgtcttctttttctactgcaagcacatgtaactagatttagtgcctgccatggtgtgaaatctggcttttgagaacacaaacttttcccccacggacctccctttatcactttaatagtgaccttgagcctattttagccgtttggaagtgttctttgatattacagttctttgtaaaatgacctgcgaattaccctaattctcaaaagcaaaacaagagcacacaagcgtgaagaaaaggatcttaaagctttgagcacctgccattttgccttgcatcgtttccctcgtcatgcatttccacatatccacaaacacagaacgactttagacaagcacatgttacacctgtgttgccacaagcagtcattcttgacggctccagtttttatttgacacttgagtttagttttctcttttataaacccagtgaactcctgcactggcatttggatgtgtgttaatgctatttgttttgtcttaaaagtaaaacctttctcagtttgaacttgtattctctaaggatgagttctttagctttgcttatgagttcctcctctcaattattgtgttgaaggcagcctattagatacaaaactccttaccagcctatggacagaaaatgaataatcctttgctactttcctggcatgaattgctttttgccttggaaggctgctggtttgtaaaactagcagaatttttatatcacctaagcctaaatgatgctctaaaaatagttttggcaaagctaagactggaaaagagtcttgttagtaatttgtgcttgaataaaatggggagagccaggctaacgcaaccct

SEQ ID NO: 71264 - DNA, 747 bp, Homo Sapiens
gatctgaggcctggtctgttggtatcagttggtgatcatgtgggattgtctgtgcacaatcctgctgctccctgttctgatattgatcgtgaagaagacctgtggaaataagagttcagtgaattctacagtcttggtgaagaacacgaagaagactaatccagagataaaagaaaaaccctgccattttgaaagatgtgaaggggagaaacacatttactccccaataattgtacgggaggtgatcgaggaagaagaaccaagtgaaaaatcagaggccacctacatgaccatgcacccagtttggccttctctgaggtcagatcggaacaactcacttgaaaaaaagtcaggtgggggaatgccaaaaacacagcaagccttttgagaagaatggagagtcccttcatctcagcagcggtggagactctctcctgtgtgtgtcctgggccactctaccagtgatttcagactcccgctctcccagctgtcctcctgtctcattgtttggtcaatacactgaagatggagaatttggagcctggcagagagactggacagctctggaggaacaggcctgctgaggggaggggagcatggacttggcctctggagtgggacactggccctgggaaccaggctgagctgagtggcctcaaaccccccgttggatcagaccctcctgtgggcagggttcttagtggatgagttactgggaagaatcagagataaaaaccaacccaaatc

SEQ ID NO: 71265 - DNA, 808 bp, Homo Sapiens
ctggacatccatctggaccaagatgtttggcttttgaagcaaagagtttggttcttaagactgtgttctttgacagttaagtgtcgagaagactgaagactgaatgagtcattgttgagaattctctaggtctcagtaaccctctgaaccagcagtttgggtggtcgatgcccagcaaataggagtgggtggccttttctctggtgtataagattcatctaatttttaggaatttttgtaccattttccccctctagaaacacatttactccccaataattgtacgggaggtgatcgaggaagaagaaccaagtgaaaaatcagaggccacctacatgaccatgcacccagtttggccttctctgaggtcagatcggaacaactcacttgaaaaaaagtcaggtgggggaatgccaaaaacacagcaagccttttgagaagaatggagagtcccttcatctcagcagcggtggagactctctcctgtgtgtgtcctgggccactctaccagtgatttcagactcccgctctcccagctgtcctcctgtctcattgtttggtcaatacactgaagatggagaatttggagcctggcagagagactggacagctctggaggaacaggcctgctgaggggaggggagcatggacttggcctctggagtgggacactggccctgggaaccaggctgagctgagtggcctcaaaccccccgttggatcagaccctcctgtgggcagggttcttagtggatgagttactgggaagaatcagagataaaaaccaacccaaatcattcctctggca

SEQ ID NO: 71266 - DNA, 847 bp, Homo Sapiens
  misc_feature (23)..(23): n is a, c, g, or t
  misc_feature (37)..(37): n is a, c, g, or t
ggtcatggcagcggctgggcgtngctgcttagcaggnggaaagatggcggtgacgggctggttggagagtctgcggacagcccagaagactgcgctgctgcaggacgggagaaggaaggttcactatttattcccagacggcaaggaaatggctgaagaatatgacgagaagacgagtgaactacttgtgagaaagtggcgtgtgaaaagtgccctgggagccatgggccagtggcagcttgaagtaggagacccagcgcccctaggagcagggaacctggggcctgaactcatcaaggaaagcaatgccaatcctatcttcatgcgcaaggacaccaagatgagtttccagtggcggattcgaaacctcccctatcctaaggatgtctatagtgtctctgtggaccagaaggagcgctgcatcattgtcagaacaaccaacaagaagtactacaagaagttctccattcctgatctagatagacaccagctacctctggatgacgccttgctgagctttgcccacgccaactgcaccctgatcatctcttaccagaagccaaaggaggttgtggtggccgagtctgagctacagaaggaactaaagaaggtgaagacagcccacagcaacgatggggactgcaagacccagtagttggcccctgagccttatacctccaccacagggggtgccgtgagacttcaaggcttggcccttcttgaccacggcagcctcctgtcttctaggagctatcaagggtctctaagaactgggcatggggcactcctagccagtgagtcatggtcatatttcctgagtaaagtcattctgagttacttactgcaa

SEQ ID NO: 71267 - DNA, 302 bp, Homo Sapiens
aaaaaagatgatctctctctcagccatgtaaagatacatgttgtgggaagtcagggactccaaatggagggaccagctggagccaaggcagagaaacataaatcgtgaagatttcatggacatttatcagttcccaaataatactcttataatttcttacacctgtcttactttaatctcttaatcctgttatctttgtaaactgaggacgtgtgtcacctcaggaccactatgatatttctgttaactgtacaaattgattgtaaaacatgtgtgtctgaacaatatgaaatcagtgcacc

SEQ ID NO: 71268 - DNA, 1657 bp, Homo Sapiens
  misc_feature (82)..(116): n is a, c, g, or t
ctagtatatagatcactataggggctagcggctgtacttccgaacgacgagcgcagcgagtcattgagcgaggaagcggcgnnnnnnnnnnnnnnnnnnnnnnnnnnnnnnnnnnncagtcgacggtaccggacatatgcccgggaattcggccattacggccgggggcggctcggggtgctctactggaagctggatgctgacaaatatgagaatgatccagaattagaaaagatccgaagagagaggaactactcctggatggacatcataaccatatgcaaagataaactaccaaattatgaagaaaagattaagatgttctacgaggagcatttgcacttggacgatgagatccgctacatcctggatggcagtgggtacttcgatgtgagggacaaggaggaccagtggatccggatcttcatggagaagggagacatggtgacgctccccgcggggatctatcaccgcttcacggtggacgagaagaactacacgaaggccatgcggctgtttgtgggagaaccggtgtggacagcgtacaaccggcccgctgaccattttgaagcccgcgggcagtacgtgaaatttctggcacagaccgcctagcagtgctgcctgggaactaacacgtgcctcgtaaaggtccccaatgtaatgactgagcagaaaatcaatcactttctctttgcttttagaggatagccttgaggctagattatctttcctttgtaagattatttgatcagaatattttgtaatgaaaggatctagaaagcaacttggaagtgtaaagagtcaccttcattttctgtaactcaatcaagactggtgggtccatggccctgtgttagttcatgcattcagttgagtcccaaatgaaagtttcatctcccgaaatgcagttccttagatgcccatctggacgtgatgccgcgcctgccgtgtaagaaggtgcaatcctagataacacagctagccagatagaagacacttttttctccaaaatgatgccttggggtggggagtggtagggggaagagctcccaccctaaggggcacacactgagttgcttatgccacttccttgttcaaaataaagtaactgccttaatcttatactcatggcttggagttaccttatattcaggtatatgtgatattttgcctggtttgttaaaattgccccatttagattccttctataattgttcttatagataagtaatttatatatgagctgtgttagtattttttcagtgtgagatctctggattctttcacaataaagctgttgaattttaacaggagtattagtacataaattttctactcaacaattccgagataggattatgcctagtttgtcatatcacagaaaaactccaagttaacttcatgttttggaagggcaggtcgtttttaaagtatttctttttttaactggatgaaaaatcttcatgttaggattaattttcttaatcacctccacactgtacagaggaaactcaagccttaaatgtttaagtaaactctgtctcagttttaggattaaaatacccaccggtggtgtgatgatgccatataccgcagggcttgcttctgtcaagtgtgactctatctcagtaattaaaataagtgctgatctactgaa

SEQ ID NO: 71269 - DNA, 1018 bp, Homo Sapiens
cagtcgacggtaccggacatatgcccgggaattcggccattacggccggggacgggctccgagcgcggccctgggttcgaacacggcacccgcactgcgcgtcatggtgcaggcctggtatatggacgacgccccgggcgacccgcggcaaccccaccgccccgaccccggccgcccagtgggcctggagcagctgcggcggctcggggtgctctactggaagctggatgctgacaaatatgagaatgatccagaattagaaaagatccgaagagagaggaactactcctggatggacatcataaccatatgcaaagataaactaccaaattatgaagaaaagattaagatgttctacgaggagcatttgcacttggacgatgagatccgctacatcctggatggcagtgggtacttcgacgtgagggacaaggaggaccagtggatccggatcttcatggagaagggagacatggtgacgctccccgcggggatctatcaccgcttcacggtggacgagaagaactacacgaaggccatgcggctgtttgtgggagaaccggtgtggacagcgtacaaccggcccgctgaccattttgaagcccgcgggcagtacgtgaaatttctggcacagaccgcctagcagtgctgcctgggaactaacacgtgcctcgtaaaggtccccaatgtaatgactgagcagaaaatcaatcactttctctttgcttttagaggatagccttgaggctagattatctttcctttgtaagattatttgatcagaatattttgtaatgaaaggatctagaaagcaacttggaagtgtaaagagtcaccttcattttctgtaactcaatcaaaactggtgggtccatggccctgtgttagttcatgcattcagctgagtcccaaatgaaagtttcatctcccgaaatgcagtttcttaaatgcccatctggacgtgatgccgccccctgccgtgtaagaaaggggcaaaccctaagataacacagctagc

SEQ ID NO: 71270 - DNA, 1111 bp, Homo Sapiens
  misc_feature (83)..(117): n is a, c, g, or t
aaaaagtactgatagatcatatagggcctcctcttcatagcgaacgacgagcgcagcaagtcagtgagcgaggaagcggccgnnnnnnnnnnnnnnnnnnnnnnnnnnnnnnnnnnncagtcgacggtaccggacatatgcccgggaattcggccattacggccgggggagcgcggcccctgggttcgaacacggcacccgcactgcgcgtcatggtgcaggcctggtatatggacgacgccccgggcgacccgcggcaaccccaccgccccgaccccggccgcccagtgggcctggagcagctgcggcggctcggggtgctctactggaagctggatgctgacaaatatgagaatgatccagaattagaaaagatccgaagagagaggaactactcctggatggacatcataaccatatgcaaagataaactaccaaattatgaagaaaagattaagatgttctacgaggagcatttgcacttggacgatgagatccgctacatcctggatggcagtgggtacttcgacgtgagggacaaggaggaccagcggatccggatcttcatggagaagggagacatggtgacgctccccgcggggatctatcaccgcttcacggtggacgagaagaactacacgaaggccatgcggcctgtttgtgggagaaccggtgtggacagcgtacaaccggcccgctgaccattttgaagcccgcgggcagtacgtgaaatttctggcacagaccgcctagcagtgctgcctgggaactaacacgcgcctcgtaaaggtccccaatgtaatgactgagcagaaaatcaatccactttctctttgcttttagaggatagccttgaggctaggttatcttccctttgtaagattattggatcagaatatttggtaatgacacgggatctagaaaagcacttggaacgtgacaagagtcaccttcatttctgtaactcaatcaagactggtgggtccatggccctgtgtgaggtcatgcatttcagtgagtcccagatgaaagtttcaatcttcccgaaatgcgttccttagatgcccattggacatgatgcgggcctgcctgtaaaggggaacctaataac

SEQ ID NO: 71271 - DNA, 1283 bp, Homo Sapiens
ggatgctttaaagggcaaaaagcagagcaaagatcacatgcttctgaggaaacagggcaaggacaaaatcagaactcctgataagggtctatgttcagcagtgcacgtattgtcttgataaacatcttaacagaaaacggttcgagagcagagaaccagtctgacctcaaatttaccagggctggggtttcccaatcctagtaagcctgagggtactgcaggagaccagggcgtatctcagtccttatctcaaccgcataggacagacactcccataggacagacactcccagagtggccatttatagacctccccccaggaatgcaattctttccctagggtcttaatattccttgctaggaaaagaatttagcaatatctctcctacttgcacgtctgtttataggctctctgcaagaagaaaaataaggctctttttgcccaaccccgcaggcagtcagaccttatggtcgtcttcccttgttccctaaaaatcgctgttattctgttctttttcaaggtgcactgatttcatattgttcaaacacacatgttttacaatcaatttgtacagttaacacaattatcacagtggtcctgaggtgacatacatcctcagcttacgaagataacaggattaagagattaaagacaggcataataaattataaaagtattatttgagaactgatagatgtccgtgaaatcttcaaaacttatgttcctctgccatggctccagccggtccctccattcggggtccctgacttcctgcaacactggagtttgttgttcactggatgctgacaaatatgagaatgatccagaattagaaaagatccgaagagagaggaactactcctggatggacatcataaccatatgcaaagataaactaccaaattatgaacaaaagattaagatgttctacgaggagcatttgcacttggacgatgagatccgctacatcctggatggcagtgggtacttcgatgtgagggacaaggaggaccagtggatccggatcttcatggagaagggagacatggtgacgctctccgcggggatctatcaccgcttcacggggggacgagaagaactacacgaacgccatgcggctgtttgtgggagaaccggggtgggcagcggaaaccggtccgctgatcactttgtaagccgcgggcatacgtgacatttctgggacagaccgcctagcagttgtgcctggggacctacacgtgcctctttaaggccccatgtaatgctgacataaatcatcatg

SEQ ID NO: 71272 - DNA, 921 bp, Homo Sapiens
gcgcaggtgtggtctgttgacgaggatcagttcgttgcggcgagcactgctgaagcccatcctcagtgtgagctgatcaatcccgatctttgcggaggctcaaggctccgaggtctaagctccgtcctcctcggcccgtggaatcgaattcagctgcggagctcttcctccagtctccggatctcctccgggaggcgggagacggactcctcagacctgagaagcttctccgtgagggcctgcagggcgagccgctccgtgtcggccgcctccttgaaagcctgctgctcctgcttgaggctcaccagctcgcggacctcggtgtagatgtcagactccatagtctgaagggtacttctcagggcctccatgtcccactctctggacttggctgaggtctgtatctccttcacagcttcctttaaggctttcaaatcctgcttgttcccctcagattcttccagggaggcaacctttgccttcatgtcattgatctccttctggctcctcttctggacttctgtgaagatggcgatgttgtcgttgatggatttggtgagctccgtcagccgctcctccaccgtgttctccagggacgtgaagtcccgctcccgggcgtccttcaccacatggatcccatccgagaggtctttgagaatctcattctggagtttctgcagcacttcgctgatccggctgacctcactctccccttgcttcacagctttctctgtgaggtcttgtttatgttgggagcttctcaagatggactcaaaagttccaaatgtggcttgcaaagactgcaccttctgctcgacgccctgcaagccctggcccagctcctccctctgccgggagaagtcctggtggctgcgccggacctgctggacctcctccaggacgtggtggacgcaccagccc

SEQ ID NO: 71273 - DNA, 2418 bp, Homo Sapiens
  misc_feature (1440)..(1453): n is a, c, g, or t
  misc_feature (1468)..(1470): n is a, c, g, or t
  misc_feature (1513)..(1521): n is a, c, g, or t
  misc_feature (2095)..(2159): n is a, c, g, or t
  misc_feature (2245)..(2245): n is a, c, g, or t
  misc_feature (2263)..(2272): n is a, c, g, or t
cctaggggcgagagagtatgaagtcgacggcgcgccgaattcggcacgagggaagtccagaagaggagccagaaggagatcaatgacatgaaggcaaaggttgcctccctggaagaatctgaggggaacaagcaggatttgaaagccttaaaggaagctgtgaaggagatacagacctcagccaagtccagagagtgggacatggaggccctgagaagtacccttcagactatggagtctgacatctacaccgaggtccgcgagctggtgagcctcaagcaggagcagcaggctttcaaggaggcggccgacacggagcggctcgccctgcaggccctcacggagaagcttctcaggtctgaggagtccgtctcccgcctcccggaggagatccggagactggaggaagagctccgccagctgaagtccgattcccacgggccgaaggaggacggaggcttcagacactcggaagcctttgaggcactccagcaaaagagtcagggactggactccaggctccagcacgtggaggatggggtgctctccatgcaggtggcttctgcgcgccagaccgagagcctggagtccctcctgtccaagagccaggagcacgagcagcgcctggccgccctgcaggggcgcctggaaggcctcgggtcctcagaggcagaccaggatggcctggccagcacggtgaggagcctgggcgagacccagctggtgctctacggtgacgtggaggagctgaagaggagtgtgggcgagctccccagcaccgtggaatcactccagaaggtgcaggagcaggtgcacacgctgctcagtcaggaccaagcccaggccgcccgtctgcctcctcaggacttcctggacagactttcttctctagacaacctgaaagcctcagtcagccaagtggaggcggacttgaaaatgctcaggactgctgtggacagtttggttgcatactcggtcaaaatagaaaccaacgagaacaatctggaatcagccaagggtttactagatgacctgaggaatgatctggataggttgtttgtgaaagtggagaagattcacgaaaaggtctaaatgaattgcgtgtgcagggcgcggatttaaagtccaatttctcatgaccaaaaaatgtgtggttttttcccatgtgtcccctaccccccaatttcttgtcccctcttaaagagcagttgtcaccacctgaacaccaaggcattgtattttcatgcccagttaacttatttacaatatttaagttctctgcttctgcatttggttggtttcctgaagcgcagcccctgtgaataacaggtggcttttcatggatgtctctagtcagagaaaaatgataaaggcttaaattgaggattaacagaagcagattaacctcagaaatcctgtctggctggcagatttcaagtnnnnnnnnnnnnnnggtgggttggggggnnnacccttttctttctagttgtctttaaggaaaattaattttacnnnnnnnnnggttctggccgaaatttttatgagatatctctcacttgtcttccactttgaaccggttaaagctcatagctgtcagctctgaatgaggaggggagaagcccctgggtctttctttgaaaggaatccgctgcttgagggctgcctccctcatggtgtgcgtgtcgtttctcttcctgacgcatcttgtgatatcagaggtaactatgcaaagcatccaggcggttctgaatgtgaagcactacacccagcagagtcccggtgccctctgtccccactgccggcccatgttctctctccggaggtcaccaaggaatgcacaggtttcgactaccagaaaggggagtccttgggttctttcaaaaaattcgtgaggagagctgtctacagtggaatagggggtctccctggggaatgcaggccaagtccttttattttaacatgatgtccatgaagaggtttgccgtctgggcagccctgtcggcaaggagcgtgcatactgcgtttgtgtaattgtttgctgtatctcccttccctctgagctgtattgttctttaatggctgtcttgcccttccnnnnnnnnnnnnnnnnnnnnnnnnnnnnnnnnnnnnnnnnnnnnnnnnnnnnnnnnnnnnnnnnngttttgtttagtttactgtgaaatgaactgtatggcttatttacagtatttttaattcttaataaacacttgagctttgttcctangccaaaaaccacaaaccnnnnnnnnnnccttggtcggccgcctcggcccccccaaaaagctttctaagccctttcgttttggcggcgcgggccccagaagggaaagggaaacatgggccataagctgttttccaaaggaaattcctggtccatgaactaggggcttgtgaatt

SEQ ID NO: 71274 - DNA, 1841 bp, Homo Sapiens
atgatggagcaaccaaactcaatgatgaggcacggcggctcattgctgatgtggggagcacatctattactaatcttggttttagagacaactgggtcttctgtggtgggaagggcattaagacaaaaagcccttttgaacagcacataaagaacaataaggatacaaacaaatatgaaggatggcctgaagttgtagaaatggaaggatgcatcccccagaagcaagactaatggaaatgtggagagaattgaagaaagcgcactttcactcttaatgggagagctataaatggcagagctatgtgtaaatattttaagagcatgcagccatcttggtgtgtgcatgagtattgtctcttttgatatcaggattatttattgctaacgtaaatagatagcattgtaaataatcatcacaatgatcaaatcactgaaccatgtctccgcacatttccctaaaagtacaatgtttagactgctatggtaatacatattttaaattctaaaagcatacacaatgtgtaactgaatggtttgtgaaaaatatattgatatatatactagttgctatgaaaatatcatggaataatagggattttagggtggatactttattttcttttatgtttctatatgttgcgttgtgatgacattatcttttaaattaaaaagagatttggctagttgtgtgtgtaatgttactttacagtccgactctcctgatgtacctcttttcatgatctttttctttccttcccaagaaactgaggaatgtttaatatgaaaacatacatcggatatgtaaaaagcacaacaaaattcttaatgtacacagtaaaaaagtaaatatataaatgtagatggcatttaggaccacagcttgctggatttgtgttagctatgggaataacttgattttgtataagctatttagagtgaggctggaggtggcagcttcacagaactggagaaccaggccaagtcccctccccaacctaattaggtcattcaggacagctaagtcagtatatttagagcaatactagcatacgtttttcttaattgtaatcagcattgaccaagtggtttggaaggaggcatgctttaatatcacaataattttgatttgtaaaccaagaaattaatcctgtgtttatctaacttcataatagcaattattgcccgaagctatagtggcatatttacaaaagttcttattactgggcggactgataacatttaaaaaataattgtgtttgaccccaaatgactttatacccaattctacataaaaatatagaagatctatctttttttgttaccttcagatgttcactaaataactcagtttttaagcagaagttttcagggcattaaatatatgttgtgtatgaagtatctcaaactggaacataaatttagtgatcaaactgccattcacagtgtaaggcagcacttaaatttcgaacctaaagtttagatgcattgtataaaaaaacctaaaagcagtatctgttatttagctgtaaaccaagttggaagctattcggataatttcttaaatattgatgaactttggagtactgtttcttccttcaaactgaatgtaattaattcatgaataaatgcaccttatatgtttaaacaatctttgtatacttttgggatttttggtgcttatatgctaaatcacattcagcatgtgtattttgacatttaaaatacttccctcaattctgtaaattaaaagaatagttattttacagttccagggattgtgaaataaatgttgcagttttttaaaataatgaaaataaatactcttggttttgctttgtg

SEQ ID NO: 71275 - DNA, 3141 bp, Homo Sapiens
cagtcgacggtaccggacatatgcccgggaattcggccattacggccggggaacgcgagaggaagcgatgcagaggggtggaaaatggcagagctgcagatgttactagaggaggagatcccgtctggcaagagggcgctgatcgagagttaccagaacctgactcgggtggcagactactgtgaaaacaactacatacaggctacagacaagagaaaagctttagaggagaccaaagcctatacaacccaatctctagctagtgttgcttatcaaataaatgcattggccaacaatgtactccagttgctggatatccaagcctctcagcttcggagaatggagtcttccatcaatcatatctcacagactgtggatattcataaggagaaagtggcacgaagagagattggtattttgacaacaaataagaatacatcaagaactcacaaaataatagcacctgcgaatatggagcgccctgtaaggtatattcggaaacctatcgattacacagttctggatgatgtgggccatggtgtcaagtggctaaaagccaagcatggaaataaccagcctgcaagaactggcacactgtcgagaacaaatcctcctactcagaaaccgccaagtcctcccatgtcaggccggggaacactgggacggaatactccttataaaacctggaacctgttaaacccccaacagttcctaatgactatatgaccagtcctgctaggcttggaagtcagcatagtccaggcaggacagcatctttaaatcagagaccaaggacacacagtggaagtagtggaggaagtggaagtcgagaaaacagtggtagcagtagtattggcattcccattgctgtgcctacaccttcgccacccactattggaccagccccgggctcagctcctggttcccagtatggcacaatgaccaggcagatatctcgacacaactctactacttcttcgacatcttctggtggatacagacgaactccctctgtgactgctcaattttctgctcagcctcatgttaatggaggtccactttattctcaaaattcaattgctgatagtccaactccaccgccaccacctccaccagatgacgattcccatgtttgatgactctccacctccccgcactcgagccaccgaccagtggattatgaagatgaggaggctgcagtagttcagtataatgatccatatgcagatggggatcctgcttgggcccccaagaattatacttgagaaagttgttgcaatatatgattatacaaaagacaaggatgatgagctgtcatttatggagggtgcaatcatttatgttataaagaagaatgatgatggctggtatgaaggagtctgcaatcgagtgactggtctgttccctgggaactatgttgaatcaatcatgcactatactgattaattttgttgatctttcgaagtagattcttattactcagtcatactgtgggactattatggttaacagaactgtcttaatatgttttaaaatgtgcccatattttcagaacatgctgttttattggtaaattgaatgtctacctgtaagcataaatctttgaggcagtttatgtattgctgaatagcaatttatacaagaagctgtccataactgattatgcttatgtacttacttacacatttttaactttatgaccagcctaaatattctgggggaagtggggtataatatttaacgaatcatgattcagattgtaccattacatgtttcagtgcagcatggttactaacgctatgtcagactaatattaaaatcagaaaatttaaatgctggtgctggtcagactttttttgttagattctctcatttaaaaaaaatactgtttgtttaaagcatgcataaaaatttatgtattgaaatatacttaaaaattcaagatgcttcccatttgtgtaatatttacctggaggactcgtacttaggtgtcttaacgtgaattgagtctccaaggtctccatgtgaaacaagcaaaaagagaattatctgtaatgttgtaatttgtacctaagttttttaatgagtgaaatttgcattataaactttttccattcataaatacataagtgaaccaaaggtttttgtcctttccttcactgatttgcttttaaaaaaataaaagataatgatttattgcacaattatgatcctattttcctcaatatgttaacttggaaaaaaattttagccttatcttaatctggcccaacagcaatgtgacggatttttgcagattcaaaatctgcaatggttatttacaagtcaatctactgaattccttttttaaataatcttttgaaactaagaaaatgtgtcaaattgtgtgcattcattctgtaggtaaaattcttaaggattgccatgtcagtccttcagttgtacagtgaactgttgtacactggttcaatgaaaggaagttaaaagtaccttttacatattgtaaaagtggatacagttgatttgtgagtaggcactctttaatccattacctggcactagcaacattagaattttaaaataaaataattgggaaagaaggtgggtcatgtattaatcagtgaacagagatttacctaaccaacagacttggattgtcttttgacataatcaaaatgcaacacatgcactttgtgtgtctcctcttaattgaagggagggctgagggatgttttctcttcttgtcttgtgtataattctctattgcttaggatattaaagtagagcactcaagtgtgggtttctgtgttattgaggatttgtttggaattcaaattacagttatgtactggatgctacagacttataacagcatagtgaatggtaagactagtgcaaaacagttatttctgaaaattaaagaccattattgctaccaaatcaatgtgactatttcatatgcattttgcctttgttaattttaaacaaacaaagtatcattagtgatcagctagctaccttctactttccatttttcaagtggattgttctcttaatttgtatataacctgttgtctaaattttatgtacagtcttttataataaaccattctcctatatgaaattttggatactgttaaa

SEQ ID NO: 71276 - DNA, 1037 bp, Homo Sapiens
  misc_feature (42)..(76): n is a, c, g, or t
aaactgacgagcgcccgagtctttgagcgaggaagcggccgnnnnnnnnnnnnnnnnnnnnnnnnnnnnnnnnnnncagtcgacggtaccggacatatgcccgggaattcggccattacggccgggggtatccgggctgtgaggtgctcggagcctcggcggaccttgctgcctctgtctctttaacgcgagaggaagcgatgcagaggggtggaaaatggcagagctgcagatgttactagaggaggagatcccgtctggcaagagggcgctgatcgagagttaccagaacctgactcgggtggcagactactgtgaaaacaactacatacaggctacagacaagagaaaagctttagaggagaccaaagcctatacaacccaatctctagctagtgttgcttatcaaataaatgcattggccaacaatgtactccagttgctggatatccaagcctctcagcttcggagaatggagtcttccatcaatcatatctcacagactgtggatattcataaggagaaagtggcacgaagagagattggtattttgacaacaaataagaatacatcaagaactcacaaaataatagcacctgcgaatatggagcgccctgtaaggtatattcggaaacctatcgattacacagttctggatgatgtgggccatggtgtcaagcatggaaataaccagcctgccaagaactgccacactgtcgagaaaaaaatcctcctactcaaaaaacgccaagtactcccatgccaggcccggggaacactgggaccgaaatactccttataaaaccccggaaacctgggtaaaccccccaccgttccgtaaggacatatggaccggtccggctagggctgggcaaggcaccactattccagggcggacgacaatcgttaattccaagaacctcaggcaccccccgggggaacatgcgggacgcaattggcaagtcccaacaaaacgcggggtacgaccaagcaatgtggcatgtcccactggacggggcgcagaacccgttcccccg

SEQ ID NO: 71277 - DNA, 569 bp, Homo Sapiens
  misc_feature (257)..(257): n is a, c, g, or t
  misc_feature (452)..(493): n is a, c, g, or t
ctgagaccacccccgccgcccttgcgtcgacttagcaaccacctcataggcccacccacctcgggatccgagccaaccatcccacatcacaaactttggtttgggggactttacgttcgtttaatttctcattttgtacggagaaatattcttttcaaaagcgtcttttgactgaagtaactttcctggtgctgttgttaactcgttcctttttttaatttattaccccaccccaggcagccctcctggttcctacntcaccctaccccccctccccacaccctccgtcccatctgaaccatttgtttcttttctttccgtcagattttggaaaaattctcctctcctccccgccccctccacaccatcctccccgatttaaatatagtcactgctacaagtaacagatgcactgtgaagattccagtattaataaaggtgtactgtaattnnnnnnnnnnnnnnnnnnnnnnnnnnnnnnnnnnnnnnnnnngcctacagccgcggccgcaagcttacgaccctttagagagggttaattttgagcttggcacttggccgtcgtttaa

SEQ ID NO: 71278 - DNA, 542 bp, Homo Sapiens
gccgaagatctggatcggatctacagagaacaggaaagagaggggacccttatgcccaacttcatcaagaagaataagcccaaggagaacaagactaaaaaagtgagacctcgctacagtggtccagcacctcctcccaacagatttaatatctggcctggatatcgctgggacggagtggacagatccaatggatttgaacagaagcgctttgccaggcttgccagcaagaaggcagtggaggaacttgcctacaaatggagtgttgaggatatgtaactttcctgaggctgtgggggtggctgggctgtggtagtgggcataggcagcgagatatccagtggtaacagttgtctgtgctaataattggagcccacacagaccagcaacttgttgaatgccagttttgaccacagaagaatattcgagacctgatgtttggactgaggtacctgtacttcttgggtgtgacagcaccggctgttgctggctttcagaggaagcattgatttctcattgaccagggtttgttcttggtaggg

SEQ ID NO: 71279 - DNA, 1579 bp, Homo Sapiens
  misc_feature (85)..(85): n is a, c, g, or t
ccaaaagatcaaaatggaaaacaaggaacagatggaaaaaagaaaaggggcagaggaagccacagggctaaaaataagtcaaagngaaacatttttgggttcagttaaggaaacatttgatgccatgaagaattctaccaaggagtttgtaaggcatcataaagagaaaattaagcaggctaaagagagctgtgaaggaaaatctgaaaaaattctcagattcagttaaatccactttcagacactttaaagataccaccaagaatatctttgatgaaaagggtaataaaagatttggtgctacaaaagaagcagctgaaaaaccaagaacagtttttagtgactatttacatccacagtataaggcacctacagaaaaccatcataatagaggccctactatgcaaaatgatggaaggaaagaaaagccagttcactttaaagaattcagaaaaaatacaaattcaaagaaatgcagtcctgggcatgattgtagagaaaattctcattctttcagaaaggcttgttctggtgtatttgattgtgctcaacaagagtccatgagcctttttaacacagtggtgaatcctataaggatggatgaatttagacagataattcaaaggtacatgttaaaagaactggatactttttgtcactggaacgaacttgatcagttcatcaataagtttttcctaaacggtgtctttatacatgatcagaagctcttcactgactttgttaatgatgttaaagattatcttagaaacatgaaggaatatgaagtagataatgatggagtatttgagaagttggatgaatatatatatagacacttctttggtcacactttttcccctccatatggacccaggtcggtttacataaaaccgtgtcattacagtagtttgtaacatttgtagattggatagcatttttatgatctgatgagtttcttgtaaggttaccgtttctaagagttgtgctttatggccactgagagaattcagaataaattgaaagatggagtctaaaaattattagctgttacaaatggaacatttcattataacgtgatcactttgacttgagcaaatggtttaatttttatcttaaaaatcagttaagaatatataaaatcctactttggccaagtttgtttcttttcattatagtttatatgaaaagatcaccttaagtgaaattattttcctttaatcttttatgtatttattcacttttggaagctaggaatgagcaacacaaattttactctgaagtcagaagagctcatatataataattctaatgtcccacctattttcacttgtccattccatgtaccagcttagttatgatacttagtcacataattatctttgataaaggtagaggcacaaagaggcaaactaagcaagtcaaattctaatgtgtgtacttcataataattttttatccattttcatctttatattctgtaacatgaaacttacctaatcttcaaatgttagcttcattttttacctttgaaatacttaatctttctgaataaatataatgtgtctataaaataaaaaaa

SEQ ID NO: 71280 - DNA, 1472 bp, Homo Sapiens
agagcgagcctgggtggcgattcggacgaggagaagaccgccgctccggcctcccgcgacttctcgaaggtgggcaggtcccaccttgtggaggatggaggtgaccggggacgccggggtaccagaatctggcgagatccggactctaaagccgtgtctgctgcgccgcaactacagccgcgaacagcacggcgtggccgcctcctgcctcgaagacctgaggagcaaggcctgtgacattctggccattgataagtccctgacaccagtcaccctggtcctggcagaggatggcaccatagtggatgatgacgattactttctgtgtctaccttccaatactaagtttgtggcattggctagtaatgagaaatgggcatacaacaattcagatggaggtacagcttggatttcccaagagtcctttgatgtagatgaaacagacagcggggcagggttgaagtggaagaatgtggccaggcagctgaaagaagatctgtccagcatcatcctcctatcagaggaggacctccagatgcttgttgacgctccctgctcagacctggctcaggaactacgtcagagttgtgccaccgtccagcggctgcagcacacactccaacaggtgcttgaccaaagagaggaagtgcgtcagtccaagcagctcctgcagctgtacctccaggctttggagaaagagggcagcctcttgtcaaagcaggaagagtccaaagctgcctttggtgaggaggtggatgcagtagacacgggtatcagcagagagacctcctcggacgttgcgctggcgagccacatccttactgcactgagggagaagcaggctccagagctgagcttatctagtcaggatttggaggtgggcggaaaccagggtcactgagctacagaggaggacatgccctgggatgtagtagtatcatgcagaggtgtgtgggcccttttgttcacctctgcagactgtgaatcctagctgccagtttgcctattatatgccaaggcatttgcaaaaatctcattaatctaaatcaaaatagctttaaagaaaaatgcatacacttcctcagatcatcaaacagactctggtccaaggttggtaatgaaatgactgttcctgacagggaggaatagcagggcccaatcttctgagatggcttctgggtctttccatggtcagagaagatctatagtccgtcctgaggtctgtcaatgtcacaggaaaaggcaaacttgaggggatcgtcgcctgctggctaagaccagggagctaaaaacttgaggaagggaacctgcctgggtgggtgctacttctgattcattgtccttgtccctgtcataagtacctccctattgtagatagaagggaaggaaactgttgacttgagcttggctaaatttcctgaaggtggaggaccttagagttgctccaagtaaactttccaaggacttcttcc

SEQ ID NO: 71281 - DNA, 1406 bp, Homo Sapiens
  misc_feature (1167)..(1176): n is a, c, g, or t
  misc_feature (1310)..(1363): n is a, c, g, or t
gggcttgtggaggatggaggtgaccggggacgccggggtaccagaatctggcgagatccggactctaaagccgtgtctgctgcgccgcaactacagccgcgaacagcacggcgtggccgcctcctgcctcgaagacctgaggagcaaggcctgtgacattctggccattgataagtccctgacaccagtcaccctggtcctggcagaggatggcaccatagtggatgatgacgattactttctgtgtctaccttccaatactaagtttgtggcattggctagtaatgagaaatgggcatacaacaattcagatggaggtacagcttggatttcccaagagtcctttgatgtagatgaaacagacagcggggcagggttgaagtggaagaatgtggccaggcagctgaaagaagatctgtccagcatcatcctcctatcagaggaggacctccagatgcttgttgacgctccctgctcagacctggctcaggaactacgtcagagttgtgccaccgtccagcggctgcagcacacactccaacaggtgcttgaccaaagagaggaagtgcgtcagtccaagcagctcctgcagctgtacctccaggctttggagaaagagggcagcctcttgtcaaagcaggaagagtccaaagctgcctttggtgaggaggtggatgcagtagacacgggtatcagcagagagacctcctcggacgttgcgctggcgagccacatccttactgcactgagggagaagcaggctccagagctgagcttatctagtcaggatttggagttggttaccaaggaagaccccaaagcactggctgttgccttgaactgggacataaagaagacggagactgttcaggaggcctgtgagcgggagctcgccctgcgcctgcagcagacgcagagcttgcattctctccggagcatctcagcaagcaaggcctcaccacctggtgacctgcagaatcctaagcgagccagacaggatcccacatagcagcagcgggaagtgtgccaaggaagctctgtggcgttgtgttattggtagacaccctcagcctcatcatttgactacctatgtactactctaccccctgccttagagcaccttccagagaagctattccaggtctcaacatacgccgttccaccaannnnnnnnnnagccccaccagcttcaggacttctgccaattttgaatgatatagctgcaccaacaatatcccgcctcctctaattacatatgatgttctctgttcaaaagtaattggcagtgattggccaggcgcggtgctcannnnnnnnnnnnnnnnnnnnnnnnnnnnnnnnnnnnnnnnnnnnnnnnnnnnnnatcgagaccatcctggctagcgtggtgaagccctgtctctact

SEQ ID NO: 71282 - DNA, 783 bp, Homo Sapiens
taagtgacttaggctaggtacgaggcctgggtgtttaattcggcacgatggtgccaactttggggatgacttcgaacaaggttaagaagttcttacaagagttctaccaggatgatgaactcgggaagaagcagttcaagtatgggaaccagttggttcggctggctcatcgggaacaggtggctctgtatgtggacctggacgacgtagccgaggatgaccccgagttggtggactcaatttgtgagaatgccatggcgctacgcgaagctctttgctgatgccgtacaagagctgctgcctcagtacaaggagagggaagtggtaaataaagatgtcctggacgtttacattgagcatcggctaatgatggagcagcggagtcgggaccctgggatggtccgaagcccccagaaccagtaccctgctgaactcatgcgcagatttgagctgtattttcaaggccctagcagcaacaagcctcgtgtgatccgggaagtgcgggctgactctgtggggaagttggtaactgtgcgtggaatcgtcactcgtgtctctgaagtcaaacccaagatggtggtggccacttacatttgtgaccaggtgtgtggcagagacctacccagcgatccagtctcccactttcatgcctctgatctgtggcccatgcaggggtgccaaccaacggtcaggggggcggtgttttgcgaccggggtcccgttctcatccggggtgagtgcgaacttgtgtcggcggggaattcccgggtcggggggagggac

SEQ ID NO: 71283 - DNA, 1184 bp, Homo Sapiens
taacgggcaatgtagcgaggccgtggcttatcggcacgaggctcagcttccccaggaggctatgacctctgagcccgccaagcgcggccgcacggccctcggcagcgatggcactgaaggactacgcgctagagaaggaaaaggttaagaagttcttacaagagttctaccaggatgatgaactcgggaagaagcagttcaagtatgggaaccagttggttcggctggctcatcgggaacaggtggctctgtatgtggacctggacgacgtagccgaggatgaccccgagttggtggactcaatttgtgagaatgccaggcgctacgcgaagctctttgctgatgccgtacaagagctgctgcctcagtacaaggagagggaagtggtaaataaagatgtcctggacgtttacattgagcatcggctaatgatggagcagcggagtcgggaccctgggatggtccgaagcccccagaaccagtaccctgctgaactcatgcgcagatttgagctgtattttcaaggccctagcagcaacaagcctcgtgtgatccgggaagtgcgggctgactctgtggggaagttggtaactgtgcgtggaatcgtcactcgtgtctctgaagtcaaacccaagatggtggtggccacttacacttgtgaccagtgtggggcagagacctaccaggcgatccagtctcccactttcatgcctctgatcatgtgcccaagccaggagtgccaaacaaacgtcaggagggcggctgtatctgcagacacggggcctccagattcatcaaattccaggagatgaagatggaagaacataggatcaggggctgtgggaatatccctcggagtatcaatgggcgggtccaaggggagaaaacgaggggatggcccagtcggggacaacgtcagaggtcacggggaatatactgggacacaaaccggggcacagggggtccgcacaggggtggtcacgggggttaaatccagaaaacctaccgggggacccccaggcattggtgaaagatcacaagggtgtggaataactagcgggcggggaaccacccacgaggagcggaacgcacaacgagcgaggaggagcacacaaaagggcataatccgccaaaatggcaggatgagaagcaacagagctcccgcacggtgcgacacccgacaa

SEQ ID NO: 71284 - DNA, 968 bp, Homo Sapiens
atacggctaggtacgaggctgggtttaaattcggcacgaggcggcacagtccaccgcgcggagattctcagcttccccaggagcaagacctctgagcccgccaagcgcggccgcacggccctcggcagcgatggcactgaaggactacgcgctagagaaggaaaaggttaagaagttcttacaagagttctaccaggatgatgaactcgggaagaagcagttcaagtatgggaaccagttggttcggctggctcatcgggaacaggtggctctgtatgtggacctggacgacgtagccgaggatgaccccgagttggtggactcaatttgtgagaatgccaggcgctacgcgaagctctttgctgatgccgtacaagagctgctgcctcagtacaaggagagggaagtggtaaataaagatgtcctggacgtttacattgagcatcggctaatgatggagcagcggagtcgggaccctgggatggtccgaagcccccagaaccagtaccctgctgaactcatgcgcagatttgagctgtattttcaaggccctagcagcaacaagcctcgtgtgatccgggaagtgcgggctgactctgtggggaagttggtaactgtgcgtggaatcgtcactcgtgtctctgaagtcaaacccaagatggtggtggccacttacacttgtgaccagtgtggggcagagacctaccagccgatccagtctcccactttcatgcctctgatcatgtgcccaagccaggagtgccaaaccaaccgctcaggagggcggctgtatctgcagacacggggctccagattcatcaaattccaggagatgaagatgcaagaacatagtgatcaggtgcctgtgggaaatatcccctcgtagtatcccgggggctggtaaaaaggagaagaaccccaaggattgcccagcctgggagaacacgtcagcgtcaccggggattttt

SEQ ID NO: 71285 - DNA, 790 bp, Homo Sapiens
cacacctgtcaccagcaccagggccccaccttaaggtcagttctcactcacggagtctctcagcacactgccggtaagcccccactcctgaggagccccggccctgttgtgtactgctgcgagcgccagtcgatcaatgtatgacaggagctgagacttggccacaccaggatcccccatcagacagatgttgatgttgccccggattttcatgcctcgaggagactggtccacacccccgactagcaggagcagcagtgccttcttcacatcttcatgcccgtatatttctggggcgattgaagctgccagcttttcgtagaaatcctcctctgcaatttgcctcagctcctccctggtgagctctccagccccagactcatcatcctcactcttgttcatcttcacaatccgatgggcttccaggtaggtttctgagagtaaaccctgtaccacctgtcggaacccagtgcgcaggattggcaagaaaataccagtgacgctgacgtggtctccaggctgggcaatccttgtgttctctccttctaccagcaccgtgatactacgagggatatttcccacaggcacctgatcactatgttcttgcatcttcatctcctggaatttgatgaatctggagccccgtgtctgcagatacagccgccctcctgagcggttggtttggcactcctggcttgggcacatgatcagaggcatgaaagtgggagactggatcggccacgagcctcgtgccgaattcacacacccaggcctcgtacctagaccgttt

SEQ ID NO: 71286 - DNA, 1260 bp, Homo Sapiens
ctcacatttggcccgtttggtgcccctctcccttagcgggtgtcgcccccggccccacgcgtgtgtgtccgcgtctcaccgggggggcaccccccgttagcggaccacagccttttacatctcagccgaaaatttgtggccgattgactgccaccttttgtagaatccccctccccattgcctcagctcctccctggtgagcttccagcccaagactccatcatcgtcactctggtcatcgtgcaccatcccgatgggcttcccagtaggttttctgagagtaaaccctggtaccacctgtcgggaacccagtgcccaggattggcaaagaaaataccagtgacgctgacgtggtctccagctggccaatcctggtgttccccccttctaccagcaccgtgatactacgagggaatatttcccacaggcacctgatcactatgttcttgcatcttcatctcctggaatttgatgaatctggagccccgtgtctgcagatacagccgccctcctgagcggttggtttggcactcctggcttgggcacatgatcagaggcatgaaagtgggagactggatcggctggtaggtctctgccccacactggtcacaagtgtaagtggccaccaccatcttgggtttgacttcagagacacgagtgacgattccacgcacagttaccaacttccccacagagtcagcccgcacttcccggatcacacgaggcttgttgctgctagggccttgaaaatacagctcaaatctgcgcatgagttcagcagggtactggttctgggggcttcggaccatcccagggtcccgactccgctgctccatcattagccgatgctcaatgtaaacgtccaggacatctttatttaccacttccctctccttgtactgaggcagcagctcttgtacggcatcagcaaagagcttcgcgtagcgcctggcattctcacaaattgagtccaccaactcggggtcatcctcggctacgtcgtccaggtccacatacagagccacctgttcccgatgagccagccgaaccaactggttcccatacttgaactgcttcttcccgagttcatcatcctggtagaactcttgtaagaacttcttaaccttttccttctctagcgcgtagtccttcagtgccatcgctgccgaggcccgtgcgcccgcgcttggcgggctcagaggtcttgctcctggggaagctgagatctccgccggtggaccctcggccattcacccccgg

SEQ ID NO: 71287 - DNA, 2058 bp, Homo Sapiens
ggagtcgggaccctgggatggtccgaagcccccagaaccagtaccctgctgaactcatgcgcagattgtgagtggtctctgtcgggaaagatgtagggattggttctccaggatcttgtttgtgactgttttctccccttagtgagctgtattttcaaggccctagcagcaacaagcctcgtgtgatccgggaagtgcgggctgactctgtggggaagttggtaactgtgcgtggaatcgtcactcgtgtctctgaagtcaaacccaagatggtggtggccacttacacttgtgaccagtgtggggcagagacctaccagccgatccagtctcccactttcatgcctctgatcatgtgcccaagccaggagtgccaaaccaaccgctcaggagggcggctgtatctgcagacacggggctccagattcatcaaattccaggagatgaagatgcaagaacatagtgatcaggtgcctgtgggaaatatccctcgtagtatcacggtgctggtagaaggagagaacacaaggattgcccagcctggagaccacgtcagcgtcactggtattttcttgccaatcctgcgcactgggttccgacaggtggtacagggtttactctcagaaacctacctggaagcccatcggattgtgaagatgaacaagagtgaggatgatgagtctggggctggagagctcaccagggaggagctgaggcaaattgcagaggaggatttctacgaaaagctggcagcttcaatcgccccagaaatatacgggcatgaagatgtgaagaaggcactgctgctcctgctagtcgggggtgtggaccagtctcctcgaggcatgaaaatccggggcaacatcaacatctgtctgatgggggatcctggtgtggccaagtctcagctcctgtcatacattgatcgactggcgcctcgcagccagtacacaacaggccggggctcctcaggagtggggcttacggcagctgtgctgagagactccgtgagtggagaactgaccttagagggtggggccctggtgctggctgaccagggtgtgtgctgcattgatgagttcgacaagatggctgaggccgaccgcacagccatccacgaggtcatggagcagcagaccatctccattgccaaggccggcattctcaccacactcaatgcccgctgctccatcctggctgccgccaaccctgcctacgggcgctacaaccctcgccgcagcctggagcagaacatacagctacctgctgcactgctctcccggtttgacctcctctggctgattcaggaccggcccgaccgagacaatgacctacggttggcccagcacatcacctatgtgcaccagcacagccggcagcccccctcccagtttgaacctctggacatgaagctcatgaggcgttacatagccatgtgccgcgagaagcagcccatggtgccagagtctctggctgactacatcacagcagcatacgtggagatgaggcgagaggcttgggctagtaaggatgccacctatacttctgcccggaccctgctggctatcctgcgcctttccactgctctggcacgtctgagaatggtggatgtggtggagaaagaagatgtgaatgaagccatcaggctaatggagatgtcaaaggactctcttctaggagacaaggggcagacagctaggactcagagaccagcagatgtgatatttgccaccgtccgtgaactggtctcagggggccgaagtgtccggttctctgaggcagagcagcgctgtgtatctcgtggcttcacacccgcccagttccaggcggctctggatgaatatgaggagctcaatgtctggcaggtcaatgcttcccggacacggatcacttttgtctgattccagcctgcttgcaaccctggggtcctcttgttccctgctggcctgccccttgggaaggggcagtgatgcctttgaggggaaggaggagcccctctttctcccatgctgcacttactccttttgctaataaaagtgtttgtagattgtaccattc

SEQ ID NO: 71288 - DNA, 554 bp, Homo Sapiens
gcacgaggatgctctggggctttcatgggaatgatgaagatgataatgagaaaaatgttatcattattatcatgaagtaccattatcgtaatacaatgaacctttatttattgcctaccacatgttatgggctgaataatggcccccaaagatatctgtgtcctaatcctcagaacttgtgactgttaccttctgtggcagaaagggacagtgcagatgtatgtaagttaaggactttgagatagagaggttattcttgctgattcaggtgggcccaaaatatcaccacaagggtcctcataagaaagaggccagaaggtcaaagaggtagagacaaagtgatgatggaagtggacgtgggtgtgacgtgagcaggggccatgaatgccgcagccttcagatgccagaaagggaaaggaatggattcccctgcctggagcctccaaaagaaaccagccctgcccacgccttgacttgagcccattgaaactgatcttgagctcctggcctccagaattgcaggagaataaatttgtgttgtttttaatgaaaaa

SEQ ID NO: 71289 - DNA, 1501 bp, Homo Sapiens
  misc_feature (72)..(96): n is a, c, g, or t
  misc_feature (243)..(259): n is a, c, g, or t
ggtaccggtccggaattcccgggatatcgtcgacccacgcgtccgctagtctagatcgcgagcggctgcccnnnnnnnnnnnnnnnnnnnnnnnnngaaggtggggaggggaatatacacattgcttttatatttaatacttttgctgatgcttttgaaaatgtttatgccacagaatttgctaatatattgtaatcacattccttaggaggactttggtaattggttttatgcattgatggnnnnnnnnnnnnnnnnngccaaattgactgtcacgcggcagcttcagggagctcgcattctcttgtgttcgtgttgccctcgtgcccatcaagtgcagtcgggacctcccaggacaagcacgaggcctcaggtcggccctgtggcgggtaggcaggaaggactgtcccagacgaggggcttcctctagagtctcactgctggggaggagaggactgggcctgatggaagttaacccggagctaagtcacccagagcacaggagctgccatgtcagatgggaaatctgcctatgtcataccgtgacagcccgcaggatcaggtgacttctagcagagaccctggtttttttcctgtgcccactccggcttgtcctcatctctacccatcccctgatgcccaggtcaccgggagggctgctgggagcctctcctgtccccgccgggcagtgtcactgagtccttgaaatcctcccctgccccgcgggtctctggattgggacgcacagtgcagttgaggtctgcgtcgggcttggcttttcacaaaggctgatgtcttaactgtcacccatatggtccctgggccaccgggcagcctggggcggtgtgtgtgccatgtcacagcatggcctctcggccttgggaaggaaggcagtgcctgctctgctgtgagccgccaggaaccctcctcctgtcaatgggggtgtagtatttttgccaaaatatcatgttcaatttcagtagtttgatcagttgaaggctagaagtgtgaagtgcagatgagtgtgtgttcttccccaaggtccccccacagctccaggacaccgctgtcctggcatttgtggccactcactttgtaggaaactcatctccttcctgaggagccgggaggctggaccagtcccgtcgtgcagtcaggtgggcggtgtgtctttccagaaggtcacgtggaaatgtctcgggacttgggtcccggagtgcccgtgaagcgtgtttttgctcctgaggtgcattttctcatcatccttgctttaccacaatgagcaatgaggtcgggttttatatgcaacttattgtatctgaattcctgtagcacacctcataggtatgatttttttaaattaaagaattcagaataaacattttttgatccacaacaacaacacaaacaactcccggaggctctaatcgggggcaaacacaggaaaaaaggcccaggtcaaactgtccgcccctttgaacaaggaaaacgcgccccaagg

SEQ ID NO: 71290 - DNA, 1427 bp, Homo Sapiens
  misc_feature (301)..(301): n is a, c, g, or t
  misc_feature (1197)..(1198): n is a, c, g, or t
  misc_feature (1203)..(1212): n is a, c, g, or t
gctgaccgtccggtactcgctggagctgactgctgcccgctttggcttggatgtggaggccgtgcggaccttgctcaatacagggctggagaagctcttccaggcccggaagcatcggcccaagccgcacctggacagcaagatgctggctgcctggaatggcttgatggtgtcaggctatgctgtgactggggccatcacggacctgaagacaagatgatcaacagatgcctgaccagatgcagacaagtgactgaagcgcctgacagagtattgaggtagtgacaatggcaacgctctntggaagccgacctggggctacaccagccctccggtatgcggtccccagcacccaccctgctgggctcctggagatacgccttcgtgtgcggggcctgctggacctgtatgaggcctcacaggagagtgcgtggctcgagtgggctctgcggctgcaggacacacaggacaggctcttttgggactcccagggtggcggctacttctgcagtgaggctgagctgggggctggcctgcccctgcgtctgaaggacgaccaggatggagcagagcccagcgccaattccgtgtcagcccacaacctgctccggctgcatggcttcacgggccacaaggactggatggacaagtgtgtgtgcctattgaccgccttttccgagcgcatgcgtcgtgtcccggtggcgttgcccgagatggtccgcgccctctcagcccagcagcagaccctcaagcagatcgtgatctgtggagaccgtcaggccaaggacaccaaggccctggtgcagtgcgtccactctgtctacattcctaacaaggtgctgattctggctgatggggacccctcgagcttcctgtcccgccagctgcctttcctgagtaccctccgacggttggaagaccaggccactgcatatgtgtgtgagaatcaagcctgctcagtgcccatcactgatccctgcgaattacgaaaactactacatccatgactgccccaacccccttggggtggggcagaaggtgaagcatcccaactgactagagactcaggccctgcagggccctatagaacctgtggccatccctgagcaccctgccaccaggtgacctcggccatactcactgccccccttgggcacccactcaccctagaataaacttaacagtgtcccggtggtnnccctnnnnnnnnnnacccaaatttgatcctctcaccctgtggaacgtgacccccgcctttgaccaaaaaaccttgtccggccgccttcggccctaaaaaaattttctaaaacaatttcctttgggcgcccggggcccccgtcgaggaaaggtgaccggtggctcatgccgggtttcccaaagaaaaaacccgggctcatgaacataagggttttggaattttccccccc

SEQ ID NO: 71291 - DNA, 1393 bp, Homo Sapiens
  misc_feature (829)..(881): n is a, c, g, or t
ccacaaattgatatatttacttcattgccagcggagtacactcgcatacatagatatctctgagtcactttaagtcacataactgcaaggatacaaacaaacactagttcatccctgtggctgagtgcccttggggaatactcagatcccagtggggcttctctctgcatcttctggccactctggccgttctccctgagcccacccaccttctccccctcccttccattcttccacgatggtagcaaagcagggaagtgccagtggaaagagactgcaggtgcacagaggcttggacaggccagagtccatggcagctgctttggcgtctctccttggttcatgtggtgggcacttcaccacttcaaggacactgtcaactccctgaaggcaaggcccagggctttgacttccctaggcatggagagacagtagtcaggaaaagcagctccttggcagactgctgggtgtgtgacaactgtgagggctcaggggctacaagcagggacagggcaagctcgcaaacaaaaaactgagacccgatgcggtgcatgcggggagcagagctgtgcagggcgctgcaggagcagaggagggggcggggcaggacggcttccttgaagggagcccttcaggcactgtcatgtgccacatcctgtgtgaggcacttcaccgttcatcgttattgcatctgggattcaaatccagatctgtctggttctaaaacccacgtgctttcttctgtacaggttgctacctgaggggacatctgctctgggactcagagaatgataaagagatctccagaataaatgaatcactttcagannnnnnnnnnnnnnnnnnnnnnnnnnnnnnnnnnnnnnnnnnnnnnnnnnnnnaaatactacattctccccaaatttcacatcgtaagtggctggaagtgcaaacataaaggatgctagcaacatggccgcggcaagaggagcctctggagcaaggtcagcttctcccctgatttctggctttcagccaacaaggccaatggatcttccaaaccagctgctgctgctgagctccagaagaggggcctctcaacttccagaggccaggaaggctcaccctcggagctctcagttttgttttttatatttgttcatgatccagtcagcatcttcaatggctcttttaataatctgctggattctctcagggttgtcttcatctgaatgaacccgaaaactctgcctgacagcatgcttgtaatgctgctggatgcccttggtcggcagctgctggcaacagcgcagcaagtatcggtagagctgcagtggcctccgaaccagttctgctcctggcagcggggccatccgtgagaccctcagcctccagggtaacgccagccccggac

SEQ ID NO: 71292 - DNA, 1223 bp, Homo Sapiens
  misc_feature (54)..(54): n is a, c, g, or t
  misc_feature (71)..(71): n is a, c, g, or t
  misc_feature (140)..(140): n is a, c, g, or t
  misc_feature (942)..(950): n is a, c, g, or t
cagggaccatgataagcatgtatatgttattatcagacttggctcttcctctcntgctcatcagaggctgnactctcctcagtttcgtttcccgttttccgcaggtaagtcttctttagtttcttggttagccactgcgngcatgttttccctttgctccccttttccctttggtttgcacttttttgtctgaagatttatcctgaaaaaaagcaccatgccgtacggtcaggttgactatcctgctacagttaatcccttcatatcatataatgaggaactaaaaggatcagttttgaatttatcactttcatttaggtgtttgaagaatctgaaaagcacaggtattaatatgaccatactaacttgatacattaagttcaaaatttaagccatgttaaagaaacataaaaatacttttagataccatccatcaatactgagaagaaagcttaacatttattccttgttagtaagtatacagcagcagctaaattagtttagcccccagcgggtggtataaaagacccatacggatactgaccaattacttgaattaaagggccataaagacaagcaagtagagctcacaacttcaatgctaacatgggcggaaaaatcactgcagggtgttctgtactaatagtaggattccacagacagcataatgacttttaatacttcaacatcctttgagtaacaaatgataaatgtatttgagacaaaactgctactacacacattgctatcacaaagtttcacaatcacttctgtatttaagaactactcttttgtagtctgatttctaaagatttctcattaatttcataatcattccaatacaaaaaatacaaaactgggaaacagttaaaatagaatacataataccttggacttgaaataataccacgtgtaaccattatcagctgaaaagctagattnnnnnnnnntcaatcaagtttcccaaagtataatgtttggaccttcaaaatatttagttctagggaaagatacaagtcagaagcacacacagtgacaagatatgccttgaaaacatgtctactgtgtagtatgataatcgatacaccaagtgcttacgttctgtttagacttcaaagtctgatcaaccatgaagtcaaaggtgtattacagaaacgagatgtaaaaatgaacaaatcccttctgccctttttccttttgggaaaactgacctcataggctcg

SEQ ID NO: 71293 - DNA, 1355 bp, Homo Sapiens
gcgcgccgcggcccgcaggcacccggcacgcgccttccccgcaggcacccggcacgcgccttccccgccgccacgatgcccaagaggaaggtcagctccgccgaaggcgccgccaaggaagagcccaagaggagatcggcgcggttgtcagctaaacctcctgcaaaagtggaagcgaagccgaaaaaggcagcagcgaaggataaatcttcagacaaaaaagtgcaaacaaaagggaaaaggggagcaaagggaaaacaggccgaagtggctaaccaagaaactaaagaagacttacctgcggaaaacggggaaacgaagactgaggagagtccagcctctgatgaagcaggagagaaagaagccaagtctgattaataaccatataccatgtcttatcagtggtccctgtctcccttcttgtacaatccagaggaatatttttatcaactattttgtaaatgcaagttttttagtagctctagaaacatttttaagaaggagggaatcccacctcatcccattttttaagtgtaaatgcttttttttaagaggtgaaatcatttgctggttgtttattttttggtacaaccagaaaatagtgtgggatattgaattatgggaggctctgactgtctcgggtgtcagcttaacattccacagatggggggttagtttttatatcctataatacaaagcatattaaatggcaatatggagtcagtcctgcatttaatgtcttgaacattttaaattacttctattaccatgttgttttttagtagaattgtttcctaaagaaaaccactctttgatcatggctctctctgccagaattgtgtgcactctgtaacatctttgtggtagtcctgttttcctaataactttgttactgtgctgtgaaagattacagatttgaacatgtagtgtacgtgctgttgagttgtgaactggtgggccgtatgtaacagctgaccaacgtgaagatactggtacttgatagcctcttaaggaaaatttgcttccaaattttaagctggaaagtcactggaataactttaaaaaagaattacaatacatggctttttagaatttcgttacgtatgttaagatttgtgtacaaattgaaatgtctgtactgatcctcaaccaataaaatctcagttatgacacggcacggcattccgacgcacgtagggccttggtcggccgccctcggccccctcagaagcttttctagaaccctttcgtttggcgccccgggcccccaataggtaaatggaccttggcccaaagcctggttccctaggaaaatcctgggtcattggaactagggggcttgggaatcttccccc

SEQ ID NO: 71294 - DNA, 1123 bp, Homo Sapiens
aggaggaggcgggctcccaatccggttccatccggttctcccaccgcccccgctgtgggtctcagcagctcgggcggcgggaggagtggcagcggcaaggcagcccagtttcgcgaaggctgtcggcgcgccgcggcccgcaggcacccggcacgcgccttccccgcaggcacccggcacgcgccttccccgccgccacgatgcccaagaggaaggtcagctccgccgaaggcgccgccaaggaagagcccaagaggagatcggcgcggttgtcagctaaacctcctgcaaaagtggaagcgaagccgaaaaaggcagcagcgaaggataaatcttcagacaaaaaagtgcaaacaaaagggaaaaggggagcaaagggaaaacaggccgaagtggctaaccaagaaactaaagaagacttacctgcggaaaacggggaaacgaagactgaggagagtccagcctctgatgaagcaggagagaaagaagccaagtctgattaataaccatataccatgtcttatcagtggtccctgtctcccttcttgtacaatccagaggaatatttttatcaactattttgtaaatgcaagttttttagtagctctagaaacatttttaagaaggagggaatcccacctcatcccattttttaagtgtaaatgcttttttttaagaggtgaaatcatttgctggttgtttattttttggtacaaccagaaaatagtgtgggatattgaattatgggaggctctgactgtctcgggtgtcagcttaacattcacagatgggggggttagtttttatatcctataatacaaagcatattaaatggcaatatggagtcagtcctgcatttaatggcttgaacattttaaattacttctattaccatgttgctttttaagaagaaattgttttcctaaagaaaaacccctcctttgatccatgggctcctctctggccagaaattgtggtggcactcctgaaacaatcctttgggggtaagtccctggtttttcctaataaactttgtgttaccggggcctggggaaaaattttcccgaattttggaacattggtaaagggtaccctgggctgggttaaaattgggggaaactgt

SEQ ID NO: 71295 - DNA, 1133 bp, Homo Sapiens
tttataccagaaaaaagaaaacatttataggtggttaaaatcgatcctatccaataaatcagactcttccaaataagtatatgtcagatgatataactgtctagtttatctgtgatatatgtatccaaattatctatgttgttataaatgtgaactgtatctcacctgtaagtggtgttaatttccccacagctcttcctttccatagtattaagtatgtctttggcccacttgtagtttctcaagaaagcatgttgatacggacagcccctactctcatatatggtgtattgaccttaggcaagagatgtggtttctctgagctccagatatgtcatctataaaattggtgttaacaccgtttatctcatagggtgctaagaagattaaagtactgcccagagtaggcactcagtcaagttctctttcctctcctgatacctacccccatcctttcctctaggttgcatatagttctttactcccaaaggagatcacagtagatagaaaatcccatgaatgtccttgctcttcgttgtaacctccctccccctctatcccccacacataatgccttagatattcagtaggttttattgattagaggtgaacttatttggaaggaataaaaagacaaagcaggagaatggtcaagaacatgagttttagagtgagacacttgagtttgaaatccagcccaaccatttactagttgtgtgacctctatcaagttatgcaacctctctgtgcctcagtttcctttttggcaaattggtgctaacacctcacaggactattgtaaggattaagttcatgtagataaagcacttaacacagcatccgacacatctcatcactcaataaattatcactgccctttgttactgtggttaacaaacacttgctgtaatttctctcttctaacttataggacaaacaaataatggaaatttttaacataagtatgtagagattgtggtaccacagtgataaactgatttttatgcttaagttaatgactctggtttatgtatgacaatttattcagtatgagaatctcagaaaactaatgtttttttctattccttaaccttcctaccctttttttggtaaagaaaattaccgaaaagggg

SEQ ID NO: 71296 - DNA, 1587 bp, Homo Sapiens
tcctcctcctccacctccggcttttgggggatcactgtcctctctcggcagcagaatgagccggcaggtggtccgctccagcaagttccgccacgtgtttggacagccggccaaggccgaccagtgctatgaagatgtgcgcgtctcacagaccacctgggacagtggcttctgtgctgtcaaccctaagtttgtggccctgatctgtgaggccagcgggggaggggccttcctggtgctgcccctgggcaagactggacgtgtggacaagaatgcgcccacggtctgtggccacacagcccctgtgctagacatcgcctggtgcccgcacaatgacaacgtcattgccagtggctccgaggactgcacagtcatggtgtgggagatcccggatgggggcctgatgctgcccctgcgggagcccgtcgtcaccctggagggccacaccaagcgtgtgggcattgtggcctggcacaccacagcccagaacgtgctgctcagtgcaggttgtgacaacgtgatcatggtgtgggacgtgggcactggggcggccatgctgacactgggcccagaggtgcacccagacacgatctacagtgtggactggagccgagatggaggcctcatttgtacctcctgccgtgacaagcgcgtgcgcatcatcgagccccgcaaaggcactgtcgtagctgagaaggaccgtccccacgaggggacccggcccgtgcgtgcagtgttcgtgtcggaggggaagatcctgaccacgggcttcagccgcatgagtgagcggcaggtggcgctgtgggacacaaagcacctggaggagccgctgttcctgcaggagctggacaccagcagcggtgtcctgctgcccttctttgaccctgacaccaacatcgtctacctctgtggcaagggtgacagctcaatccggtactttgagatcacttccgaggcccctttcctgcactatctctccatgttcagttccaaggagtcccagcggggcatgggctacatgcccaaacgtggcctggaggtgaacaagtgtgagatcgccaggttctacaagctgcacgagcggaggtgtgagcccattgccatgacagtgcctcgaaagtcggacctgttccaggaggacctgtacccacccaccgcagggcccgaccctgccctcacggctgaggagtggctggggggtcgggatgctgggcccctcctcatctccctcaaggatggctacgtacccccaaagagccgggagctgagggtcaaccggggcctggacaccgggcgcaggagggcagcaccagaggccagtggcactcccagctcggatgccgtgtctcggctggaggaggagatgcggaagctccaggccacggtgcaggagctccagaagcgcttggacaggctggaggagacagtccaggccaagtagagccccgcagggcctccagcagggtcagccattcacacccatccactcacctcccattcccagccacatggcagagaaaaaaatcataataaaatggctttattttctggcaaaagggagaacaagaaaaaccaacacaagcgtgt

SEQ ID NO: 71297 - DNA, 914 bp, Homo Sapiens
gtcttttagagcttttaattttacatagtgaatggaaatttaagtattacattttaaaacctgattgtacattggtaatttaaacatccaataacaggaaaatctagatacagtgatgtgttatacatacatgactgttaacatcagtaatattttatgatagtttaaggttttttattgttttctataacaagttatccaacaggttggactttgtaacatgatatccaaggaccaagttgcatatttaacatcgaatgaaaatgtagttgtacagttccaaaaataattaattttttaagggaatttttcaagacaaaaggcaaatattttgtttcaaacctacaagcaaattcattccaagaagtgaatatagtagtaaaacataaagactattgcaataaaaagtttccaggccagtgacttgtttaattacattcacatttttacattcactttgcctttcaaagcaggagtattttataaaactgaaataaaactttaaattgtcaagctggtgcttaaagttatgtaaaatctgatttaagtttatttcatttccaaggaaaggaccctgaaaggaggggacagggagcttcctaggtctgttgataaactaactgatgctttgtcaagtcttccaagttttcactgtaaataatacaactaacaatgtaattttgctgttttctaatagagaatgaatgaatatattaatgtattacatttgtttcatgataaaacagttttcactgatactgtgaaatcctttctctcctttctagccttgcaaaataccctactaaataaatcattttagacatggagtgcaggtggacactgtgtgaactgtttttggtcagttattgtagaaattgatagatgtaccaaataaactctatgcacattaaaaa

SEQ ID NO: 71298 - DNA, 1213 bp, Homo Sapiens
  misc_feature (726)..(735): n is a, c, g, or t
cagtcgacggtaccggacatatgcccgggaattcggccattacggccgggggatgtatcttagtctaaagaaccaaaaccatccctgaaatgccttgctaatacaactaatccttccatatatgtgccatacttatttttttcctcagtgtatactttatgttaacagggttattacaaagcacattttctgaatctgcaatcattcctttgacaattactggacccaaaggaaaattcattttctttgcattattccagtaatatataaaaactgtgtcttgttatagtagtacattatgaatcacatataaaatcttacaatacagaacaactgttaagatggaaaacagtgccaaacctccacagctcatttctttgtaatataatcagaatgaaaaataatttaagaggacagaagactggtacttattagttttattatatactctagcttatccctgcacaattattagagtgaatgaaaaaccactttcctgctttccattgttataaattctaagcttaagataaaagtggttctttacatgactgaatcaattacaatttatgggctagagccaaataggttgaagacaatcatccaaacagatcaatggaatagaatttcattggaaatgtaaaacactttcccaacaatggtcatgactttcttctgtttttgagaagagtttcatatgctggaccacattttagcttttattgnnnnnnnnnncccattgtccaaaaagttaagcaacaagtggccacacttttacgtgactacaacctggagttctgcaaagaaggtaatatttacttggtctttgactaaagttatctccccattctatggttacattttattttggactatggggacttctaatacgttttggtaaagaagagagtataaagaaaattcttgtcaaatttcactcaaaagtaatttcatgagaaatcaatgatttaaagcattatccaaattaaattatcatttgcagcaaactgtacaacagcaggaaggatatggaatggaacatgaggtatatatctttgcctttataattttaacatcttatattgaagattctgaaaacctatctttattagaggaaaatctcaatcttcagttttggccttctgtcaccagaatgataagtgcaatagttgtaaatctacttgacactgtaataaactgaactgaactttcc

SEQ ID NO: 71299 - DNA, 1517 bp, Homo Sapiens
  misc_feature (1332)..(1332): n is a, c, g, or t
  misc_feature (1335)..(1354): n is a, c, g, or t
accggatccagattctggaacgtctggattctgactggtgcagggcagactgcaggacaggtaggggatcttcccagcagtgtttgtgaggccctgcccagctgaggcaaaaagtatgttggccatagtaccgaaggggaggaaggccaaagccttatatgatttccgaggggagaatgaagatgaactttccttcaaggctggagatataataacagagctggaatctgtagatgatgactggatgagtggagaacttatgggaaaatctggaatatttcccaaaaactacatacagtttctacagatcagctagaggagaagcttgtctgtgttccttggcacaagaactcacttgaactatcaccttgactatcagatatgtttttgcactattttttttaactgaaaaagaaatatctaagctgtacatggtacactagaattttctgaaagcagaaaacgttcagattttgtagttaattttcattacaatagaaacatgcacatggaaacccatgagctaggattctaccgaggaaaacatctagtgggattagcaaggtgaagggaaagcatctggtggcatggcagcatggggaggctcacacacagaagttgcacgtggacatctgttttaatcagcacaagtgaattaaccatgcttcttcatttctttactttagttaaaaaagaggacatttaatattctacatgctgtaactatcaggacatggttagcaatctcaatttcatttttgatattcaaattaattcttacagcttgagcatatcagccttattaccagagcaaatccttccttcagatgggatagtttactgactagttggagcatttgtaagcacatggtgaaatcagcccctgcccaccaaaataatctttatgttaccaagtgattcccatttgtctaaggatttgaagggggtctaaattggatgtatcttagtctaaagaaccaaaaccatccctgaaatgccttgctaatacaactaatccttccatatatgtgccatacttatttttttcctcagtgtatactttatgttaacagggttattacaaagcacattttctgaatctgcaatcattcctttgacaattactggacccaaaggaaaattcattttctttgcattattccagtaatatataaaaactgtgtcttgttatagtagtacattatgaatcacatataaaatcttacaatacagaacaactgttaagatggaaaacagtgccaaacctccaccgctcatttctttgtaatataatcagaatgaaaaataattttaagaagacagaagactggnacnnnnnnnnnnnnnnnnnnnncctctagctttatcccctgcacaatttattaagagttgaaatgaaaaaaccacttttccctggctttcccaattggtttataaaaattcctaaagcttaaaagaatataaaagtggggtttctttttaacttgaacctggaaattccaattttaccaaattta

SEQ ID NO: 71300 - DNA, 993 bp, Homo Sapiens
ggcacgagggagaagagccgcgcttgcagcgtctgggagaatctttcggtctccgcgagaggtgcttcattccacgaaaaaagtataattcaagctcagatttgtgttgaaaccagcctcaagtttcacctatcctcactgatccgtggacttctgtatgatcagggtgctgtcctgagagcgctgcgggataaaggaggagcgtcctgcttcccggctgccctgttgctgtcggagtcacaggatggcggctgtcgtcctgcccccaactgccgctctgtcttccctgttcccagcctctcagcgagaaggacacacacagggcggagagctggttaatgagctcctgaaaagctggctaaagggcttggtgacctttgaggatgtggccgtggagttcacccaggaagagtgggcattgctggaccctgcccaaaggacactgtacagggacgtgatgctggagaactgcaggaacctggcctcactagggtgtcgtgttaataaacccagtctgatatcccagttggaacaagacaagaaggtggtgacagaggaaagaggaattctaccaagcacctgtccagatttggagactctacttaaagccaaatggttaactcctaagaagaatgttttcagaaaagaacagtctaaaggtgtaaaaacggaaagaagtcatcgtggagtgaaactcaatgaatgtaatcagtgttttaaagtcttcagcacgaaatctaacctaactcagcacaagagaattcattctggagaaaaaccctatgactgtagtcaatgtgggaagtccttcagtagcagatcttaccttactattcataagagaatccataatggggagaaaccctatgaatgcaatcactgtgggaaagcatttagtgatccctcatcccttagactgcagatgagaattcacactggagaaaaaccctatgaatgtaaccagtgttttcacgttttccgcacccagttgtt

SEQ ID NO: 71301 - DNA, 1365 bp, Homo Sapiens
ggcctgggtggcgaattcggcacgagggccggtcgtaaccaagttgtgtcctgtcagccgctgtccccttcgccgcgatgccgctggagaacctggaggaggagggtctgcccaagaaccccgacttgcgtatcgcgcagctgcgcttcctgctcagcctgcccgagcaccgcggagacgctgccgtgcgcgacgagctgatggcggccgtccgcgataacaacatggctccttactatgaagccttgtgcaaatccctcgactggcagatagacgtggacctactcaataaaatgaagaaggcaaatgaagatgagttgaagcgtttggatgaggagctggaagatgcagagaagaatctaggagagagcgaaattcgcgatgcaatgatggcaaaggccgagtacctctgccggataggtgacaaagagggagctctgacagcctttcgcaagacatatgacaaaactgtggccctgggtcaccgattggatattgtattctatctccttaggattggcttattttatatggataatgatctcatcacacgaaacacagaaaaggccaaaagcttaatagaagaaggaggagactgggacaggagaaaccgcctaaaagtgtatcagggtctttattgtgtggctattcgtgatttcaaacaggcagctgaactcttccttgacactgtttcaacatttacatcctatgaactcatggattataaaacatttgtgacttatactgtctatgtcagtatgattgccttagaaagaccagatctcagggaaaaggtcattaaaggagcagagattcttgaagtgttgcacagtcttccagcagttcggcagtatctgttttcactctatgaatgccgttactctgttttcttccaatcattagcggttgtggaacaggaaatgaaaaaggactggctttttgcccctcattatcgatactatgtaagagaaatgagaattcatgcatacagtcagctgctggaatcatataggtcattaacccttggctatatggcagaagcgtttggtgttggtgtggaattcattgatcaggaactgtccaggtttattgctgccgggagactacactgcaaaatagataaagtgaatgaaatagtagaaaccaacagacctgatagcaagaactggcagtaccaagaaactatcaagaaaggagatctgctactaaacagagttcaaaaactttccagagtaattaatatgtaaagccatgtaactaacaaaggatttgctttagagataattatttggaatttttatagcttacttcacaatgtgcccaggtcagctgtataaaataaatactgcattgttgtttctttcc

SEQ ID NO: 71302 - DNA, 874 bp, Homo Sapiens
  misc_feature (496)..(496): n is a, c, g, or t
ggggccgcagccggtcgtaaccaagttgtgtcctgtcagccgctgtccccttcgccgcgatgccgctggagaacctggaggaggagggtctgcccaagaaccccgacttgcgtatcgcgcagctgcgcttcctgctcagcctgcccgagcaccgcggagacgctgccgtgcgcgacgagctgatggcggccgtccgcgataacaacatggctccttactatgaagccttgtgcaaatccctcgactggcagatagacgtggacctactcaataaaatgaagaaggcaaatgaagatgagttgaagcgtttggatgaggagctggaagatgcagagaagaatctaggagagagcgaaattcgcgatgcaatgatggcaaaggccgagtacctctgccggataggtgacaaagagggagctctgacagcctttcgcaagacatatgacaaaactgtggccctgggtcaccgattggatattgtattctatctccttangattggcttattttatatggataatgatctcatcacacgaaacacagaaaaggccaaaagcttaatagaagaaggaggagactgggacaggagaaaccgcctaaaagtgtatcaggggtcctttattgtgtgggctattcgtggatttcaaacaggccagcttgaactccttccttgaacactggttttcaacattttacaatcctatgaaacttattggaattataaaaaccttttgtggacctattacctggtcttatgggccaagaaatggaattggccctttagaaaaagaaaccaggattccttcctggggaaaaaaggggctctctttaaaaaggaaggccacgaagaatttctctttggaaaatgtggttt

SEQ ID NO: 71303 - DNA, 885 bp, Homo Sapiens
ggggcaactcaaactaaccaacccactgggagaagatgcctgggggtccaggagtcctccaagctctgcctgccaccatcttcctcctcttcctgctgtctgctgtctacctgggccctgggtgccaggccctgtggatgcacaaggtcccagcatcattgatggtgagcctgggggaagacgcccacttccaatgcccgcacaatagcagcaacaacgccaacgtcacctggtggcgcgtcctccatggcaactacacgtggccccctgagttcttgggcccgggcgaggaccccaatggtacgctgatcatccagaatgtgaacaagagccatgggggcatatacgtgtgccgggtccaggagggcaacgagtcataccagcagtcctgcggcacctacctccgcgtgcgccagccgccccccaggcccttcctggacatgggggagggcaccaagaaccgaatcatcacagccgaggggatcatcctcctgttctgcgcggtggtgcctgggacgctgctgctgttcaggaaacgatggcagaacgagaagctcgggttggatgccggggatgaatatgaagatgaaaacctttatgaaggccctgaacctggacgactgctccatgtatgaggacatctcccggggcctccagggcacctaacaagatgtgggcagcctcaacataggagaatgtccagcctgggagaagccgtgacaccccctacctcctggccaggcctgcccccccgcctgggttggggaaccccagcttccaagtggttctccaactttcactttccctggggacaattccttccctttttcacccccgttccttgggggggcccttcccttatagacatataattccccccccaat

SEQ ID NO: 71304 - DNA, 993 bp, Homo Sapiens
gggaactcaaactaaccaacccactgggagaagatgcctgggggtccaggagtcctccaagctctgcctgccaccatcttcctcctcttcctgctgtctgctgtctacctgggccctgggtgccaggccctgtggatgcacaaggtcccagcatcattgatggtgagcctgggggaagacgcccacttccaatgcccgcacaatagcagcaacaacgccaacgtcacctggtggcgcgtcctccatggcaactacacgtggccccctgagttcttgggcccgggcgaggaccccaatgagccgccccccaggcccttcctggacatgggggagggcaccaagaaccgaatcatcacagccggggggatcatcctcctgttctgcgcgctagtgcctgggacgctgcagctgttcaggaaacgatggcagaacgaaaagctcgggttggatgccggggatgaatatgaagatgaaaacctttatgaaggcctgaacctggacgactgctccatgtatgaggacatctcccggggcctccagggcacctaccaggatgtgggcagcctcaacataggagatgtccagctggagaagccgtgacacccctactcctgccaggctgcccccgcctgctgtgcacccagctccagtgtctcagctcacttccctgggacattctcctttcagcccttctgggggcttccttagtcatattcccccagtggggggtgggagggtaacctcactcttctccaggccaggcctccttggactcccctgggggtgtcccactcttcttccctctaaactgccccacctcctaacctaatccccccgccccgctgcctttcccaggctcccctcaccccagcgggtaatgagcccttaatcgctgcctctaggggagctgattgtagcagcctcgttagtgtcaccccctcctccctgatctgtcagggccacttagtgataataaattcttcccaactgcaa

SEQ ID NO: 71305 - DNA, 728 bp, Homo Sapiens
  misc_feature (78)..(78): n is a, c, g, or t
  misc_feature (106)..(106): n is a, c, g, or t
atcccaaactatgtatatgaggtgaaaatatatatgaaaagggatactgaagaatatttagtttaaaattaattctancgatcacgagcacatggtggcataatancaaagcttggaagtattcaaatagaaaatcaaaggtgtttcaatacagtagaatcccaggactgcattttaaaattgcctcacagatcacactcgctggtggcaaatatcatcatcgttgctaaaggacagaaaatactgatgtgtgttttaactaactggtatattgatccatgggaggctgcacagaagaccctgcggccaggaggggcattgtcagtggctgcttctcctgagctccacgccttcattgcagctgcatgttcgatacaatacacctgcttcacagccccatggacatccctacaggtactgtcatgtgaagccttgcctagtagttctctccagggcaaatgaagctcacagttttgcaaggtggaaacctcttattcacatttgctttgattccccgatggagtagactgcctttgttccatacaggcaaagtaaggatattttaatatcatcctacttcttattagcatttcatttgtctatgtactgtatttcatttgtatgtctcctgaaacatccaaatagagaacataagaacactttatgtacaatctggaaaaaaattacctgagaaatcaattaaagatttttccccttttctgaaaaaa

SEQ ID NO: 71306 - DNA, 713 bp, Homo Sapiens
attctggaaagtgcaagagagatgtttagtatttgcacaccataaggtggtcctggacgcaattacgcaagagcttgagagaaagcgcgtgcagcacatccgcatcgatggctccacctcatcagctgagcgggaggacctgtgccagcagttccaactgtcggagaggcatgctgtggccgtgctgtccatcaccgctgccaatatgggcctcaccttctcctcggctgacctggtggtgtttgctgagctgttttggaacccaggggtgctgatccaggctgaggaccgcgtgcaccgcattggacagaccagctccgtgggcattcactacctcgtggcaaagggcacagctgatgactacctttggcccctgattcaagagaagattaaagttctggcagaagccgggctttctgagaccaatttttcagaaatgacagaatccactgattacctctacaaggacccaaagcagcagaagatctacgacctattccagaagtcctttgagaaagaaggaagtgatatggagctcctggaagcagcagagtcctttgacccaggaagtgcttcaggaacatctggaagtagttcccagaacatgggagacaccctggatgaaagctcattgacagccagtccacagaagaaaaggagatttgaattttttgataactgggacagctttacgtctcccctgtaaaaggggc

SEQ ID NO: 71307 - DNA, 1127 bp, Homo Sapiens
  misc_feature (993)..(1012): n is a, c, g, or t
  misc_feature (1098)..(1098): n is a, c, g, or t
cggatttcttgtctctgatacaggcaagcaactttctcattaggtgcagcaaatgggcctatagtatcagcaattccagaatcagtcaattcaaaaaggaaagtacttttgcatgggttatacaaattgtagtagaatcctcgcttgctacaggcttattcttctggtttccgctgaaggcagcagtccttttccatgggccttttttcctgcagtaaatgctcataagaactgtaccatttacctcaggatatcattgtgtttgtaattggaggagccacctatgaagaggctctaacagtttataacctgaaccgcaccactcctggagtgaggattgtcctgggaggcaccacagtgcacaacacgaaaagtttcctagaggaagttctggcttctggactgcacagccgaagcaaggagagctctcaagtcacatcaaggtcagcgagcagaagatgaaacggtggttgggggaagggcacagcttcctctcttgtccccactacaggttttccctactaaacaaaggtgttggagagcagctttgggttctgtgctggttgttagaactcatctccaggtagcccacggatacgtggttggcacagacacaagactcccagagttgtcctaacaataagtctgagcccatctcaacccacttttctccggtagtctttatgtatctgttagcacaatcacttcagttactgatgaattttgttgggatctgacttggggaaagggttatcagagcctagaggggcttaaaaagtaatcatttgatgtacataccacactccttggcttcctttctcttcccttaaccctttctgcttttcattaaccacattcctgcacaactcatttctgaaaacctaccatgtttctttacagagccatccaaaaattttttgtccctacatagcaattttctgtggcactgagaaaccatgtatgaccacaataaaaatccattttgtgaaaggnnnnnnnnnnnnnnnnnnnncctagcaggcggccgcaagcttattccctttagtgaggttaattttagcttggcactgaccgtctttatacagagggcaccataangggaggggggggcgggtgggcaacgcgac

SEQ ID NO: 71308 - DNA, 936 bp, Homo Sapiens
tattgctacccattttcaggcaagtttcaggtaccatattattagcaataggattccatcattttcagcagataggaccactttctctaaagtctttactgattcccggcactctgaaaagatcaatccgattgttgtttatgcctagtagttcgtggaccatggcctgatatgtccactggtttagcaatggggtgatggcatcatcacagcgatctaaaataaggagcaatggaggaacctctgtccgacggaattcaaacagttcatattctttagttatcacttgcttaacgcactctgcaagtctctttgctgcctctgatgagagctgataacgaatcatgggacacttcttcagagataaaaggagagctgtaagcccttgagttgttctagatagctgggctggatcccaatttcgaccctggcagcaacccaaaatattgagggaaaacaaatgtgggttcacagcaatgtaatcaccataaaattcctgaacctcagccacaacttcctgttcatcagcttcagccaatgacttcacgtcactcttgctgatcacattactgaaataaatgaaatatatagtgtatttgggtcttcggagctcctgaataatataatccacattctcctttgtaggtcgaagaaaacaaattgccttcaggtgtttcatgatctctcgattttgagaatcaatgcgttcaaagaggtacacttccttctgtagaatctccgattgtgtgtataccatactcactatgccagtcgtctctttatccatgagaagtactttcataccaggcccgctgtcctctatcattttggaaatgtactgcttcacagcaaaaaccacgttcatggcggcgaattgacaagtaccctacagcccttcccgcccccttttctggctaaattaacccccagtctgat

SEQ ID NO: 71309 - DNA, 376 bp, Homo Sapiens
cgtcgttcctgcttccaagcaaaccttgtgccaggttcctcatttcgcgaggctccactctcttgggcttcagcctgccgctgggcctccagcaccaaagggcaataggggtctgagagtccgggcctcaggcatcttcaggccgcagactgccatagtgagtatggtatacacacaatcggagattctacagaaggaagtgtacctctttgaacgcattgattctcaaaatcgagagatcatgaaacacctgaaggcaatttgttttcttcgacctacaaaggtactgcataaactgagcttccatctgcccaggcagatgcagaacactttgatctgaaagcattaagaaggcaaaataaatttgtattttcat

SEQ ID NO: 71310 - DNA, 386 bp, Homo Sapiens
gttaatttagccagaaaagggggcgggaagggctgtagggtacttgtcaattcgccgccatgaacgtggtttttgctgtgaagcagtacatttccaaaatgatagaggacagcgggcctggtatgaaagtacttctcatggataaagagacgactggcatagtgagtatggtatacacacaatcggagattctacagaaggaagtgtacctctttgaacgcattgattctcaaaatcgagagatcatgaaacacctgaaggcaatttgttttcttcgacctacaaaggtactgcataaactgagcttccatctgcccaggcagatgcagaacactctgatctgaaagcattaagaaggcaaaataaatttgtattatcataaaaaa

SEQ ID NO: 71311 - DNA, 744 bp, Homo Sapiens
  misc_feature (49)..(69): n is a, c, g, or t
  misc_feature (81)..(99): n is a, c, g, or t
cctccaaccactaacggctaggtacgaggctgggtggcgaatcggcacnnnnnnnnnnnnnnnnnnnnnactgtctcgagnnnnnnnnnnnnnnnnnnnctctccttattctactctacagtcttttgacagtattcccaaacgaggttgacacagctccagtccacaccagcataccaggcttccttcccagggcagtttagaggaagctccttctgggcaaggtcaggcggtcctccttccctctctccttcccctttgtcccagcctcaactgactctggctgtgggaggtgtggagggtccttaggcttccctccccaacctggcctccaccaacacccctaacaggaggcccgtggaaggctcagcctctcctccgcatccctcctccttcctgcctatcggagggagccagggtcccctaggctgaccctgaatcctcttcctcccttcatgggaggggggcaggaatccagaggaggatgaagccagcgggaccacatggcttggtggcttggacaaacaagctcagggaggaaatgaggaggcggcggctgcagaggaatgcaaccctgttgggcacagaccatgcaatctggggctggccctggggccagctgggtcctgtcctccacctgctcaaccgtgcttccaccaaccagaggaaacccatttactagtttttctaataaatcaataatgctccatgtttctctcagtttccttatttactagcctcctc

SEQ ID NO: 71312 - DNA, 1568 bp, Homo Sapiens
  misc_feature (1435)..(1496): n is a, c, g, or t
caccctcgggtactgaggtcaccctggcagaggtgcccctgctggatgaggtggctccggagccactgctgccagcaggcgaaggctgtgccacccttctcaactttgatgagctgcctgagccgccagccaccttctgtgacccagaggaagtggaaggggagcccctggctgccccccagaccccaactctgccctcagcccttgaggagctggagcaagagcaggagccggagccccacctgctaaccaatggcgagaccacccagaaggaggggacccaggccagtgaggggtacttcagtcaatcacaggaggaggagtttgcccaatcggaagagctctgtgccaaggctccgcctcctgtgttctacaacaagcctccagagatcgacatcacatgctgggatgcagacccagttccagaagaggaggagggcttcgagggtggtgattagcggtggcgccagccctaggctacccttgccaaggccgcccacctgcatcagcctctggccagacggcccgccgtgcctgcattcgcagcagctccgcctggcacccactccggattccggccctggctggggacttggccgcttccctacccacagggcctgacttttacagcttttctctttttttaaaaagttgataggagacttgtacagttgactggctttcctctcgttggtagttgagacgctgttgcaaattccacccctccttccctggtccagattgtagctcttagtcctccctgctcagctggccgggttggaggcctcaccctgcttggggcctggcgtggggggagctctggtgggaaaatgtcccccacctcttttcctagttttatgtttcttgggaaaatatcactttgtattctctgtccagggcttcagatattttgcacgaattttaaaacatggcaataaatggctcgtgggctctggctccctgggaccccctccccgcccttcttttgaccccttcctgtctggcccaaaggaagtagcaggcccagctggggcccctcggctaccccccgtctcctgccgggcaggtcccaggttggaggccctaggcgcggttcaggtcagggctatggatggggcccaggggctttggtggcccctccccaactccttcctctttgctggggttccctttttcacgtttagtaaccggttccttaatattgggaaacgccaatttctgtaacgggccggcccactgctgtaaaacagagatccaatcccttcggacaacgaacgacaacacgaaagagaccggcgggccctagagcgggggcgaacaaagggctaaaagaggcacgggcaccgggggccgcgccccctttctggccaggggagaaaacgcgggcccaatagggggcggaaatagacgcggcgagcctaggcaggtcgcagannnnnnnnnnnnnnnnnnnnnnnnnnnnnnnnnnnnnnnnnnnnnnnnnnnnnnnnnnnnnngcacacgcgcggaacggaagcgcgcagcacacagacgagttcacgcgagagacaacgacgacaatcgcggca

SEQ ID NO: 71313 - DNA, 1046 bp, Homo Sapiens
  misc_feature (77)..(77): n is a, c, g, or t
  misc_feature (179)..(179): n is a, c, g, or t
  misc_feature (203)..(203): n is a, c, g, or t
  misc_feature (265)..(266): n is a, c, g, or t
  misc_feature (273)..(273): n is a, c, g, or t
  misc_feature (323)..(323): n is a, c, g, or t
  misc_feature (345)..(345): n is a, c, g, or t
  misc_feature (872)..(888): n is a, c, g, or t
ccatctgcccccgtaaattttccgttgttttggattggcgaaaaattaaaggaacgttgactgtagattatcgctcnttgggattgcctgggcaagattggaggagccattccttccccccgcgagagggttgtttgagacttgagtagtgtgtgaccgaccacctatgtgaacgtacntgaggagagacagcagatgtgacntttgtggccagtgaaagtgtctcagtgccagcctgtggtatcgctccacgacctccgagttnntgtgacntgtcctgcccatccccaagaaaggattgctgggggcaaggtgtctctgcnggattgtttcaacccttttcanttaaggaggaagagctagagtcggagaatgccccagtgtgtgaccgatgtcggcagaaaactcgaagtaccaaaaagttgacagtacaaagattccctcgaatcctcgtgctccatctgaatcgattttctgcctcccgaggctccatcaaaaaaagttcagtaggtgtagactttccactgcagcgactgagcctaggggactttgccagtgacaaagccggaagtcctgtataccagctgtatgccctttgcaaccactcaggcagcgtccactatggccactacacagccctgtgccggtgccagactggttggcatgtctacaatgactctcgtgtctcccctgtcagtgaaaaccaggtggcatccagcgagggctacgtgctgttctaccaactgatgcaggagccaccccggtgcctgtgacacctctaagctctggcacctgtgaagccctttaaacacccttaagccccaggctccccgtttacctcagagacgtctatttttgtgtctttttaatcnnnnnnnnnnnnnnnnntggttgtagctccattattttttttattaaaaaatacccttccacctggaggctcccttgtctcccagccccatgtacaaagctcaccaagcccctgcccatgtacagcccccagaccctctgcaatatcactttttgtgaataaatttattaagaaa

SEQ ID NO: 71314 - DNA, 875 bp, Homo Sapiens
  misc_feature (298)..(341): n is a, c, g, or t
  misc_feature (778)..(824): n is a, c, g, or t
aactactatattgattgtcctttaaaaaagaaaagtgcatatttatccaaaatgtgtatttcttatacgcttttctttgttataccatttcctcagcttatctcttttatatttgtaggagaaactcccatgtatggaatcccactgtatgatttataaacagacaatatgtgagtgccttttgcagaagagggtgtgtttgaaatcatcggagtcagccaggagctgtcaccaaggaaacgctacctctctgtcccttgctgtatgctgatcatcgccagaggtgcttcaccctgannnnnnnnnnnnnnnnnnnnnnnnnnnnnnnnnnnnnnnnnnnngcaaggaaaggggagaagggaatcctcctcccagggtgattttatgatcagtgttgttgctctaggaagacatttttccgtttgcttttgttccaatgtcaatgtgaacgtccacatgaaacctacacactgtcatgcttcatcattccctctcatctcaggtagaaggttgacacagttgtagggttacagagacctatgtaagaattcagaagacccctgactcatcatttgtggcagtcccttataattggtgcatagcagatggtttccacatttagatcctggtttcataacttcctgtacttgaagtctaaaagcagaaaataaaggaagcaagttttcttccatgattttaaattgtgatcgagttttaaattgataggagggaacatgtcctaattcttctgtcctgagaagcatgtaatgttaatgtnnnnnnnnnnnnnnnnnnnnnnnnnnnnnnnnnnnnnnnnnnnnnnntaatactggtatttttacttaatctataaaatgtcgttaaaaagttgtttg

SEQ ID NO: 71315 - DNA, 674 bp, Homo Sapiens
  misc_feature (22)..(22): n is a, c, g, or t
  misc_feature (66)..(66): n is a, c, g, or t
  misc_feature (98)..(141): n is a, c, g, or t
  misc_feature (577)..(624): n is a, c, g, or t
tggaatcccactgtatgattantaaacagacaatatgtgagtgccttttgcagaagagggtgtgtntgaaatcatcgccagaggtgcttcaccctgannnnnnnnnnnnnnnnnnnnnnnnnnnnnnnnnnnnnnnnnnnngcaaggaaaggggagaagggaatcctcctccagggtgattttatgatcagtgttgttgctctaggaagacatttttccgtttgcttttgttccaatgtcaatgtgaacgtccacatgaaacctacacactgtcatgcttcatcattccctctcatctcaggtagaaggttgacacagttgtagggttacagagacctatgtaagaattcagaagacccctgactcatcatttgtggcagtcccttataattggtgcatagcagatggtttccacatttagatcctggtttcataacttcctgtacttgaagtctaaaagcagaaaataaaggaagcaagttttcttccatgattttaaattgtgatcgagttttaaattgataggagggaacatgtcctaattcttctgtcctgagaagcatgtaatgttaatgtnnnnnnnnnnnnnnnnnnnnnnnnnnnnnnnnnnnnnnnnnnnnnnnnaatactggtatttttacttaatctataaaatgtcgttaaaaagttgtttg

SEQ ID NO: 71316 - DNA, 577 bp, Homo Sapiens
acataaacggggcggctgggccagggcggaaggtgctcctgtttccctccttctgcgtggtccctttgacgggccggccaccgtgtccgaggcgcaacgttaggcctccaggccacgcatccatctccaagttaacagcccgtcctgcccaagttctggggcaggtaggagagggccgtcacacacctgtccgcccgtgagtgacccgggggggcttccgggtgaaggtggagccaccacgcccttcctcaaggggtcacttattaaaaagtccacggcctgaggccaggccctctgcacagaagccatatgccggccagccgcgcctcctcctctgtccacggaaccgctgcccatctaaccttcgtaaagacctgtctcctgtttccagccgccgcctgtggttctagcaggttctatgccatctgcattgggatgtctggttgtttttatttctgacttttttaaaattccaggtgtgccgcacccactttctcgcagtgttttaatattgtgtggagttgtcgataccacgtgaattcatacacaataaaaagcctcactctccctttaaaaa

SEQ ID NO: 71317 - DNA, 707 bp, Homo Sapiens
  misc_feature (19)..(19): n is a, c, g, or t
attcggcacgaggggcttntgggcagacagtaaacgtccagtttgatgctggaagcatgaacagcttcatcaggtaggtactcctcaactctgatgagtttgtcctttcagcctaagggggtggaagggagttgtttgagaatagcaaatacgcatgttgattgcgagtgtgtggagacaaaggcagttcccaccacagttaggtcctggccgttgtttcctcgcctgcgatgctccttgtacgtcctcaccctcctctcccgcctctgccttctgctgggtcaaaggtggcctttttctctccagccttgaattgttccctgttggcttcccaagggcccatctgctggtacagtccacacttccaaagccaagacccgagagggctttcactgccccaagcctctctcctgtgaccttgggattctgtcttggcagaatcctttgtcagcggctcttactctgtccttcctgtttggccacagctctttcaatcaatgggtattctagaaccgcaggatgtcagagctggaagggacgcgataccggtttacacaaggggaaactcctcgaggctctgggagggacggagggttttggtgacagagcgagagctaaaattgaggattcctgaatccagatcttgcctcccatcagccatctttctcccaataaatttttgttttgtgcaaggcaaaatataaaaa

SEQ ID NO: 71318 - DNA, 1284 bp, Homo Sapiens
cgctggaaggagtggaacccagaacttgctggtctgatccatgcacaaggcggggctgctaggcctctgtgcccgggcttggaattcggtgcggatggccagctccgggatgacccgccgggacccgctcgcaaataaggtggccctggtaacggcctccaccgacgggatcggcttcgccatcgcccggcgtttggcccaggacggggcccatgtggtcgtcagcagccggaagcagcagaatgtggaccaggcggtggccacgctgcagggggaggggctgagcgtgacgggcaccgtgtgccatgtggggaaggcggaggaccgggagcggctggtggccacggctgtgaagcttcatggaggtatcgatatcctagtctccaatgctgctgtcaaccctttctttggaagcataatggatgtcactgaggaggtgtgggacaagactctggacattaatgtgaaggccccagccctgatgacaaaggcagtggtgccagaaatggagaaacgaggaggcggctcagtggtgatcgtgtcttccatagcagccttcagtccatctcctggcttcagtccttacaatgtcagtaaaacagccttgctgggcctgaccaagaccctggccatagagctggccccaaggaacattagggtgaactgcctagcacctggacttatcaagactagcttcagcaggatgctctggatggacaaggaaaaagaggaaagcatgaaagaaaccctgcggataagaaggttaggcgagccagaggattgtgctggcatcgtgtctttcctgtgctctgaagatgccagctacatcactggggaaacagtggtggtgggtggaggaaccccgtcccgcctctgaggaccgggagacagcccacaggccagagttgggctctagctcctggtgctgttcctgcattcacccactggcctttcccacctctgctcaccttactgttcacctcatcaaatcagttctgccctgtgaaaagatccagccttccctgccgtcaaggtggcgtcttactcgggattcctgctgttgttgtggccttgggtaaaggcctcccctgagaacacaggacaggcctgctgacaaggctgagtctaccttggcaaagaccaagatattttttcctgggccactggggaatctgaggggtgatgggagagaaggaacctggagtggaaggagcagagttgcaaattaacaacttgcaaatgaggtgcaaataaaatgcagatgattgcgcggctttgaaaaaa

SEQ ID NO: 71319 - DNA, 545 bp, Homo Sapiens
aacccagacttgctggtctgatccatgcacaaggcgcggctacgaggccactgtgcccgggcagggaagtcggtgcggttggccagctccgggatgacccgccgggacccgctcacaaataaggtggccctggtaacggcctccaccgactggatcggcttcgccgtcgcccagcgtctggcccaagacggggcccacgtggtagtcagccgccggaagcagcagaatgtggaccaggcagtggccacgctgcagggggaggggctgagcatgacgcgcactgtgtgccatgtggggaagatgaaggactgggagcggctggtggccacagtgagctgcagggaaatgggcacagagccaggaggtggaaaagggagccagcctgagcctccttccctgctttcctggacagcattggtgagatccaacgcagtgatgttaactaaaacataacagtgtgttctgcatacccaaccagcccaccagcacgtttttattgtgtgcctttctattatgtccatatattaaagttggagaataatccc

SEQ ID NO: 71320 - DNA, 1341 bp, Homo Sapiens
attcccgggataggagggccgtcgccacgggcacaatgacatgtgcgtgtcagatcatataccctcgccagcagctgctgaccctccgagagctagagatgattggcttcattgaaaacaacgtgtcaaaattgagccttcttttgaatgacatttcaaggaagagcgagggcctcagcggccgggtcctgagaaaactcccctttctggctcatgcgctgtatgtccaggcccccaccgtcaccatagaggggttcctccaggccctgtctctggcagtggacaagcagtttgaagagagaaagaagcttgcagcttacatctgatcctgggcttccccatctggtgcttttcccatggagaacacacaaccagtaagtgaggttgccccacacagccgtctcccagggaatcccttctgcaaaccaaacgttacttagactgcaagctagaaagccaccaaggccaggctttgttaaaagaagtgtattctatttatgttgttttaaaatgcatactgagagacaaacatcttgtcattttcactgtttgtaaaagataattcagattgtttgtctccttgtgaagaaccatcgaaacctgtttgttcccagcccacccccagtggatgggatgcataatgccagcaagttttgtttaacagcaaaaaaggaagattaatgcaggtgttatagaagccagaagagaaactgtgtcaccctaaagaagcatataatcatagcattaaaaatgcacacattactccaggtggaaggtggcaattgctttctgatatcagctcgtttgatttagtgcaaaaatgttttcaagactatttaatggatgtaaaaaagcctatttctacattataccaactgagaaaaaaatggtcggtaaagtgttctttcataataaataatcagacatggtcccatttgcaggaaaagtgcagactctgagtgttccagggaaacacatgctggacatcccttgtaacccggtatgggcgcccctgcattgctgggatgtttctgcccacggttttgtttgtgcaataacgttatcacatttctaatgaggattcacattaatataatataaaataaataggtcagttactggtctctttctccgaatgttatgttttgcttttatctcacagtaaaataaatataattaatggtttgcatgtgaaattcacttttgaaagaacatgttaccttaccttttgttttagaagttttcaagtattaaaatattttttagaattttcttgttttgattctaagtatctcttccaagtgcttttaattttactaaaaattactcacatgattactt

SEQ ID NO: 71321 - DNA, 798 bp, Homo Sapiens
taaagatttccaggctatttaatcaagtaatttacaatgtacacattcctgagtatacaccattgtggtgatataatttattttggaattttctccattcagcttaaaaggtgtttcttcccaagaaactgaacttttctgtcaaatgcacttgatcgaataggagaattgggttcataaaatggattcattgaaaattttatatataaatcataaacatcagtaaagaagttctttattccatcttcttgtcttatgtcatgaagcataataaacctcatatgccccgcggtgacaaatgctgacacaaaccactcgttgaacttgtccacagttttcaagtacatgttgttcgacagccacatgttctcatctacgaggtcgagagcagcatgagctatgaactggttcagatgacgatggtcgtctttggattctgccttcccagctggcaaaaactccatttcaaaaactggattatcatggtgaccaacaattacaaagtagaagcttccagacatggtcttcaatatatggctcctcgggttcttcggcggggactccgcaagtccagccagggaagagaggggcgggggcgacaaaggcaagacaaggacaccgccgtccccagtccttgtcagctgagcttctgccactctcagttgtgcctgtgtcactaccgcctctgcgtacaaggaaccaagccgcttctcgcgcttttccgctccgtcacttcggtgacgtcatagagcgccaaaggccggaactagtgaaaaccccagagaaaatcaaatcccc

SEQ ID NO: 71322 - DNA, 963 bp, Homo Sapiens
  misc_feature (793)..(793): n is a, c, g, or t
  misc_feature (805)..(826): n is a, c, g, or t
  misc_feature (860)..(860): n is a, c, g, or t
  misc_feature (874)..(874): n is a, c, g, or t
tagcgaggcctgggtggcgaattcggcacgagggttctggctacaggttcggggcgcgggtctcttccgcggaaactgacattgcgttctccgttgtcggcctcccactgcaggagccatatattgaagaccatgtctgggagcttctactttgtaattgttggccaccatgataatccagtttttgaaatggagtttttgccagctgggaaggcagaatccaaagacgaccatcgtcatctgaaccagttcatagctcatgctgctctcgacctcgtagatgagaacatgtggctatcgaacaacatgtacttgaaaactgtggacaagttcaacgagtggtttgtgtcggcatttgtcactgcggggcatatgaggtttattatgcttcatgacataagacaagaagatggaataaagaacttctttactgatgtttatgatttatatataaagttttcaatgaatccattttatgaagcccaattctcctattcgatcaagtgcatttgacagaaaagttcagtttcttgggaagaaacaccttttaagctgaatgcagaaaattccaaaataaatgatgtcaccacaaatggtgtatactcaggaatgtgtacatggtaagttacttgattaacatagccttggaaaactttagggtatgctcagcgttatctaaacctaatgaaattccttttatatttaaaaatagtacattctgtctcatgtcacgtatcaatagatcaattggtatttccttgtgaacagtgttatttataaagagttcattatncataatcatggnnnnnnnnnnnnnnnnnnnnnncctgatacagaagtctccactctgttgcccaagncttgggagtggcantgggcgcaaatctttggcttcactggcaacccttccggccctccccagggtttcagggcggatttcttccgtggctttaagccctttcc

SEQ ID NO: 71323 - DNA, 477 bp, Homo Sapiens
ggatgaaacaaaaaaaggtgacgaataatatggcttttgtttctgtttctgaagcctgatttcatttatgccaggttttgaaaaacagatctttttcttaagtgaaagcacctttaatttgctctaacggtacatcctgtaaagacagaattctgcatagccttttaggtgtttttacagtatgtgaaaaatacaagactcattctagagttaaattaccaatcttggttgatattatctgcttccatttttattaatttggaaattaatatgttgctagtaaatattggtttttacagtacccagtttgaaaatgtaagttatcaaaacttaatgtagtgaatttgtgtaaccatgttgtattgttgagaatgtatttttatttaaattttattttcttatcaagagtattataaaaattaacttttgtaactgtcgcttggaaataactcaaataaattacaaaagcaagtcaaa

SEQ ID NO: 71324 - DNA, 836 bp, Homo Sapiens
ggtaccggtccggaattcccgggatatcgtcgacccacgcgtccgaagcgaagcagcgatggcggagagtccgactgaggaggcggcaacggcgggcgccggggcggcgggccccggggcgagcagcgttgctggtgttgttggcgttagcggcagcggcggcgggttcgggccgcctttcctgccggatgtgtgggcggcggcggcggcagcgggctcccgccctcagccgctgcccacggggccgcgctgcttagccactgggaccccacgctcagctccgactgggacggcgagcgcaccgcgccgcagtgtctactccggatcaagcgggatatcatgtccatttataaggagcctcctccaggaatgttcgttgtacctgatactgttgacatgactaagattcatgcattgatcacaggcccatttgacactccttatgaagggggtttcttcctgttcgtgtatcggtgtccgcccgactatcccatccacccacctcgggtcaaactgatgacaacgggcaataacacagtgaggtttaaccccaacttctaccgcaatgggaaagtctgcttgagtattctaggtacatggactggacctgcctggagcccagcccagagcatctcctcagtgctcatctctatccagtccctgatgactgagaacccctatcacaatgagcccggcctttgaacaggagagacatccaggagacacgcacaaactatactgaatgtatccggcacgagaccatcagagttgccagcctgtgacatgactgcgacaggcaacgtgtcccttgtcctgaaccccctacgacgggtgaa

SEQ ID NO: 71325 - DNA, 1055 bp, Homo Sapiens
  misc_feature (979)..(990): n is a, c, g, or t
tcctaggtagcgaggcctgggtggcgaactcggcacgaggcctggctccgctgcccgggctcccgccctcagccgctgcccacggggccgcgctgcttagccactgggaccccacgctcagctccgactgggacggcgagcgcaccgcgccgcagtgtctactccggatcaagcgggatatcatgtccatttataaggagcctcctccaggaatgttcgttgtacctgatactgttgacatgactaagattcatgcattgatcacaggcccatttgacactccttatgaagggggtttcttcctgttcgtgtttcggtgtccgcccgactatcccatccacccacctcgggtcaaactgatgacaacgggcaataacacagtgaggtttaaccccaacttctaccgcaatgggaaagtctgcttgagtattctaggtacatggactggacctgcctggagcccagcccagagcatctcctcagtgctcatctctatccagtccctgatgactgagaacccctatcacaatgagcccggctttgaacaggagagacatccaggagacagcaaaaactataatgaatgtatccggcacgagaccatcagagttgcagtctgtgacatgatggaaggaaagtgtccctgtcctgaacccctacgaggggtgatggagaagtcctttctggagtattacgacttctacgaggtggcctgcaaagatcgcctgcaccttcaaggccaaactatgcaggacccttttggagagaagcggggccactttgactaccagtccctcttgatgcgcctgggactgatacgtcagaaagtgctggagaggctccataatgagaatgcagaaatggactctgatagcagttcatctgggacagagacagaccttcatggggagcctgagggtttagaccctgctcccatctccccttcccccactcaagagtccccagcagaatccctttnnnnnnnnnnnnagggaattggaaagggcccttttgtattctcccctccaaaaatccgaaatctttcctggcaagag

SEQ ID NO: 71326 - DNA, 1959 bp, Homo Sapiens
  misc_feature (652)..(662): n is a, c, g, or t
  misc_feature (1804)..(1861): n is a, c, g, or t
cttcatttatatacagtcagatataaagacatctctttgactcctgtgcatatatttcctcaactcaagattagggcataaaagtcaggctgctatgccagacatgctctgccctatggcagggccaaggagaggattgtcacttgaaagtgggaacacttaaatggatgacagacaacactggacccacagaccaagagcattcttctaagccctggagtagctcgaggaatggaagagggaaattggaagcagggtcccttttcgatcttcatgtgaagagacccagcctcttcaagggtatccaagataaacttccgttccccaagcccaccaatccctgtccagttcctttgcttcctgccctcccaaataggacattctcctttgtgcccagcccccctttgcacagatcctccaaggggagtcccatgatccacaaggcagagaccttcatagcagagggcagggcaggtacacactatcctctcccttatgcatggctggacactgactgaggccctgcatcacaagaatcgccaatacccactgggagccataacaataaatctggaagtacggggagaacatatcaaaaaggggaaggatggattcccttgatgcccaggattacagggcacctaaagcacannnnnnnnnnnctgagccaaccagctaaaggatcactgcagctaaatacagatagagaagcaacaaagccaggcaaatacccatcagagacagtgacaagagcagctgggggcacgggggaggcggaaggaagagaaagaaggggaggagcctccagagtcccagccccaaccccctctgccattggctacccttgctccccaaaaatccctggggttgaagtgaggaggactacaggctggggtgaaaatacacaaggacagcccaacaaaatacaacaaggactagcatcagtctcccccttactccacccccaagaaaaatacccttattgtgactagtatttatgaaaatctgtaagagactattctatgtagtggctctaatcccatatacacagcagctgcctgtgttgggaacttttcaaatcagtgattgcgggaacaaacagtattttcagcttcttacggtgccatgcaggctttaccaagaccttggttaagtcccagtcacatttactttctgtcttacatctagaaaagggtgaggaaagaggggaggggagaaaggtgctcaggtgctaggtaaagcttactgatcagcagcctagactccaccactgttccttctctttggtctgtctagaacagtgactataaattaggaaaaacaaaattatgctggcctgtgggaaataatgggggaaggaaggcagggaggaaaagggcattgggaagccctgcttcaagactgaagacagacaaatagacaaccacccagactgcttaagtgtcacagacagcccccaccccaagctcccttccaggtatccccataaatcatttgggcacactccctcttggaattgcaatttccatcttccacttatccctaaggagctggccctgtggagaggtgtgttggttgttttgtttttgccaaaggccctcgctctaggtgctcctgtaaaggtaccttggcccctgatacgggatgaatggatgaacgaagccccagatgctccagtgccaaggaggtcagaccgggaacaggcccccactcccacaccctgggatcggagcttgcttggttcttgccatcttgcaggatgacttcgagtctggagggagatacacagtgcctctccatcccnnnnnnnnnnnnnnnnnnnnnnnnnnnnnnnnnnnnnnnnnnnnnnnnnnnnnnnnnncagggtctaaaccctcaggctcccatgaaggtctgtctctgtcccagatgaactgctatcagagtccatttctgcattctcattatggagcctctccc

SEQ ID NO: 71327 - DNA, 977 bp, Homo Sapiens
tgacgtatcctgtgtgctaagagctatgcagcttagctgaggcgcctagattactagatgtgctgtatcacggggaatgaggtgggggtgcttattttttaatgaactaatcagagcctcttgagaaattgttactcatggaactggagcatcaagacatctcatggaagtggatacggagtgatttggtgtccatgcttttcactctgaggacatttaatcggagaacctcctggggaattttgtgggagacacttgggaacaaaacagacaccctgggaatgcagttgcaagcacagatgctgccaccagtgtctctgaccaccctggtgtgactgctgactgccagcgtggtacctcccatgctgcaggcctccatctaaatgagacaacaaagcacaatgttcactgtttacaaccaagacaactgcgtgggtccaaacactcctcttcctccaggtcatttgttttgcatttttaatgtctttattttttgtaatgaaaaagcacactaagctgcccctggaatcgggtgcagctgaataggcacccaaaagtccgtgactaaatttcgtttgtctttttgatagcaaattatgttaagagacagtgatggctagggctcaacaattttgtattcccatgtttgtgtgagacagagtttgttttcccttgaacttggttagaattgtgctactgtgaacgctgatcctgcatatggaagtcccacttcggtgacatttcctggccattcttgtttccattgtgtggatggtgggttgtgcccacttcctggagtgagacagctcctggtgtgtagaattcccggagcgtccgtggttcagagtaaacttgaagcagatctgtgcatgcttttcctctgcaacaattggctcgtttctcttttttgttctcttttgataggatcctgtttcctatgtgtgcaaaataaaaataaatttgggcatgtgcaaaaa

SEQ ID NO: 71328 - DNA, 751 bp, Homo Sapiens
ccttcttttcccaccccctccccctccatgtgaagatttgggtgcttaacatatcatttttttccctgccggaattttagcattgatatgaaccatggacaagtatattctgctgccacaaagactgtaaagtgcttcatttcaacagctgaggcaagccaagtgatcattaataaagcttttcttggttccttcagtggtgttggtagtaaaatggaaggtgtcttgctgcaggtaactaatgaagaagtggtcaaccacagagtcttcaagaaataagaaattctgtaccatctgaaagtagttcttgttggtgccttcatttaaaaagcactctttaaaataaaagggaaatgttttctgataaaacaaacatttagttgaggttcttgatataaaacaattacaaaatgagtgttgtttgtaaaacagtaacatcaaattggctagagagataaatgtatcatgttttaaattaggttttgtgagtagacagattacaattctattttaaatataaagtttataaaataaatactttttgtatccaaatacttggtgtaatgtttacacataaaatgtgtgaatcttgttctataaatatttggttgtctaaaagatcaccatcccctaaatttttaaaagcagtttcacaaagctatgcatattttaatattaacaggtaaatgagaagagcattgtggacattattggctgtccccaataaaatgctgttcattatgcactgtaa

SEQ ID NO: 71329 - DNA, 1149 bp, Homo Sapiens
  misc_feature (397)..(446): n is a, c, g, or t
caatgcaaggaaaggaaataaccccagcgaggtactcttcagggacacaggtctagtacaagagaactcttgacggctactaagttcagccagtcttaaaaaactgtgctgtttctacaaaactttaactacagtagtttataaggatgccaacgaaagctgagggtgtagagcaaaatagttctaagcttcagttaaacttctttaggtaagatcttatttacttttcctttcttaattttcctccctaaaagataaactaatactcttaaatggtctttcagtatagtggttcttacgtagtttaacatagctataaattgagtttaacaatttataaactcaagagaataatttttataaaccctgttttccaatctgtcatttacttaaattnnnnnnnnnnnnnnnnnnnnnnnnnnnnnnnnnnnnnnnnnnnnnnnnnnccatgtgaagatttgggtgcttaacatatcatttttttccctgccggaattttagcattgatatgaaccatggacaagtatattctgctgccacaaagactgtaaagtgcttcatttcaacagctgaggcaagccaagtgatcattaataaagcttttcttggttccttcagtggtgttggtagtaaaatggtaggtaaaagttaggctgcaagttcaataaatcatgagatttcccatcgttacacccttgtgtattcacatttcttggatcaaacattttgagtgaactaggggtttttattaaagacatttgttgtatttatggttgtaactgtacatgcttatcaggatgagactgaaagaaggtagggcaaaaatggttgaatctattttcagatagtagttcatacttgagtgaagtgtcttgtctgcattatgaagcctggtatgtatccagtactaaataggtgggttaaatgtggtaattctagttcagtgtcttaccctgaagagaaagttgtaggttggctgttgaaattcattccttagatatgatcagtttgattgcccggctttattgcctttacaggaatgtgatactcagggcttactctatacaccaatgagtcttctttgatcctaagaccaccactgaagttgttaggttcttttggacaaacatgataaacttcttcagatat

SEQ ID NO: 71330 - DNA, 1756 bp, Homo Sapiens
  misc_feature (796)..(796): n is a, c, g, or t
acacctcagggacctattactggcacatcccaacagggaccacccagtgggaaccccccggccgggcctccccctcacaggggagcagcccccaagaggagtcccagctcacctggacaggttttgctcatggagaaggctttgaggatggagaattttggaaggatgaacccagtgatgaggccccaatggagctgggactgaaggaacctgaggaggggacgttgaccttcccagctcagagcctcagcccagagccgttgccccaagaggaggagaagcttcccccacggaataccaacccagggatcaagtgtttcgccgtgcgctccctaggctgggtagagatgaccgaggaggagctggcccctggacgcagcagtgtggcagtcaacaattgcatccgtcagctctcttaccacaaaaacaacctgcatgaccccatgtctgggggctggggggaaggaaaggatctgctactgcagctggaggatgagacactaaagctagtggagccacagagccaggcactgctgcacgcccaacccatcatcagcatccgcgtgtggggcgtcgggcgggacagtggaagggactttgcctacgtagctcgtgataagctgacccagatgctcaagtgccacgtgtttcgctgtgaggcacctgccaagaacatcgccaccagcctgcatgagatctgctctaagatcatggccgaacggcgtaatgcccgctgcttggtaaatggactctccctggaccactctaaacttgtggatgtccctttccaagtggnaattcccagcgcctaaaaatgagttggtccagaaagttccaagtctattacctgggggaatgtacctgttgctaaacctgttggggtagatgtgattaatggggccctcgagtcagtcctgtcctccagcagccgtgaacaatggaccccaagtcatgtcagtgtggcccctgctaccctcaccatcttgcaccagcagacagaggcagtgctgggagagtgtcgggtgcgtttcctctccttcctggccgtgggcagagatgtccacacgtttgcattcatcatggctgccggcccagcctccttctgctgccacatgttctggtgcgagcccaatgctgccagcctctcagaggctgtgcaggctgcgtgcatgcttcgctaccagaagtgtctggatgcccgttcccaggcctccacctcctgcctcccagcaccccctgctgagtctgtggcacggcgtgtagggtggactgtccgcaggggtgttcagtcgctgtggggctccctgaagcccaaacggctgggggcccataccccatgaagaagcccccaccttccctccacctgcttgtgttgggccccagggaactaaagggtgtgggtcagggaggggtctagaggctattcctaggcctcaggcctcccaaatatgcccctccccagtagctacggttccctgcctaggagctggggagggagagatctaatcccttcaaggaagtgataacactggagtggtaacaagaggagcaggaagcaaggccagccctggttctccatccccatgtgtttcaggtggaacaggaggaactggtccaggccaggcctcatcctcctggacccagcaggggcagaaggaggaagggactggtccaggcatgggtcccttccccctgctccatgggcacctctgctgtattgatatcactaataaagtctgtctgcactgcaaaaaaa

SEQ ID NO: 71331 - DNA, 1109 bp, Homo Sapiens
  misc_feature (824)..(824): n is a, c, g, or t
gtggaccggtccggattcccgggaactttttcctggccttatcctgcaggacagcagcgcagattccttctggaaccccaacgccttcgagacggattccgacctgccggctggatggatgagggtccaggacacctcagggacctattactggcacatcccaacagggaccacccagtgggaaccccccggccgggcctccccctcacaggggagcagcccccaagaggagtcccagctcacctggacaggttttgctcatggagaaggctttgaggatggagaattttggaaggatgaacccagtgatgaggccccaatggagctgggactgaaggaacctgaggaggggacgttgaccttcccagctcagagcctcagcccagagccgttgccccaagaggaggagaagcttcccccacggaataccaacccagggatcaagtgtttcgccgtgcgctccctaggctgggtagagatgaccgaggaggagctggcccctggacgcagcagtgtggcagtcaacaattgcatccgtcagctctcttaccacaaaaacaacctgcatgaccccatgtctgggggctggggggaaggaaaggatctgctactgcagctggaggatgagacactaaagctagtggagccacagagccaggcactgctgcacgcccaacccatcatcagcatccgcgtgtggggcgtcgggcgggacagtggaagagagagggacttgcctacgtagctcgtgataagctgacccagatgctcaagtgccacgtgttttcgctgtggaggcacctgccaagaaacatcgccaccangcctgcatgaaatctgctctaaggatcatgcgccgaaccggcgtaatgcccggctgccttgggaaaatgggactctcccctggaaccactctaaaacttgggggaaggtccctttcccaaggggaaattcccagcggcctaaaaaagtgaagttgggtccccaaaaattccaaagtctattataacctggggggaaatggaccctggttggcctaaaccctggtttgggggggtaataaggggaataattatggtgggggcccctcggggggaccacatctctaa

SEQ ID NO: 71332 - DNA, 1654 bp, Homo Sapiens
  misc_feature (197)..(216): n is a, c, g, or t
atgtgaaaagctctgacatttaacgaactgaccaatagactcaaggactgttttagttggactgggccattttattatgttccttttaatattaacagtacaagagcgcttgctgacttcgaggataactaagattacatactttctcaggagaaggctgcatgcaagacttctctgtcagggttgctcctgtggcnnnnnnnnnnnnnnnnnnnnaaacctatatatggaaaaggaaatttcaatgccagatttgataaaagaatgtgatgtatatgtagctgatgacccactggggaacaccagtgttccagttcacttaccacatctgtgacagtgtgtttagattggaataaatgtgatgcattacttcttatgtttttatcagtgacatggttgactgtgccctaattctcttgagttgcagttaagcaatgaaggttatttcctaatagggaagcaaaaggtgattgtcaattgatagtttaatgtttgaccacattagtgtctttatatgaaatagtagaggggaagaaattatagaaaacaaatgtgaaaaaaatacaccagtgggtatctgttctactaaaaccagaagattgttatgagtacttaaacctcactgtgaaataatgatatattttgcaattaatccctccccaactgagtgtcttactgtgttattaaatcttatcttttagttaatagttgcagtatttcttttaaatgtttttgttttaaacttaggggtaggatcctttatttgttcagttgtttccaactatttgggatactttcattccctgctatttatgaagtacatgtttatcactaagtgtagtggtttggtttacattaataattttatgtgtggtctaaaaatgcagtcactaagagaatgtacactgtggttatggtcacagtggttatggatttattggcagtggagtaccatggaggtcactgcaatggtgctaaggctgacagtggaatcttctgtttagggccttaagcccctgagggtcctggtgactcagggaatccatcacagccccgggtctttcaccccagttcactccttttatgtttggcctagattgacccatgcctgccctcttctcaacagctgagtagggaaccagccatctgaatgagctgatcgttgtttatgttcaaatgagtaaatgtccagaccacttaaaactacagctgcttttctggcagtctcgtctgcggggccaaaacttaataaaccacaggaaatagactgtcattcttagtttgctgccagggcttattttagattgagagcatactggtacatgagagcagtagtgttgtttgctcttattttcaaccagggagctatctggcaccttttgtgctcctggcttttttcaatcatagcactattgcatctcctagctatttcttttgcccagcagggtaatattgagtcccattgcaagtatggacaaggcctctggttctcctcaccacccaccttttcagccatagaacatcactgaaaatgcctaatgcctggatctgtgttctactttagtttcactgggaagtctttcagtgggagatgaataaatgttatacattgttatgtccagttatgtcaataaacccactaatagagataaaa

SEQ ID NO: 71333 - DNA, 1894 bp, Homo Sapiens
  misc_feature (42)..(76): n is a, c, g, or t
gaacgaccgagcgcagcgagtgttgagcgaggaagcggccgnnnnnnnnnnnnnnnnnnnnnnnnnnnnnnnnnnncagtcgacggtaccggacatatgcccgggaattcggccattacggccggggtccaaaacatcatccagacagccgttgaccagttgtacgtacagaagaaacagccaccgaaatgttgacgtctgagttacagacacaagctcacatgataaaagctgacagccaggacgctggacaggaaacggagaaagaaggagaggaacctcaggcctctgcacaggatgaaacaccaattacttcagccaaagaggagtcagagtcaaccgcagtgggacaagcacattctgatatttccaaagacatgagtgaagcctcagaaaagaccatgactgttgaggtagaaggttccactgtaaatgatcagcagctggaagaggtcgtcctcccatctgaggaagagggaggtggagctggaacaaagtctgtgccagaagatgatggtcatgccttgttagcagaaagaatagagaagtcactagttgaaccgaaagaagatgaacaaaggtgatgatgttgatgaccctgaaaaccagaactcagccctggctgatactgatgcctcaggaggcttaaccaaagagtccccagatacaaatggaccaaaacaaaaagagaaggaggatgcccaggaagtagaattgcaggaaggaaaagtgcacagtgaatcagataaagcgatcacaccccaagcacaggaggagttacagaaacaagagagagaatctgcaaagtcagaacttacagaatcttaaaacatcatgcagttaaactcattggtctgtttggaagaccagaatgtgaagacaagtagtagaagaaaatgaatgctgctgctgagactgaagaccagtatttcagaactttgagaattggagagcaggcacatcaactgatctcatttctagagagcccctgacaatcctgaggcttcatcaggagctagagccatttaacatttccctctttccaagaacaaccctacaattttcccttgataaccatataaattctgatttaaggtcctaaattcttaacctggaactggagttggcaatacctagttctgcttctgaaactggagtatcattctttacatatttatatgtatgttttaagtagtcctcctgtatctattgtatatttttttcttaatgtttaaggaaatgtgcaggatactacatgctttttgtatcacacagtatatgatggggcatgtgccatagtgcaggcttggggagctttaagcctcagttatataacccacgaaaaacagagcctcctagatgtaacattcctgatcaaggtacaattctttaaaattcactaatgattgaggtccatatttagtggtactctgaaattggtcactttcctattacacggagtgtgctaaaactaaaaagcattttgaaacatacagaatgttctattgtcattgggaaatttttctttctaacccagtggaggttagaaagaagttatattctggtagcaaattaactttacatcctttttcctacttgttatggttgtttggaccgataagtgtgcttaatcctgaggcaaagtagtgaatatgttttatatgttatgaagaaaagaattgttgtaagtttttgattctactcttatatgctggactgcattcacacatggcatgaaataagtcaggttctttacaaatggtattttgatagatactggattgtgtttgtgccatatttgtgccattcttttaagaacaatgttgcaacacattcatttggataagttgtgatttgacgactgatttaaataaaatatttgcttcacttaaaa

SEQ ID NO: 71334 - DNA, 680 bp, Homo Sapiens
gtattaatgaaaagcacaaaaaaaggaactaagttcagcgaggggtggggcgaggggggagatttttcttttgaaaaataatgactcttaggacatttgtttttcagttcaagtgctcttcagcactgtcttgtctcccaatataccaacccactggcacatttttctcttgttttctctctccgattttgctctgtctcctcagttaagtgtttccttcctttgtgccccccgctggtgaccctctgcttccctctctctttccctttggcagctgcaatacacagtgttattttggggaaataaatctagcaaagcctcgccttccatgccgagcgtcctcttggctctgagagggaaaggtctgtccttgggatgctctctggtcttttttccccctaagtctttctctttcccatcatacccttccctgcccaccttgttttctgttctccttttattaggaattcccaagtgaattttattaatgtgggagtggaacagatgctaaaagctatccaggattttgtttctgtttgttttaaattttgtggttccttccctttcctccccctcccatgcgtaagacgttctgtgtaacctccattaaatttggtacaaaaccactcgccagagctgtggtgtcagaaaaataaaatatattgtttcttacaaaattg

SEQ ID NO: 71335 - DNA, 598 bp, Homo Sapiens
tggtcgagaactactaatttcatgctatttctttctctctccctttgttgttatttgatttgggggaagggagtgaggcttgtgcagatttgagctatctgaagacatgaacagaagtcaaataccagccatatcagtagagccttccattcaaaagtgaacacacttggtagctgaaccatatctgagcagcgtgattctgttgtcttgcatatgttattctctcaggctgtggatctttgttacagctctaggaaactgtagaaatacaatgctatgtagcttttccaccccatggtctctagtgctgcctatcaacttgtccccttttttcccaataacctgtcttccaggtggtacagttagctgtcactcagctgacaccatgatgtggcagcagagagggaaacctacaagtggtttgcctcattgcctttgccacatctgaagttctcagcagcactaccttagacttcatgagctaataggaaactttttatggtgtaaatgctgtaagactttgtacatacttcagttgttatgaaatctttaaagaaacaaacaaaaagttgcgctaataaattgatgtagtgcaggc

SEQ ID NO: 71336 - DNA, 1912 bp, Homo Sapiens
  misc_feature (103)..(103): n is a, c, g, or t
  misc_feature (116)..(116): n is a, c, g, or t
tggaaaaaacagattttacaaatattcttgtatcttatagaagataatctaatgaaagagatttcggttttaagccaagaggattttgaagggattaagaatntagattctataanaaattcaattgcatttttggaagcctggtgttatgaaatgaaaccaaacctcggtgccatcgcagagtataaaaagaaggaagaattgtatttgcaacgggtagcagaattggacaaaattacttatgaaagagacagttttagacaggcatatgaagatcttcggaaacaaaggcttaatgaatttatggcaggtttttatataataacaaataaattaaaggaaaattaccaaatgcttactttgggaggggacgccgaactcgagcttgtagacagcttggatcctttctctgaaggaatcatgttcagtgttcgaccacctaagaaaagttggaaaaagatcttcaacctttcgggaggagagaaaacacttagttcattggctttagtatttgctcttcaccactacaagcccactcccctttacttcatggatgagattgatgcagccccttgatttttaaaaatgtgtccattgttgcattttatatatatgaacaaacaaaaaatgcacagttcataataatttctcttcgaaataatatgtttgagatttcggatagacttattggaatttacaagacatacaacataacaaaaagtgttgctgtaaatccaaaagaaattgcatctaagggactttgttgaactttatgctgaagattcttcaagttgattcagtgtattactgatttttttctatttgtaaaggattatgagttgtataaaatacatactccctaaactagatcatgaaactggtttctgttttatgcagttgtcatttgtaaagtctaataaaatattctctataattgcttctagattacaaaaatatgacaatcttgtaagtagcagactatggagaaaaatgagttacctggagggtcaggtaacttgccaaactaaaaagtatgttagttgaggcaaagtcctaagcaaggttgtgctatcaaggctcagcataccttcgtgggcctttgatttaccaacactggaaatgcctgccaactaatctcggatagattctttaaggcattccacttagcttgccagttgagacaatcaccacagttattacccaaatactatgaacatatttttgtaaaccagtcattctgaattatagtgatgagaatttaaatatatgcttttctagaatttgatgtttgaccatttatgacttaattaccagagagccagtaaattaggacagtgtttcaacaagcctaggctatctcgtaagttgaaaaatatcccactatagttgcttcatgagtatgaagtaagatggcctctgatttacactggttcaatttacaaattttcaactttatgataggtttatcagggtactaaatgcatttcaacttgatagtttcaacttatgataggtttaccaggatgtagtcccactgttgaggagcatctatttaggggttaattactttagtaataagtggaaagtaagataccttgagtaatgtttgcctataaaattgtcagcgtatttttacactattggctcaagaatgttataatgctaagggacataagttggcaaccacttggtttttggaaggactttcggtattgtattagaagtctgccctagctgttaaatttctgggtatttatcctaaggaattaattaaagagttaattgttcctttcttcagtgggccattgttttagatatttaaaaaatccaacagtttctatcataatgtaactgtaaaaatgtaaacacattattagcatggacttttaaataaagatttaaagaaagcaaa

SEQ ID NO: 71337 - DNA, 747 bp, Homo Sapiens
caggaagaaggccatctcaggacatgatcctcagggccctgcacatccaatctgaaggtgaccctggcctggctgaagctggaagagctgtggggactcagcctgtaaacagagcgtaaggttcacatgctggttgcttaatccgtttctggaggaagagtatgacacccacttgtgatggggtccttgtgcggtggggaccggggccggcgggctccaggccagcacacctaacccatggatgtggaacctacggccgagaaggaatgttgcatgagtcggatcccagtccattgtcagtggagggtgagggtgaccccatctgctatttttgtgctcatcctcatacaaccatttggggatgtgcctattagggctccgtaagaactcagatgcctgggaagcccagcccctcaggtgcccccacacacagccttcccttgacgcctacatttctaggcacatgtgaggcatctttcctggagccccgagccagccctgtccctccccagtgcagcatggcactcaggagatacaggctggacatggggcagtcgttctggggaggcctggcctagcagccacccacctgagccctcccggccaggcttcgtgctggggtgggccatgtgccaggacaggagggtcccggcggaaagccagccccggactcatcgtgacattgagatcccactggagggtaggggtggtaataaacttctccaaacgatcgttgtcattttagac

SEQ ID NO: 71338 - DNA, 1124 bp, Homo Sapiens
aaaagcaggctggtaccggtccggtattcccgggatatcgtcgacccacgcgtccggacagtcatggcggcccggcgcggggctctcatagtgctggagggcgtggaccgcgccgggaagagcacgcagagccgcaagctggtggaagcgctgtgcgccgcgggccaccgcgccgaactgctccggttcccggaaagatcaactgaaatcggcaaacttctgagttcctacttgcaaaagaaaagtgacgtggaggatcactcggtgcacctgcttttttctgcaaatcgctgggaacaagtgccgttaattaaggaaaagttgagccagggcgtgaccctcgtcgtggacagatacgcattttctggtgtggccttcaccggtgccaaggagaatttttccctagactggtgtaaacagccagacgtgggccttcccaaacccgacctggtcctgttcctccagttacagctggcggatgctgccaagcggggagcgtttggccatgagcgctatgagaacggggctttccaggagcgggcgctccggtgtttccaccagctcatgaaagacacgactttgaactggaagatggtggatgcttccaaaagcatcgaagctgtccatgaggacatccgcgtgctctctgaggacgccatccgcactgccacagagaagccgctgggggagctatggaagtgacccaaggctgcccactggagacgcctctccctgcagtcccccgagaggtgggagactcgcggaaggccccgtccccagcggagtccagaccccacaacttcaggagctctttcccggcagcagagatctgcaggctgcctcttctgccccggagctggggtgcactggggacccccgtggtggggaccttggcagtgtggacatgagcagagcgatggagcagtctcctgccctctcccctgtcctgatggcactctgttgtattttcttactgaagttcagtgataactctgagcagtttcattgtgatcactgtaaatggtaatcagttggaattctcctaaatgtcttccagacactagtaaaaaacgacctgaaaattcctctccaccctgccgagcccgttcaccttgcttggcggc

SEQ ID NO: 71339 - DNA, 1006 bp, Homo Sapiens
  misc_feature (188)..(188): n is a, c, g, or t
  misc_feature (210)..(210): n is a, c, g, or t
ccgctcttgtgttgatgtgacgatacattcacacagaacagtagacagatccgattatcgactcctttgggattgccctcggccaggaatggcagaggcgaccgcacgcctggaccagagcagcggaccgttgccatgcagtgcggcgcccacgctgaatctgacatgctccgtctgcgcgcatggcnaggaaatgcgcgagccggagcntgccctggtccccccggcgccctggcgggcagccccacggagctccagttccgcaggtgtatccaggagttcatcagcctccacctggaagagagctaggcccggcagccgggcagctgccaccccgcccggccggaacgccccgcatgccccgaagtccctggcgcccacccggccgcggccctgcgtgtgacccgcgggtcgatacctggcagccccagtgctggggcgccgcggccctgctcgcccaggaggagagcgagggccccacactgagtctcttgaagcctcacgtttccctgggggggtgctgcatcgtcgggtgtccctcaccccacctggggaacctctgtcttcaggtcaccccttttcaggggcctgggttgctcatgtcacaagccacttttaaggcccgtgtcacctgtgtccctgtgtcctcagggcctgtgttacttcgtgccccacttctgcccagaacactgacctgttagctggctccctcctgcacaccccagagcctcctcccagggcagaaagggtggcccatccagggaaccaacgagtacctcacttagtgaccccagcatccaggctggcgtcgcgggtgctgggcgggaggggctctggcctgggtcctcagccctggctggacgcgggcgtcccaaggccacgtggctggccacgaaggtccccgtgccagacagccccagccgcatcccggcctcctccggaggcaccttctcctggtactcggcccagagcctgcgcataaagccactttgccactttgcaaaaa

SEQ ID NO: 71340 - DNA, 2055 bp, Homo Sapiens
  misc_feature (1689)..(1763): n is a, c, g, or t
ccgagcgtggttggactttgaaggggatcggccgccatgctgcatcccctttttggaattgctcaaccaggtggtaaccggcgccgcttcctggccttgggaggtggttcctttcttaacccacaagaacctctcccaagagaacttggtcctgatgtctgaccatggagatgtgagcctcccgcccgaagaccgggtgagggctctctcccagctgggtagtgcggtagaggtgaatgaagacattccaccccgtcggtacttccgctctggagttgagattatccgaatggcatccatttactctgaggaaggcaacattgaacatgccttcatcctctataacaagtatatcacgctctttattgagaaactaccaaaacatcgagattacaaatctgctgtcattcctgaaaagaaagacacagtaaagaaattaaaggagattgcatttcccaaagcagaagagctgaaggcagagctgttaaaacgatataccaaagaatatacagaatataatgaagaacgagacgaaggaagcagaggaatcggcccggaacatggccatccagcaagagctggaaaaggaaaaacagagggtagcacaagcagaagcagcagcaatcggaacaggaacagttccatgccttcgaggagatgatccggaaccaggagctagaaaaagagcgactgaaaattgtacaggagtttgggaaggtagaccctggcctaggtggcccgctagtgcctgacttggagaagccctccttagatgtgttccccaccttaacagtctcatccatacagccttcagactgtcacacaactgtaaggccagctaagccacctgtggtggacaggtccttgaaacctggagcactgagcaactcagaaagtattcccacaatcgatggattgcgccatgtggtggtgcctgggcggctgtgcccacagtttctccagttagccagtgccaacactgcccggggagtggacacacgtcccaattctctgtggaaaactgatgaggaatgaatctaccatcacccatgttctcatccccaagcaaagtgctgggtctgattactgcaacacagagaacgaagaagaacttttcctcatacaggatcagcagggcctcatcacactgggctggattcatactcaccccacacagaccgcgtttctctccagtgtcgacctacacactcactgctcttaccagatgatgttgccagagtcagtagccattgtttgctcccccaagttccaggaaactggattctttaaactaactgaccatggactagaggagattcttcctgtcgccagaaaggatttcatccacacagcaagaatccacctctgttctgtagctgcagccacgtgactgttgtggacagagcagtgaccatcacagaccttcgatgagcgtttgagtccaacaccttccaagaacaacaaaaccatatcagtgtactgtagccccttaatttaagctttctagaaagctttggaagtttttgtagatagtagaaaggggggcatcacctgagaaagagctgattttgtatttcaggtttgaaaagaaataactgaacatattttttaggcaagtcagaaagagaacatggtcacccaaaagcaactgtaactcagaaattaagttactcagaaattaagtagctnnnnnnnnnnnnnnnnnnnnnnnnnnnnnnnnnnnnnnnnnnnnnnnnnnnnnnnnnnnnnnnnnnnnnnnnnnnttcctctcagctatccttctaatttctctctaatttcaatttgtttatatttacctctgggctcaataagggcatctgtgcagaaatttggaagccatttagaaaatcttttggattttcctgtggtttatggcaatatgaatggagcttattactggggtgagggacagcttactccatttgaccagattgtttggctaacacatcccgaagaatgattttgtcaggaattattgttatttaataaatatttcaggatatttttcctctacaataaagtaacaattaactt

SEQ ID NO: 71341 - DNA, 416 bp, Homo Sapiens
  misc_feature (146)..(146): n is a, c, g, or t
cccacatgtctccacctccccgggcagtgttggcactgggccaactggaagaaactgtgggcacagcccgccaggcaccacccacatggcgcaatccatcgattgtgggaactgtaaaggagaaaggagaatagtctgcgaccacntgagccctgcctcctcaagcagacctcacagccagcagccctggaggagcaacattaagccactgggattcccccaacttcaggcagatctggtactcagatgcagagactactacttttatcttgaagtcagtctgtgctgctctgaagcttttagatgggcaacaatgaaagtgaagacccacctttactgtgtctttcttttcaggaatgacagcagatttgtaatctcgatgttttggtagtttctcaataaagagcctaaggaaa

SEQ ID NO: 71342 - DNA, 777 bp, Homo Sapiens
gctggtacgcgtccggtttcccgggatatcgtcgacccacgcgtccgaaaggatttcatccacacagcaaggatccacctctgtgctgtagctgcagccacgtgactgttgtggacagagcagtgaccatcacagaccttcgatgagcgtttgagtccaacaccttccaagaacaacaaaaaccatatcagtgtactgtagccccttaatttaagctttctacgaaagctttggaagtttttgtagatagtagaaaggggggcatcacctgagaaagagctgattttgtatttcaggtttgaaaagaaataactgaacatattttttaggcaagtcagaaagagaacatggtcacccaaaagcaactgtaactcagaaattaagttactcagaaattaagtagctcagaaattaagaaagaatggtataatgaacccccatatacccttccttctggattcaccaattgttaacatttttttcctctcagctatccttctaatttctctctaatttcaatttgtttatatttacctctgggctcaataagggcatctgtgcagaaatttggaagccatttagaaaatcttttggattttcctgtggtttatggcaatatgaatggagcttattactggggtgagggacagcttactccatttgaccagattgtttggctaacacatcccgaagaatgattttgtcaggaattattgttatttaataaatatttcaggatatttttcctctacaataaagtaacaattaacttaaaaa

SEQ ID NO: 71343 - DNA, 847 bp, Homo Sapiens
  misc_feature (747)..(787): n is a, c, g, or t
ggacgccagtcaccagcaggagcagccaaccagcagcagccatcatggaggcgctggggctgtggagatccggagtcgccacagctcctaccccgcggggacggaggacgacgaagggatgggggaggagcccagcccctttcggggccgctcgcgctcggcgccccccaacctctgggcagcacagcgctatggccgcgagctccggaggatgagtgacgagtttgtggactcctttaagaagggacttcctcgcccgaagagcgcgggcacagcaacgcagatgcggcaaagctccagctggacgcgagtcttccagtcctggtgggatcggaacttgggcaggggaagctccgccccctcccagtgaccttcgctccacatcccgaaactccacccgttcccactgccctgggcagccatcttgaatatgggcggaagtacttccctcaggcctatgcaaaaagaggatccgtgctgtctcctttggagggagggctgacccagattcccttccggtgcgtgtgaagccacggaaggcttggtcccatcggaagttttgggttttccgcccacagccgccggaagtggctccgtggccccgccctcaggctccgggctttcccccaggcgcctgcgctaagtcgcgagccaggtttaaccgttgcgtcaccgggacccgagcccccgcgatgccctgggggccgtgctcactaccaaatgttaataaagcccgcgtctgtgccnnnnnnnnnnnnnnnnnnnnnnnnnnnnnnnnnnnnnnnnngaccgcgtatgcggccgcaagcttattccctttagttgagggttaattttagcttggcac

SEQ ID NO: 71344 - DNA, 1094 bp, Homo Sapiens
  misc_feature (44)..(78): n is a, c, g, or t
aactagaacgagcgcagcgagtcattgagcgaggaagcggccgnnnnnnnnnnnnnnnnnnnnnnnnnnnnnnnnnnncagtcgacggtaccggacatatgccctgggaattcggccattacggccgggggtgctggagggaggcggcaggcccgggtcaggggcctcgagatcgggcttgggcccagagcatgttccagatcccagagtttgagccgagtgagcaggaagactccagctctgcagagaggggcctgggccccagccccgcaggggacgggccctcaggctccggcaagcatcatcgccaggccccaggcctcctgtgggacgccagtcaccagcaggagcagccaaccagcagcagccatcatggaggcgctggggctgtggagatccggagtcgccacagctcctaccccgcggggacggaggacgacgaagggatgggggaggagcccagcccctttcggggccgctcgcgctcggcgccccccaacctctgggcagcacagcgctatggccgcgagctccggaggatgagtgacgagtttgtggactcctttaagaagggacttcctcgcccgaagagcgcgggcacagcaacgcagatgcggcaaagctccagctggacgcgagtcttccagtcctggtgggatcggaacttgggcaggggaagctccgccccctcccagtgaccttcgctccacatcccgaaactccacccgttcccactgccctgggcagccatcttgaatatgggcggaagtacttccctcaggcctatgcaaaaagaggatccgtgctgtctcctttggagggagggctgacccagattcccttccggtgcgtgtgaagccacggaaggcttggtcccatcggaagttttgggttttccgcccacagccgccggaagtggctccgtggccccgccctcaggctccgggctttcccccaggcgcctgcgctaagtcgcgaagccaggttttaaccgttgcgttcaccggggaaccggaaccccccgcgaaggcccctggggggccgtggctcacctaccaaattgttaattaaaggcccgcgttctggtgccggcc

SEQ ID NO: 71345 - DNA, 943 bp, Homo Sapiens
  misc_feature (398)..(433): n is a, c, g, or t
gcagatggctcagcagaggcctggcagatctgcaaggcacaggaatagtgaatgcttgtggtagtgtgagggagagggccccagtgtcatccaccatggagggcgagctggaggctccagcccatggaagcaccaaagccatatgcactcctgggtgacctggggccgcaatgccctcgtcatttgtacagtgtcttacggtttataaagagctttcccagccatcttttatttgtacaatttccctgagaggctactatcctcccttgagagatgaagaaactgaggcccagccaggtaagacagcaggatcaaggtcgcagagctggggctcagacagagacttctgactccagttggtgcaccttccgaagtaccatggctgtcagtcaccttcnnnnnnnnnnnnnnnnnnnnnnnnnnnnnnnnnnnngtggaggaacagggctcagactggatgccctgagttttgtcgacattggggtttcctgcaggcaggtggggcacggtggtgagtgctgagggctgttgagggcccgcgctgactgtgctgtggctgcaggctcgctgtccgaggggcctttgtgggggcctcgctgctctttctgctggtgaacgtgctgttgttgctgtgctctcccatcggcggccggggcacagccctgggccctgctgcttgtccgcgtcctggtgagcgactccctgttcgtcatctgcgcgctggtctcttgctgcctgcctctgcctcgtcgccaggcgggcgccctcccactagcatctacctggaggccaaggtagggctgcagcactgatgccccaggtgtctttggggtctctccgggcagcgggtctcaaggtgttagacggaagcttgggagcccttctctccctgagggtcctctgttgttacctgtgccaggggacctgtgtgtccaggcggccc

SEQ ID NO: 71346 - DNA, 1844 bp, Homo Sapiens
  misc_feature (48)..(49): n is a, c, g, or t
cgaggccagggagtcctctccttgggcctctgcatccccccatccttnnggctctggggtaggcccagggaggagacacccccaacccctatccggtctgtcctggagaaaagagactgcccttccatgcccctgagtgaggggcctggggcccaggctgcctgtgttccccaagggcaagggtctctctgttgaggaggaggggcctgtcagccacaacttctttcctcctgagcgccccatctccctctctgcaccctgcaattcccacccctccgtatttatttccctggtcccgccgacagtccctccttgtctgtctccgggattcaggcctccctccctgacatggagagtaacctgtctggcctggtgcctgctgccgggctggtgcctgcgctgccacctgctgtgaccctggggctgacagctgcctacaccaccctgtatgccctgctcttcttctccgtctatgcccagctctggctggtgcttctgtatgggcacaagcgtctcagctatcagacggtgttcctggccctctgtctgctctgggccgccttgcgtaccaccctcttctccttctacttccgagatactccccgcgccaaccgcctggggcccttgcccttctggcttctctactgctgccccgtctgcctgcagttcttcaccttgacgcttatgaacctctactttgcccaggtggtgttcaaggccaaggtgaagcgtcggccggagatgagccgaggcttgctcgctgtccgaggggcctttgtgggggcctcgctgctctttctgctggtgaacgtgctgtgtgctgtgctctcccatcggcgccgggcacagccctgggccctgctgcttgtccgcgtcctggtgagcgactccctgttcgtcatctgcgcgctgtctcttgctgcctgcctctgcctcgtcgccaggcgggcgccctccactagcatctacctggaggccaaggggaccagtgtgtgccaggcggccgcgatgggtggcgccatggtcctgctctatgccagccgggcctgctacaacctgacagcactggccttggccccccagagccggctggacaccttcgattacgactggtacaatgtgtctgaccaggcggacctggtgaatgacctggggaacaaaggctacctggtattcggcctcatacctcttcgtgtgacggagctactgcccaccaccctgctggtgggcttcttccgggtgcaccggcccccacaggacctgagcaccagccacatcctcaatgggcaggtctttgcctctcggtcctacttctttgaccgggctgggcactgtgaagatgagggctgctcctgggagcacagccggggtgagagcaccagtatgtcgggcagtctaggctctgggagctggtatggtgccatcgggcgtgagccgggctggtatgggggcagccagacgaagaccactcctctgctcttctcccaggtgccaggaccaggcggccaccaccacagtctctactccaccccaccagacgtgatccctttccctcccccacagaatacccaggccccagtccccctcaccctaggcccctgtgccaagtttgtctgccgcttcttgcccaggatcctgggggtcgtggctaccccctcctctggccggctccttgctgctcctgtcatagtgagcttgtgccgtccccctaggatggggggcatggccctggctgccagatgcccacagcaccctggcatgacctgccacctctgcttccacaccggagccagctacctctcctgtgcctgccactcaataaacagtgtctgcgccccacaaaa

SEQ ID NO: 71347 - DNA, 697 bp, Homo Sapiens
ggaagggaatctgggtcagccctccctccaaaggagacagcacggatcctctttttgcataggcctgagtggaagtacttcgcgcccatattcaaggatggctgcccagggcagtgggaacgggtggagtttcgggatgtggagcgaaggtcactgggagggggcggagcttcccctgcccaagttccgatcccacacaggactggaagactcgcgtccagctggagctttgccgcatctgcgttgctgtgcccgcgctcttcgggcgaggaagtcccttctggtggagggagaaaagggttacatgagttagattaccatggcagctcgagccaggctctccacttccgtgagccttcctctaagtgagatcgggggggagataatgaaggccacaactcccaggaggctccaacgccgggcggtcagggacgctcgcgaggacgcatgggcaccccaggaatgggaactggttagatcccaggaactccgtgccggaagacgggaagagaggatgcctagggccctacaatggaaaggacagagctggagacctagcaaccagaagatgagaccgcaattcgagaatcaaaggggccgggagcgatggcctcccatccctgacatggagagtaaactgtctggcctggtgcctgctgccgggctggtgcctgcgctgccacctgctgtgaccctg

SEQ ID NO: 71348 - DNA, 927 bp, Homo Sapiens
aaagcaggctggtaccggtccggaattcccgggatatcgtcgacccacgcgtccgcacactgaaatgcatcccactccaggagaggaattcttagcgtaacactctaaataaatggaaggaatcatcaccttccttattttacccctgccttgttcaccaggctgcccagtgcttaccatgcagaaagcagtcagctgtactctggaagttctgttcttctttcctggggcttaggatattctgggagctgtctgagccttgtgcctaaggcttatcaggtgatataatcttcctgttctgggctgcttgctggaggaataggaagtgacatttataagacacaggcggtgtgagcatccatgtgtggtcttggtctaaaccagctcttgaacaggttaaagcaaacagcaataacaaaacaaaaactactgatgctgagcgttttgatcctagtaatatttcaaatattgtccttctgcatatgttctatccatatttgattccaatatacattattaagctttcttgggtactattttgctggggctcttgcgtgaaggtggtacctgtctcatgatccttaaaagagagaggcttttttcatccaaagctgtagtgttgggaactggggtgggagaggcactttttggaattctgaaagaatcatatctgtgtatatacatactgagtggggaaggatgggggttggcaggggttgagggaggtgggaacaaacagtgagtatgggaacaggcagtcacctcgagtgtgggaggtcacctgggtccgtcgtcttccttctgtatggtgttgggtttatgtacacactataacacttcctgtgtgagttcatgtacctgtctgtgagtgctttggtgtattgagcctcagtacactccaagggcattaaagtcaagaactagaaa

SEQ ID NO: 71349 - DNA, 641 bp, Homo Sapiens
agctctggtaacgccgtgcggcgggccagctgggctgcccggttcccagctgctgcggaggcaggctgagggcgcagggcctgccgagtgctgtgcacggaagaaacaaagacatcccggcccaaggcgcagcgggagcgcacaggtgccccgcggcccagccgggggataacgcagggcggtcttctgctccatgctcttcctcgggtcaaagcggaccaactaacgcctaaacctcggtattagccagccgcgcagaggatgccgagcactttccgggagcaatcggactcctggtctcctctggggatgcttcgcggtctgttatcgcgtcaggaggaaagaattgctccaaaaatctgcacgcggagcgaaacagtttgaaagggactgaggctcacccaggtctccagcaaacggaggactgaactggggagagtcaccctgagccagcccttccctggactgccggaatcccagcattagcttcctgctgaatgtagtatttggcattctctgaatttatttcctctccttcccccacccagctttctttttatggcccccagggggagggggagagagcaaggagatcggtatctttgtaataaaactgcaattttataaatttttcatttgat

SEQ ID NO: 71350 - DNA, 589 bp, Homo Sapiens
acacagcagagtattggtgctgctgaagcccagaaggaaggtcagaagggagccaacatgttcatctaccacctgccccaggagtttggtgatcaggacctgctgcagatgtttatgccctttgggaatgtcgtgtctgccaaggttttcatagacaagcagacaaacctgagcaagtgttttggttttgtaagttacgacaatcctgtttcggcccaagctgccatccagtccatgaacggctttcagattggcatgaagcggcttaaagtgcagctcaaacgttcgaagaatgacagcaagccctactgagcgtgctcccctctgagactggagtgagagggtcttctggtagctggtggtgttggattatcccattgaagctgggacagctgttcctttctcatagtgataacttgggtctgttgtcctctaaggaacgtgaaacatacacttcttaagctgaaccacgtaaacttgaaattctgcgcactgggagaaatgtgtcctgtgtttcaaaggataaaactgttctaaaggcttccagggtcatgatgggattttttaaataaatgcaaaaaataaaaat

SEQ ID NO: 71351 - DNA, 1228 bp, Homo Sapiens
ccccgaggtagtcggcgagggcaaaaagcaggcggcataccattacgagctcccccagccagcagtcagtattggatcggccttgcctggctggtggcaggttgggagaaacagccaaagaggttagtttatttcaacaccaaattagaccatggcccatttccaacgggtctctttaaaggcctctatggaatacattgcctggtttccttctttgcagttcaccacagcaaggaatgtcacctccatcccaagccaccattttctcatgaaggcaaatccaagaagggcttgcagttcttgctgaagggggtaccatttgtgggcagagtgatcaataccatctagttgggggaggaggagcttatttcttggtgtacttgaatcagaaggtccctgcaagccagtatgcttcatttgccagtggccagaaattctcccttgcctccttgattgaggtgtcccagatgtagtattcccacaggggtctggcaggcccctcctgtaaccactccagtcacattttctgctcttgaggcagaggtgacatcaggacgtttacagcctccacatgaattgagtgttcatttacctcagtattaccgtgttcatttttgtcctcgtgctacagttagctccctgccgcctcttgcaggtcttacttcagctcttgcctgtgacccacacagcttctgggctctgcctctgctctaagaagtgctgtgggggtagagaaccaggaaggacatgctgttgggaatgtacacctgggcagaggtggccctgttaagatgtgactgtagccacagccagggatgggatccctgggtctctggaatctgaaacctcaacaaataccagtcttgacccctagcagcagagataagaataaaggggttggtttgctattaagtcagatgggggctctctccttgtcatgctgtccctgtgggtaacagacagggattgaccatcttactgttgtacaggtagctggtggtgttggattatcccattgaagctgggacagctgttcctttctcatagtgataacttgggtctgttgtcctctaaggaacgtgaaacatacacttcttaagctgaaccacgtaaacttgaaattctgcgcactgggagaaatgtgtcctgtgtttcaaaggataaaactgttctaaaggcttccagggtcatgatgggattttttaaataaatgcaaaaaataaaaata

SEQ ID NO: 71352 - DNA, 848 bp, Homo Sapiens
  misc_feature (572)..(572): n is a, c, g, or t
  misc_feature (580)..(722): n is a, c, g, or t
  misc_feature (724)..(724): n is a, c, g, or t
  misc_feature (732)..(733): n is a, c, g, or t
  misc_feature (737)..(737): n is a, c, g, or t
  misc_feature (743)..(746): n is a, c, g, or t
  misc_feature (749)..(750): n is a, c, g, or t
  misc_feature (753)..(763): n is a, c, g, or t
  misc_feature (782)..(793): n is a, c, g, or t
attttttaatggggaaaataggccttttaaatattattgccagggtctgcaatataacttaaaattcctgtacatactgcaaatatttctttaaattgcacaggaaaatgagcgaactttttatttcttaatatctttggcaaaaaactttaaccagtaagcaattttataaccctgagggatcatcaaagatactatcctgattcctggtaaggaaaaatatattatttccttataacaaggcaaggagaaatgctattttattcctgataatttatataactagaataatttttttcctttcttttatggacctaaatctgccaattgggaattttgtgcatgaaatatgaagttactttttatagataatcagtgcttttaagtccctaaaaggctcctgctgaagtaatgatgatgttaataataaaagcctttgaaaggctgaaaacctacatagtggtaccatagtatttggagcttctataggagtggagaggggcagctcattgttgagagttgcatgctgcaacctaatggtcagcaatgaaataaatacttgtagaatgttncaaaaaannnnnnnnnnnnnnnnnnnnnnnnnnnnnnnnnnnnnnnnnnnnnnnnnnnnnnnnnnnnnnnnnnnnnnnnnnnnnnnnnnnnnnnnnnnnnnnnnnnnnnnnnnnnnnnnnnnnnnnnnnnnnnnnnnnnnnnnnnnnnnncncccccccnncccnccaacnnnnccnnccnnnnnnnnnnncccttgtgggcgccgcctnnnnnnnnnnnnagaaaagatttttctacaaaaaccctcttcttgtgggcgcccgcgcgcgcccccc

SEQ ID NO: 71353 - DNA, 1012 bp, Homo Sapiens
ctaggtacacgtcggttttccgggatatcgtacgaccacagcgtacagcggaagcgcagagctccgctggtgccacgtttatccccttacatcctcctaggacccggtcggtagtcgtcgccccagcccgccgggggcgcagcgcccgagccgcggccctcgagacgggaccgagagcatcatgggcagcactgtcccgcgctccgcctccgtgctgcttctgctgctgctcctgcgccgggccgagcagccctgcggggccgagctcaccttcgagctgccggacaacgccaagcagtgcttccacgaggaggtggagcagggcgtgaagttctccctggattaccaggtcatcactggaggccactacgatgttgactgctatgtagaggacccccaggggaacaccatctacagagaaacgaagaagcagtacgacagcttcacgtaccgggctgaagtcaagggcgtttatcagttttgcttcagtaatgagttttccaccttctctcacaagaccgtctactttgactttcaagtgggcgatgagcctcccattctcccagacatggggaacagggtcacagctctcacccagatggagtccgcctgcgtgaccatccatgaggctctgaaaacggtgattgactcccagacgcattaccggctgcgggaggcccaggaccgggcccgagcggaagaccttaatagccgagtctcttactggtctgttggcgagacgattgccctgttcgtggtcagcttcagtcaggtgctactgttgaaaagcttcttcacagaaaaacgacccatcagcagggcagtccactcctagccccggcatcctgctctagggcccctcatgccccaggctggagcagctctcctaggtcacagccctgctgggctgggtcgcgtagccccagggggggaggcaagaaacaatgcctgctgtgggaagccccctttgcccttttcatggcccaatgcctttgattccttggcaccctca

SEQ ID NO: 71354 - DNA, 1397 bp, Homo Sapiens
gggtccggaattcccgggatggtcggtagtcgtcgccccagcccgccgggggcgcagcgcccgagccgcggccctcgagacgggaccgagagcatcatgggcagcactgtcccgcgctccgcctccgtgctgcttctgctgctgctcctgcgccgggccgagcagccctgcggggccgagctcaccttcgagctgccggacaacgccaagcagtgcttccacgaggaggtggagcagggcgtgaagttctccctggattaccaggtcatcactggaggccactacgatgttgactgctatgtagaggacccccaggggaacaccatctacagagaaacgaagaagcagtacgacagcttcacgtaccgggctgaagtcaagggcgtttatcagttttgcttcagtaatgagttttccaccttctctcacaagaccgtctactttgactttcaagtgggcgatgagcctcccattctcccagacatggggaacagggtcacagctctcacccagatggagtccgcctgcgtgaccatccatgaggctctgaaaacggtgattgactcccagacgcattaccggctgcgggaggcccaggaccgggcccgagcggaagaccttaatagccgagtctcttactggtctgttggcgagacgattgccctgttcgtggtcagcttcagtcaggtgctactgttgaaaagcttcttcacagaaaaacgacccatcagcagggcagtccactcctagccccggcatcctgctctagggcccctcatgccccaggctggagcagctctcctaggtcacagcctgctgggctgggtcgcgtagcccagggtggaggcagaacgatgctgctgtggtagccctttgcctttcatgcccatgcttgattcttgcacctcagcagctgaaggtctcagagaccagtaatcagaaggcatccgactgcattaagtgtgcagcgctgaaaagacatttacaactaggccagggattagccactgtgggagggtggacaggcaatggttcagtggcctggctgttggcaggaactccaagtgcccaggcctcttgggcagcttagggccctgcctctgtttcatgatgcatgggtcatttgtcttgggtgtcctatcccatatggagaagaaaggggctctaagttctggctcttctttctttggggttctctgtacctgaggaaaccaggccctgggtgactttgcagatctgctcaccctcggtgagcaacagtgtcagccatgcaagcaggacagaatggtgactgggtgcccttggtgagctgtgtatttcctaggaggtagaaaactgtgggaaactgtggctaataaaaactaagtgtgagcgtcctggaaaaaacatacataaaa

SEQ ID NO: 71355 - DNA, 654 bp, Homo Sapiens
cacagaaacattagatttaagctgcactttagaccaaatggacctaacagatattttcagaatatttcatccagcagcagcagaatacacaatcatctcatcaacacatggaacattctccaggatagaccatatgttaggacacaaaacaaggctcaacaaaattttaaaaattaaaatcatatcaagtatcttctcagaccacaatggaataaaacttgaaatcaataagaagaagaaatttggaaactgtacaaatacatggacattaaacgtgctattgaatgatcattggatcaatgaagaaattaagatggatatcaaaaaatttttttaaacagaaaatggaaacacatcatgcaaaacctatgggatacagcaaaagcagtactaggaggaaagtttatagcaataaatgcctacaccaaaaaagtagaaagatttcaaataaacaacctaatgatgcacctcaaggaactcaaaaagcaagaacaaaccaaacacacaattagtagaaagaaaaaataataaataacatagcagaaccaaatgcaacagagacaaaaaagaaatgcaaagaatcaacaagataaaagttggttttatatgaaaacccaaccaaaattgataaaccactagtgaggctaaccaaaa

SEQ ID NO: 71356 - DNA, 2889 bp, Homo Sapiens
  misc_feature (65)..(128): n is a, c, g, or t
  misc_feature (1728)..(1812): n is a, c, g, or t
  misc_feature (1899)..(1899): n is a, c, g, or t
  misc_feature (2808)..(2819): n is a, c, g, or t
gggtccggaatttccgggatgtcccatccgagcgtggactggcggcaggatgttcagctggatgnnnnnnnnnnnnnnnnnnnnnnnnnnnnnnnnnnnnnnnnnnnnnnnnnnnnnnnnnnnnnnnnggctgcgctcgctctacctgcgcaaggtgctgccgctggaggaggcgtaccgcttccacgagttccactcgcctgcgctggaggacgccgacttcgagaacaagcccatgatcctgctggtgggccagtacagcaccggcaagaccaccttcatcagatacctactggagcaggatttcccaggcatgaggattggtccggagcccaccacagactccttcatcgccgtgatgtatggagagactgagggcagcaccccagggaatgctttagtcgtggaccccaaaaagccgtttacaaagctcagtcgctttggaaacgctttcctgaatcgattcatgtgctcacagctccccaatcaggtcctgaagagcatcagcgtcatcgacagccccggcatcctttctggggagaagcagcgcatcagccgaggctatgacttctgccaggtcctgcagtggtttgccgagagggtggacaggatcatcctgctctttgacgctcacaagctggacatctcagatgaattctcagaggccatcaaggcctttccggggcccaggacgacaagatccgtgtcgtgctgaacaaggccgaccaagtggacacgcagcagctgatgcgggtctacggggccctcatgtggtccctaggcaaggtcatcaacacgcccgaggtactgcgcgtctacattggctccttctgggcgcagcccctgcagaacacggacaaccgccggctcttcgaggctgaggcccaggacctctttagagacatccagagcctcccccagaaggcagcggtgcgcaagctcaacgacctcatcaagcgagcgaggctggccaaggtgcatgcctacatcatcagctacctgaagaaggagatgccaagtgtattcggacacggacaacaagaagagagagcttatcagcaggctaccggaaatctacattcagctacagcgagaataccagattactgcaggggacttccctgaaggtcaaggctatgcaggaacagcttgagaactatgacttcaccaaattccactcgctgaagcccaagctgatcgaggcagtggacaacatgctgagcaacaagatctcgcccctcatgaacctcatcagccaggaggagacgagcacgcccacgcagctggtgcagggcggcgccttcgatggcaccaccgagggccccttcaaccagggctacggggagggtgccaaggagggcgccgacgaggaggagtgggtcgtggccaaagacaagcccgtctacgacgagctcttctacactctgtcgcccatcaatggcaagatatcaggtgtcaacgccaagaaggagatggtgacctccaagctgcccaacagcgtcctgggcaagatctggaagctggccgactgcgactgcgacggcatgcttgatgaggaggagttcgcgctggccaagcacctcatcaagatcaagctcgacggctacgagctgcccagcagcctgcccccccacctcgtgcccccctcgcacaggaagtccctgcccaaggccgactgaggggtgggctgcagaacggggtgggaactgggggacctgggcctcaggnnnnnnnnnnnnnnnnnnnnnnnnnnnnnnnnnnnnnnnnnnnnnnnnnnnnnnnnnnnnnnnnnnnnnnnnnnnnnnnnnnnnngggtggacactggaaactagatgacttctttcacctccaaaattcccttagtttctatgaaaatattgggggtaggggggtggattnaggagattgaagggttgagaagaaagagaaattgtccaaagagtcctcagaacctgcctggagaaatgcgcatgggggtgggcctggtaagtcccaggaaccacaggaagtgagctaaggctcacccagagcagctgggtctccaggctgcctgggctttttgtcctcatgaacaactctggagcagctgtctgtccctcagagggcacctggaggcagcaaagattatcttatttattttattttgttttctgctatatttagagtggcaaaaaaatagagcagagggtttctgctgtctccagactgtctaacaaagagaaggcgacagatgcctcctggggtttgaaagggggatgcactgtggatctgccatccattctgcagtctccagcagagcaggcagtcaggccccagcgtgcctccatcccagtgccccgatgaccatctggtcagccctcccaacctcccttccagggggcttaccagcaaagccatattcggctaggaatttggaattcacaacctttattaacccctggcaaaacttcccgtttgcatgtcaaatcacattgaagcctgaaaattagcttttcttactggtttttccaataagtaatagcaaagcccacttatcatacttaaactacagtaaagaaaagaggtggttctctgcagtgatcgtttagtgtggccctcaaacattaaatatcccgaggtctccttggtgggtggcaggatttaaattcaatcaaatcctgtcctagtgtgtgcagtgtcttcggccctgtggacacaggtgaatgagggaccagccctgccctgggctgttgagaagagatcagtccacccagagttagacattgtttttgtagaaaacaggcatttattatgtctagggttttgtgnnnnnnnnnnnnccttacaggataaaagcctttatacagaaacaaaatggaacctttcatataaaaccttttctttaaaggc

SEQ ID NO: 71357 - DNA, 568 bp, Homo Sapiens
  misc_feature (141)..(167): n is a, c, g, or t
ttcaggcaatatcaacagggtcaatgtcaaaaacaaaattctcctcagggtttggttacaaacataagctctaatgagccatttcattatacccattatttggcttcaaaaactcaagataccaatgtgtgctttcagggnnnnnnnnnnnnnnnnnnnnnnnnnnnggaaacttaaggaaacgaattaacgcagtgagctccctgctgatgaaaatatcctctttagtcatcctggtatttccctccactgccccatacaattccaagcacaaaaacactaaataaatattactacagaactgaagcaaatagccccgtgtgcctcaaaaactcctgaggtaccaccatgtgctggaaaatgactccaaatgactatgaatcaggaagaaatggatgaattattaactgcatgcctagtttgaaaaaatctaaatagattattggcaattgaattaaagtctaaaataacttaaaagcaaaaaacaaaatcttctaagcactgtaatgcactttttactactgatatgaagaaacttcaccagcttttcagaagtctgtaaataatc

SEQ ID NO: 71358 - DNA, 1160 bp, Homo Sapiens
  misc_feature (26)..(26): n is a, c, g, or t
  misc_feature (66)..(66): n is a, c, g, or t
  misc_feature (84)..(118): n is a, c, g, or t
aaggactatatacctcatatgggccnatccgctgtgcagccgaacgaccgagcgcagcgcagtatngagcgaggaagcggccgnnnnnnnnnnnnnnnnnnnnnnnnnnnnnnnnnnncagtcgacggtaccggacatatgcccgggaattcggccattacggccggggggttcccagactgaattgtcagtgagcggagtctgaggtcgctgtggactgcccactgggccttgcccgagatggacagccggattccttatgatgactacccggtggttttcttgcctgcctatgagaatcctccagcatggattcctcctcatgagagggtacaccacccggactacaacaatgagttgacccagtttctgccccgaaccatcacactgaagaagcctcctggagctcagttgggatttaacatccgaggaggaaaggcctcccagctaggcatcttcatctccaaggtgattcctgactctgatgcacatagagcaggactgcaggaaggggaccaagttctagctgtgaatgatgtggatttccaagatattgagcacagcaaggctgttgagatcctgaagacagctcgtgaaatcagcatgcgtgtgcgcttctttccctacaattatcatcgccaaaaagagaggactgtgcactagaaagttgcagcccacagcccttcatgtggactctgtcatgacatgctaactagacttcaggggagccacttctgttttcagcccctccctggaatagtgagttgggaggatggggagacagctaaccaactgcattacccaaaccatattgcacttttagttccctagttttctaggtgagcttcattccctgaaaggaggatgatgatatctaggcataacctagcctgtgaggaacctagttaggaaagacaactgacatttattgaatatcatgcactagtcccttacatatgtcatattttaattatagaaatcagtagcaaaaagaatcttggggattttccatctgacttccctggccatcttatcccatccttgcactaccagaagattcatacacttttgagactccagtgagacgctgttttcaccccttcctcctcctagcctctctcccaaaaagtaaaacacaatgctgaagaaaataaataaaa

SEQ ID NO: 71359 - DNA, 899 bp, Homo Sapiens
  misc_feature (52)..(52): n is a, c, g, or t
  misc_feature (101)..(101): n is a, c, g, or t
  misc_feature (159)..(159): n is a, c, g, or t
cgaaaattggtcatggaagtggaaggagccccccggacaaccacccctgtantgcctgcagacagatggcaaccacctgttggccacaggttccctcctantacggtgttgtacggcgtgggacccggctcaaaagggcctgcctgcacgctttcccgntgacgtggactcccctcagcagcccctgtgtactgcctgcgtctcaccaccaagcatctctatgctgccctgtctacaaccctccacgtcctggatttcaaaaacccatgaccgtcagggccacccctgcctctgggccagggaaaccagctactcagggacttctcttgcctggagggtgcagtgatagctcctcctcactgccccactgtgctcctgggcctgtgaccccagtgctcaggcaccttgcactagaggcttctgactcctgggactttggagcttaccagagatgcagtccctcccaggaacctgttggagaggcaggacctgctgctttagagtgcggctgaacccgggccttgcgtccctgtttggccagagcaaggatctggcctggagaggcccatcctataccccttattagagccatgacagcctacagagtgaggtgaggtgctcccaccttcccagatggttcctttctgccccttcctggaaggaaaggtgaggctgccaatagcctcctggcaccagccagacctcacccttgaccaacctctcggggctgggggttcattcctggggcactgtggcctggttttgctttgaaaccaagaaagagcaaagggaacccagcagttctgagtgagttctgagccagccctacctcaggctggctgttgagacatgctacaattttcatttttgtaaaaataaagcttgattgttcccagaaa

SEQ ID NO: 71360 - DNA, 1477 bp, Homo Sapiens
  misc_feature (26)..(26): n is a, c, g, or t
  misc_feature (82)..(82): n is a, c, g, or t
  misc_feature (113)..(113): n is a, c, g, or t
  misc_feature (141)..(141): n is a, c, g, or t
  misc_feature (177)..(177): n is a, c, g, or t
  misc_feature (277)..(277): n is a, c, g, or t
  misc_feature (299)..(299): n is a, c, g, or t
cctgggcaaccaataatagatagatnatctagccacccagggttccataatgctccgctcgtttttgtgagatttgcgcggntacaattcacccagaaacactttgactgatncgaattaaacgactcatataggaattgncctcgagccaagattcgccgagcaaaatgctaatanttcctgataagaagtttctttaaaaaacacgtaattttgcctagtgctttttctctacctgcccttgggctcactaatatcaccagtataattaccaagnaaaatattgagtttacctgatntaaactttaaaagttaattgtagatttaaattgtgtgaacctaatgatttttgcagtgaaacctttactaattcaaagttgcatgttctatgacatctgtgacttgcgttgcagagtgtacatgaaactgtataattgagtcattcagtaaaggagaacagtatcttggttaattgctactgaaaggttgagaaaggaatggtttgatatttaccacagcgctgtgcctttctacagtagaactggggtaaaggaaatggttttattgcccatagtcatttaggctggaaaaaagttgaaaacttaacgaaatattgccaagagattgttatgtgtttggttccagcctaaaaatgattttgtagtgttgaaatcatagctacttacatagctttttcatatttctttcttagttgttggcactcttaggtcttagtatggatttatgtgtttgtgtgtgtgtagtttatcctctctctcatctttatctagagattgactgatacctcattctgtttgtaaaaccagccagtaatttctgtgcaaccttactatgtgcaatatttttaaatcctgagaaatgtgtgcttttgttttcggatagacttatttctttagttctgcacttttccacattatactccatatgagtattaatcctatggatacatattaaaacaagtgtctcatacaacattgtatgtgagagaaatataaatatttacaacctgatattcgttgttgttttattgttaaaagtttattatgcaactctggaggtatagagggcatataagctatgggacatatgctgatcacaggctatattcatgaagttacttttgaccaacctgaaaactgataggattttgtttgtcatttggtaatttctactgcattcttaccatccttctctcacaaattttgatagcttgaagatctttttaattataattttgttgtatttgtttcctaggagcaagtgttcctgctgccagttctttcctctttaggcgtggttgagaaaaagcagaaactttacataaagctgtatttcttaatcatctttaatttgaaacttaagaaaatgaatttattctgttatatttatgtaacttatttcctggaagttatatctactagttttgtttgataataataaaattagctataccttg

SEQ ID NO: 71361 - DNA, 710 bp, Homo Sapiens
  misc_feature (408)..(452): n is a, c, g, or t
gcagagaccgcaggaccaatcatggctttcttcctgtgtcggggtatggcactgggggctgttttctcattcatgttcagggcaattgtgtgacaaagaatggacagaaggactgcctgcctccctccctgtctgcctcctgccccttccttctgccaggggtgatcctgagtggtctggcggtttttttcttctaactgacttctgctttccacggcgtgtgctgggcccggatctccaggccctggggagggagcctctggacggacagtggggacattgtgggtttggggctcagagtcgagggacggggtgtagcctcggcatttgcttgagtttctccactcttggctctgactgatccctgcttgtgcaggccagtggaggctcttgggcttggagaacacnnnnnnnnnnnnnnnnnnnnnnnnnnnnnnnnnnnnnnnnnnnnnagactgtctgcctgtcctggggtggctaggagctgggtctgaccgttgtatggtttgacctgatatactccattctcccctgcgcctcctcctctgtgttctctccatgtccccctcccaactccccatgcccagttcttacccatcatgcaccctgtacagttgccacgttactgccttttttaaaaatatatttgacagaaaccaggtgccttcagaggctctctgatttaaataaacctttctagttattttctc

SEQ ID NO: 71362 - DNA, 517 bp, Homo Sapiens
  misc_feature (213)..(256): n is a, c, g, or t
aactgacttctgctttccacggcgtgtgctgggcccggatctccaggccctggggagggagcctctggacggacagtggggacattgtgggtttggggctcagcttcgagggacggggtgtagcctcggcatttgcttgagtttctccactcttggctctgactgatccctgcttgtgcaggccagtggaggctcttgggcttggagaacacnnnnnnnnnnnnnnnnnnnnnnnnnnnnnnnnnnnnnnnnnnnncagactgtctgcctgtcctggggtggctaggagctgggtctgaccgttgtatggtttgacctgatatactccattctcccctgcgcctcctcctctgtgttctctccatgtccccctcccaactccccatgcccagttcttacccatcatgcaccctgtacagttgccacgttactgccttttttaaaaatatatttgacagaaaccaggtgccttcagaggctctctgatttaaataaacctttcttgtttttttaaaaa

SEQ ID NO: 71363 - DNA, 447 bp, Homo Sapiens
  misc_feature (140)..(191): n is a, c, g, or t
acagtgggacattgtggtttggggctcagagtcgagggacggggtgtagcctcggcatttgcttgagtttctccactcttggctctgactgatcactgcttgtgcaggccagtggaggctcttgggcttggagaacacgnnnnnnnnnnnnnnnnnnnnnnnnnnnnnnnnnnnnnnnnnnnnnnnnnnnntgcctgtcctggggtggctaggagctgggtctgaccgttgtatggtttgacctgatatactccattctcccctgcgcctcctcctctgtgttctctccatgtccccctcccaactccccatgcccagttcttacccatcatgcaccctgtacagttgccacgttactgccttttttaaaaatatatttgacagaaaccaggtgccttcagaggctctctgatttaaataaacctttcttgtttttttctccatggc

SEQ ID NO: 71364 - DNA, 657 bp, Homo Sapiens
aaaactctaaaaatatgtgatcaatgtttaatattctgaggaataagtaacaaaatcaagacagattttttacttagctgggttaatttcctctgaattcttctaagagttaaaaatgaactatcacattgattgatttagaaccatcagattttacttctggaaaatctattacctttcaaaaagttataattttaatgttagcacgaaaattacttcctaacatttcattaaaattttgcagccaaagattcctatttttgaattacagtactgcaaggcacatacagaactcacctccttcaaaaccacagaagatatactccctgaaatagaattttaaaatccttgaacaattagaaatactataaagttagcattttttaggtaaaaatggtggctcctacagggatcatgcaactttcttaaaatcaattcagcacatatgtataaagaatcctttttaaaaacatttgtacttgaaatacagacacagtgatgctgaagacactaaacaaaaactgaaaagtactatatcttgataaattttgttattgccttctttagagactttataatctctagttgattttcaaggacttgaatttaataatggggtaattacacaagacgtaaaggattttttacaaacaagta

SEQ ID NO: 71365 - DNA, 1031 bp, Homo Sapiens
cagtcgacggtgagccggacatatgcccgggaattcggccattacggccgggggtcaaggccgttccttcagtgttttcagacgccctgggaacgcggctgcagggtccggtcttcggtttgcacagctagaggccgcgcagcagcaaaggatgagcggaaccttggaaaaggtgctgtgcctgaggaacaataccatttttaagcaagccttttctctcttaaggtttagaacttcaggagagaagcccatctattctgtaggtggaattctactaagtatcagtcggccctacaagacaaagcccacccacggcattggaaagtacaagcacttaattaaagcagaagagcccaagaagaagaagggaaaagtggaagtgagagccattaatttggggacagattatgaatatggggttttaaatattcatctgactgcatatgatatgaccctggcagagagttatgcccagtatgttcacaacctctgcaactctctctccattaaagtcgaggaaagttatgcaatgccaaccaaaaccatagaagtgttgcagttgcaggaccaaggcagcaaaatgctcctggactcagtgcttaccacccatgagcgagtggttcagatcagcggtttgagtgctacgtttgcagaaattttcttggaaataatccaaagcagtcttcctgaaggagtcagactgtcagtgaaggagcacactgaagaagacttcaagggacgattcaaagctcgaccagaactggaagaactgttggccaagttgaagtagctactgtagaccctttcatgccagcagtggtcatattgagtgccaaagagaagagcttactgggtagttagagttcatcaggagacccaacccttagatttcataagtacccattcccatagccagtaatgtcctcactcctctgtggcttggctgtacttgccatttcttaccacttacctatgaggtaatgcttgttatcttccatctaataaaaatctgctgcagatgtgtaaacaaa

SEQ ID NO: 71366 - DNA, 655 bp, Homo Sapiens
atgaaatccgagtacctattagaaatgagttatgcaaatttagatgcaaataacattagaaaaaaaagattcttccataattaacataagtggttcctaacgagagcaatttttccacccaaaagtcatttggcaacatctacagacaattttgattgtcacactgggtcgggtaggaaggtatgctgcagacatttggtgggtagaggccagggatgctgctgagcatcccgcagtgtacaggacagcccccaaacaaggaattatccagccccaaatgccaatagggctcaaactgagaaacattgagttatatggctattagaaatccacattcttacacaagaaagaccatattagaatctaaggaaaacatgcatattcacattaattaatcgatcagatttttccagaattccgtatcagtcaccattttaatatggggacaatgaagacaagcacacaggaggtagaatatcagagtggggctggatcaagggcaaaaactggtcattaagtcatctgacattaaatcatttagccactaagttatttgtctactctcactttaaactcacccaaagaagattctcttaaagaaattatgaaaaatgtacaatttaacattttaaataaatagtgacagaagttgttt

SEQ ID NO: 71367 - DNA, 1026 bp, Homo Sapiens
cctaggtacgaggcctgggtgttgaattcggcacgaggatgagctagctgccatgcgggccggtgcagatcacgggtttgctctttgcatcataagaggggactcgcatgtgcattctagcacggcaagcttgagtcaggacccttaattaagatcctcaagttggctggaggacacatctcgcgagtagggtacctaggtcgactatgaaaagatctagctttcgtgggcaacgcggtgaaaagaatagttgcgtcgcgctggtgtgacggcagcgtacatgcctgcaccagaaggtggcgtccgtgtaacgggaattgcccgaagctgtgggaatagaaggtgagcggtcgtgcggaagacaggggtatgagctcaggacagtagcccagtaggccaaggaagagtaagacggccagcaaaggaaaaaatgacgaaagaggcacgcaggagagggcccagctcctgtatgatggaccccccagtatcagaaaacctcacgccagatgggtccgaaaccatggcgacacactcaagatctgctctttgagaatgtggatgggcttcgagcctggaattagtgacatgaacgaggattagattgggtaacaggaacgaagccccagatatactgtgccttcaagagaccacatgttcatgagaacaaactaccagctgaacttcagagagctgcctggactctctcatcaatagtggtcagctccttcggacaaggaagggtacagtggcgtgggcctgctttcccgccagtgcccactcaaagtttcttacggcataggcgatgacggagcatgatcaggaaggccgggtgattgtggctgaatattgactcggtttgtgctggtaacagacattatgtacctcaatgcacggcgaggtctggtacgactggagtaaccggccagcgctgggataaagcttcgcgaagttctgaagggctgggttcccgaaagcccctgtgtggtttgggaactcctgtggccttgcgaattgacctgaacccag

SEQ ID NO: 71368 - DNA, 989 bp, Homo Sapiens
aaacttacggctaggtacgaggcctgggtgttgaatcggcacgagggaggagctaggctgccatcgggccggtgcagatacggggttgctcttttgctcataagaggggcttcgctggcagtctgaacggcaagcttgagtcaggacccttaattaagatcctcaattggctggagggcagatctcgcgagtagggcaacgcggtaaaaatattgcttcggtgggtgacgcggtacagctgcccaagggcgttcgtaacgggaatgccgaagcgtgggaaaaagggagcggtggcggaagacggggatgagctcaggacagagccagaggccaagaagagtaagacggccgcaaagaaaaatgacaaagaggcagcaggagagggcccagccctgtatgaggaccccccagatcagaaaacctcacccagtggcaaacctgccacactcaagatctgctcttggaatgtggatgggcttcgagcctggattaagaagaaaggattagattgggtaaaggaagaagccccagatatactgtgccttcaagagaccaaatgttcagagaacaaactaccagctgaacttcaggagctgcctggactctctcatcaatactggtcagctccttcggacaaggaagggtacagtggcgtgggcctgctttcccgccagtgcccactcaaagtttcttacggcataggcgaggaggagcatgatcaggaaggccgggtgattgtggctgaatttgactcgtttgtgctggtaacagcatatgtacctaatgcaggccgaggtctggtacgactggagtaccggcagcgctgggatgaagcccttcgcaagttcctgaaggcctggcttcccgaaagccccttgtgctgtgtggagaacctcaatgtggcccctgacgacattgacctttcgaacccaaggggcacacacagatgctggctcacgccacaagaagcgcaaggcttcgggaatcac

SEQ ID NO: 71369 - DNA, 1762 bp, Homo Sapiens
atgatgaatatagaaccagttgttacaaaaagcaggctggtaccggtccggaatttcccgggatatcgtcgacccacgcgtcgaggagctaggctgccatcgggccggtgcagatacggggttgctcttttgctcataagaggggcttcgctggcagtctgaacggcaagcttgagtcaggacccttaattaagatcctcaattggctggagggcagatctcgcgagtagggcaacgcggtaaaaatattgcttcggtgggtgacgcggtacagctgcccaagggcgttcgtaacgggaatgccgaagcgtgggaaaaagggagcggtggcggaagacggggatgagctcaggacagagccagaggccaagaagagtaagacggccgcaaagaaaaatgacaaagaggcagcaggagagggcccagccctgtatgaggaccccccagatcagaaaacctcacccagtggcaaacctgccacactcaagatctgctcttggaatgtggatgggcttcgagcctggattaagaagaaaggattagattgggtaaaggaagaagccccagatatactgtgccttcaagagaccaaatgttcagagaacaaactaccagctgaacttcaggagctgcctggactctctcatcaatactggtcagctccttcggacaaggaagggtacagtggcgtgggcctgctttcccgccagtgcccactcaaagtttcttacggcataggcgaggaggagcatgatcaggaaggccgggtgattgtggctgaatttgactcgtttgtgctggtaacagcatatgtacctaatgcaggccgaggtctggtacgactggagtaccggcagcgctgggatgaagcctttcgcaagttcctgaagggcctggcttcccgaaagccccttgtgctgtgtggagacctcaatgtggcacatgaagaaattgaccttcgcaaccccaaggggaacaaaaagaatgctggcttcacgccacaagagcgccaaggcttcggggaattactgcaggctgtgccactggctgacagctttaggcacctctaccccaacacaccctatgcctacaccttttggacttatatgatgaatgctcgatccaagaatgttggttggcgccttgattactttttgttgtcccactctctgttacctgcattgtgtgacagcaagatccgttccaaggccctcggcagtgatcactgtcctatcaccctatacctagcactgtgacaccacccctaaatcactttgagcctgggaaataagccccctcaactaccattccttctttaaacactcttcagagaaatctgcattctatttctcatgtataaaactaggaatcctccaaccaggctcctgtgatagagttcttttaagcccaagatttttcattgagggtatgggttttaaaagaaaattgagagaaagactaactaatgactttgtttgagttatccacatgataattaagagcatagtttcaaataatatttcactttaaatccaaaggggggggcggctaaaaagtttgcggggggccgagattagagaacccggtttgttttaaagggtggccctataggggtgattgttagaacgcatggcgggtttcaaggtgggtggaaacggtctgggtttgggaggacctctctggggggcacaatggcccctcagattaggctggaaataatagggttgggacacgattgtcggaatgttgttataacgaagcg

SEQ ID NO: 71370 - DNA, 2388 bp, Homo Sapiens
  misc_feature (43)..(81): n is a, c, g, or t
  misc_feature (85)..(119): n is a, c, g, or t
  misc_feature (1307)..(1361): n is a, c, g, or t
  misc_feature (1483)..(1491): n is a, c, g, or t
aaaagatgtatcgactcactatagggcgtcacgcgtagctagnnnnnnnnnnnnnnnnnnnnnnnnnnnnnnnnnnnnnnnccgnnnnnnnnnnnnnnnnnnnnnnnnnnnnnnnnnnncagtcgacggtaccggacatatgcccgggaattcggccattacggccgggcgtcttcttctggatgctgacactgggcctcatgctgttctatcgcctggttttcattctgcatgaaacaagcaggtccactcagaaagccattgccttctgtcttggctatggctgcccacttgccatctcggtcatcacgctgggagccacccagccccgggaagtctatacgaggaagaatgtctgttggctcaactgggaggacaccaaggccctgctggctttcgccatcccagcactgatcattgtggtggtgaacataaccatcactattgtggtcatcaccaagatcctgaggccttccattggagacaagccatgcaagcaggagaagagcagcctgtttcagatcagcaagagcattggggtcctcacaccactcttgggcctcacttggggttttggtctcaccactgtgttcccagggaccaaccttgtgttccatatcatatttgccatcctcaatgtcttccagggattattcattttactctttggatgcctctgggatctgaaggtacaggaagctttgctgaataagttttcattgtcgagatggtcttcacagcactcaaagtcaacatccctgggttcatccacacctgtgttttctatgagttctccaatatcaaggagatttaacaattggtttggtaaaacaggaacgtataatgtttccaccccagaagcaaccagctcatccctggaaaactcatccagtgcttcttcgttggtcaactaagacaggataatccaacctacgtgacctcccggggacagtggctgtgcttttaaaaagagatgcttgcaaagcaatggggaacgtgttctcggggcaggtttccgggagcagatgccaaaaagactttttcatagagaagaggctttcttttgtaaagacagaataaaaataattgttatgtttctgtttgttccctccccctcccccttgtgtgataccacatgtgtatagtatttaagtgaaactcaagccctcaaggcccaacttctctgtctatattgtaatatagaatttcgaagagacattttcactttttacacattgggcacaaagataagctttgattaaagtagtaagtaaaaggctacctaggaaatacttcagtgaattctnnnnnnnnnnnnnnnnnnnnnnnnnnnnnnnnnnnnnnnnnnnnnnnnnnnnnnngaaaaagaagacaaagagacagatgaaaataggaacaaataaagacaaacaacattaagggccatattgtaagatttccatgttaatgatctaatataatcactcagtgcaacattgagaannnnnnnnnaatggctcaaaaatggaaactgaaagcaagtcatggggaatgaatactttgggcagtatcttcctgatgtcttcttagctaagaggaggaaaaaaaggctgaaaaaatagggaggaaattccttcatcagaacgacttcaagtggataacaatatttataagaaatgaatggaaggaaatatgatcctcctgagactaactttgtatgttaaggtttgaactaagtgaatgtatctgcagaggaagtattataaagatatgtcattagattccaaagtgctgattaaatttttatagtttatcagaaaagccttatattttagtttgttccacattttgaaagcaaaaaatatatatttgatatacccttcaattgccaaatttgatatgttgcactgaagacagaccctgtcatatatttaatggcttcaagcaggtacttctctgtgcattatagaatagattttaataatcttatagcattgtatattattattgctgttgtcactgttattattattgtggatactggcccttggtgtgttgcatagctccctatgtattctctgtttccatctttaagttcccagaccaatatacattaagagttttgcatggtctaaattgtgtttattccaaccacgtggaaagctcctggaaagaaattttacattcggttgttctgtgctcctaatgacacttgaccttgttgaacaaatggcagagcctttcccaaggatttgattgtttgtgaattatctgcatgtgtgcttttttttggtgtgtatttcattaaaaaatataaatatttatgaaaattgcacgcatattagagttaaccatgtactattgatacagcaacgctacattgcaaataaaagtccgatcccaaaagga

SEQ ID NO: 71371 - DNA, 976 bp, Homo Sapiens
  misc_feature (26)..(26): n is a, c, g, or t
  misc_feature (28)..(28): n is a, c, g, or t
  misc_feature (115)..(115): n is a, c, g, or t
  misc_feature (157)..(157): n is a, c, g, or t
  misc_feature (291)..(300): n is a, c, g, or t
acttgactgatcgaattatcgactcntntaggattgcctcgagccaagatcgcacgaggttttaaccaagttctcctgcagtctttctatatgaatagtgagtcagcttggcttntcttcgtgttcccaagtcatgtatgtatagtgattatccaanaacgccatgtaacgtttttactagagtgttttgcacatttgggcgctaaagggattaaaacaactgatgccacaatgactattgaaggagggaaaattctcaaggttccatagtatcttttacaaaatggattnnnnnnnnnntgcctatgcaacttcaaatagtctgatgcctgcttccccaggacgagtgactcttccacggtgtgctgctttccctccgagcctgtggaaaggcagagcccttttgcagatacgaaagcaagcttttgccaatgatctttaatggagttaaaatgtttatggtaattgtaacctttcaaatgagttacgtgaaaagagcatctcacttttaatacacccagatattttcttcaagtctttgtgcattttagcaggacttaattttcttaatttattctttcctttcaattatagtgacatagagtagttggccttataagtagatcccatttagcccctgaacataataccatctgcagtattataaaagtcatttagaaggtcagggggataatctagaggcaggattttggacattgtgaaggaaatgtgctccttctcagctcacttcaataactattttctgagactgaagttttttagacaagaataagaaaactttgctttcttcagttatcacatgtgaaagcttttgctttttgttaggaaaaggtgtggatgactctactgcgtggatggttacatttgctttccgtgaaatgctcagaaaatgtcaggacattccttttccaattgtgtgtcagtgcgtattgtaataaaactactgatttaaatt

SEQ ID NO: 71372 - DNA, 1335 bp, Homo Sapiens
  misc_feature (491)..(501): n is a, c, g, or t
  misc_feature (774)..(861): n is a, c, g, or t
  misc_feature (870)..(882): n is a, c, g, or t
  misc_feature (996)..(1004): n is a, c, g, or t
tgaaatgaagattgtttgctgtggggaatattttaatactcttggactttagggaggctattttatgtgtcacttgctcctagttgtttcattgtattagtaattagcaaactgtcctggaaccaagggtttggtacttttgcctgattagcattccattatttatttgaaatgctcagtgtttgctcaaatttggtgaaaatatcttttgaagacatattctctgagccttaaaaatggctgctatcgacagtactgtaagatgcactgccagtagatttgatacttttcatttcagtgtaggcagtaatgttttctaagaaagatttagaaatcagcaaagtgtaacaattgtgtttcatttatggaatggaaaaactgaagtgtcccattcagaacactttggaaaggttgtctgcattaggggatgtttctggaagcatcccttagagaagctgcctgaggaatctccttgccaggttgtaccagannnnnnnnnnncttaaatgtattgtatatattttccttaaaatgtcttcattggctgaatgattcctatccgtagtaatattttaggtacttgttggatttttaaaggaagattatttattttcagatttgctgctataattgaaaacctagtaactggtcctgttgattgtgccttcatcactgtttctctgtgccacgaccgttcatgtgtatttgaaataaagaagtttaaaaagccatgttgaattcaagattccttctaataaaaataggtgaaacttnnnnnnnnnnnnnnnnnnnnnnnnnnnnnnnnnnnnnnnnnnnnnnnnnnnnnnnnnnnnnnnnnnnnnnnnnnnnnnnnnnnnnnnnctttgccgnnnnnnnnnnnnntcaaaaatttttcaaaaccatccttgggggcggcggccccagaaagaaagggaacttggccatagttgttcccaagaaaaccccggcgctagataagggctgggcttcccaccnnnnnnnnncgccggggggaaccggagctcttgaaaaaaccccatagggtgttccgaggggccgtccggggcatctaccaacgggaagccaggcggcgccgcaattactatttacccccgcccctgggacattaagccaaagagtggggttgacactctctccaaaccatttttgccagaaataggaaacccccctcctaaaaaccgtgtcttcacgccaccccctctttttcccgcacgcgcggttatcccggcacgctcccttgcccggcccctgcggccactgcctacgcgttgtctgggaccccacgtgggatacaaaaaaacgtggcggcactcc

SEQ ID NO: 71373 - DNA, 938 bp, Homo Sapiens
gagaaggaacagctgagtgcggagattgctgccctgcagcaggagcatgacgagggcctcctcctggccgagagcgagaagcagcaggccttgtctctgaaggagtctgagaagacggcgctgtcagagaagttgatgggtacacggcacagcctggccaccatctccctggagatggagcggcagaaaccagatgcccagagccggcaggagcaggaccgggtaggcctgccgtcgtagggaggcttgcggagcaggagcgccctctctccaccgagctatcccgcggtttccagcatcccatctggcggactcctcttcctctctcttctcctactctgggtcttctatcctggtgttccttgaatgcctatcttccttttgtgcctcggaacctctcacgcctgccacaagttactcttttccttggtagttctgaactttaaataaggtaatgcctgtaagaatgccataaatgctcaataattgtcatctgttattattttcatcagtaacatcatctgaatcatcagtattgtctgcttttaacagctgcatttttcattgtccaaatatagtcacatacatttgaccattttataattattgaataataaattcgttctgctattttacaatgaaaaataatgctgcagagagcatttttgcacatgtatcgtggcagatgtaggccagaggctcttcttttatccatcctatggccaacctatgaatgtatacacgtttaatgagattttgccagcaatcaaagccttcagggaaaatgtccctagctctttactacatcagatcaaggactctggataattggcataacatcctggaatagctgaaacagagatattattctctgctctcctctgttgtctttgtcttttcacgtcttaataaaagtgctggtgacaagagtgtaaaaa

SEQ ID NO: 71374 - DNA, 1789 bp, Homo Sapiens
ccccagtaggatccagtctgtggggcaagccaggcatttgagggagaatgagcacggggcttttggaggctgcagcctagggccaagggatggaggctcacctgagtgcaggttaggcaggtgaagtgtctccccggaaaccaagctagagtgccccacctgctcggccctgccttctcggatcggatccagcacatccaggcttctcctcctcccgaggaaccagtggtgacagctgaggccatgtgagtaggatcctgaatgaggctttatctctggctgttcgtcccatcgtccaccgtggcaccagctccctcagccagccaggatgggaccagcgactgagagagccagaggcagagaggtgagggtgaccatatcctggactgtgagaggaatgggactctgggcctgtagctgccaagcaggtggcaggtgctccaggctgtgatctgcaccctctgacccctgacattgacctcctaccctgacccctgcctgaccaagccatgtctgaacaggaggctcaagccccagggggccgggggctgcccccggacatgctggcagagcaggtggagctgtggtggtcccagcagccgcggcgctcggcgctctgcttcgtcgtggccgtgggcctcgtggcaggctgtggcgcgggcggcgtggcactgctgtcaaccaccagcagccgctcaggtgaatggcggctagcaacgggcactgtgctctgtttgctggctctgctggttctggtgaaacagctgatgagctcggctgtgcaggacatgaactgcatccgccaggcccaccatgtggccctgctgcgcagtggtggaggggccgacgccctcgtggtgctgctcagtggcctcgtgctgctggtcaccggcctgaccctggccgggctggccgccgcccctgcccctgctcggccgctggccgccatgctgtctgtgggcattgctctggctgccttgggctcgcttttgctgctgggcctgctgctgtatcaagtgggtgtgagcggacactgcccctccatctgtatggccactccctccacccacagtggccatggcggccatggcagcatcttcagcatctcaggacagttgtctgctggccggcgtcacgagaccacatccagcattgccagcctcatctgacggagccagagccgtccttcttctcacagcggcctcagcgtccccagagccgagcccagggtgtgagtgcatgtgaacgttgagtacacatgagtgcgtgtatgcccccaggctgggtcagctcttctgtggattgcatggcgtgtgattaaaagcccatgtgttcccacacatccacatcatgggaaggttaatgtgtgcctccttggaactgggtgttggtgtccatggaacttcctctctgtatctcaggtcagtaggcgcagaaacgcctcatgatgaagattcttgagccccatttccaagacccctcacatccaatcctgtcctgtaacatccatcaaggatttccataggggtgactggtgcccacccaagactgcaccagtgcctgctcattgaggagagtaactgctggccaggcagaaagaatatgggctctgcaatgagacagacctggaggggactctcccgttgagcactagcagctggaggagttgggagttcatggctatcatggttgtgttaatcgattgtggggatgaaatgtcattgtgtatggaaggcggggctcatggctgattggcaataaaatggcggctgccgttgtcattgtctcc

SEQ ID NO: 71375 - DNA, 202 bp, Homo Sapiens
gcggcgcctactactactatacggctgcgagaagacgacagaaggggactctcccgttgagcactagcagctggaggagttgggagttcatggctatcatggttgtgttaatcgattgtggggatgaaatgtcattgtgtatggaaggcggggctcatggctgattggcaataaaatggcggctgccgttgtcattgtctgc

SEQ ID NO: 71376 - DNA, 1469 bp, Homo Sapiens
  misc_feature (80)..(114): n is a, c, g, or t
  misc_feature (1101)..(1124): n is a, c, g, or t
  misc_feature (1126)..(1136): n is a, c, g, or t
  misc_feature (1139)..(1165): n is a, c, g, or t
aagacttatagatcatatgggcgccacggcttacagcgaacgacgagcgcagcgaagtcagtgagcgaggaagcggccgnnnnnnnnnnnnnnnnnnnnnnnnnnnnnnnnnnncagtcgacggtaccggacatatgcccgggaattcggccattacggccggggagaccccgagagctcgcagctccggcccggcggcgatggcgcggagcgtgcgcgtgctggtggactatggacgggcgtcctggtcggacttctgagggcggcctccatgcggggcttccgccgtcgcttccctgtaggagtcctcacagtgcctgcctggaagctagctgcacgcagggcttccgtgggcgccgtcgagtcagtaaccgcgtccactgcggaccctgagctgtgcggattaaggtgggcaggtgtgtactgaagccctgggcatttttcctggacctggagtcccatcccgggagccttgtgacgctgtgcgggagatgaacgacctaccggacacgcaggtcttcatctgcaccagccccctgctgaagtaccaccactgtgtgggtgagaagtaccgctgggtggagcagcacctggggccccagttcgtagaacgaattatcctgacaagggacaagacggtggtcttgggggacctgctcattgatgacaaggacacagttcgaggccaggaggagaccccaagctgggagcacatcttgttcacctgctgccacaatcggcacctggtcctgcccccgacaaggagacggctgctctcctggagtgacaactggagggagatcttagatagcaagcgcggagctgcgcagcgggaatgagcggggatgccgcgggcagcagctggagctaaaggaagggcaggcccacaggggccaccgcagagccgagtcggggcggcatcgtgctggtgcctctggccccgtggagtggagcaggcagataccgttaagcgctgtgctaccgggccccaggcccagccacccggtacctcccgagaggctgtccctggaccctggctggcatggaaatacagtgggaaaaccagtcgggacctttaataaaagaccttggctttctaannnnnnnnnnnnnnnnnnnnnnnnannnnnnnnnnnttnnnnnnnnnnnnnnnnnnnnnnnnnnnaacatgttcggccgccctcggcccctcgaaaaacctttcctaaaaccattccgtttgggcccgcgggggccccagtagggtaaggggaacatgggcccatacctggttcccaaagggaaatcccggagccatggacttaagggcttggaattccccacccaaataaaaaaaccgcccggggggggaaacccaagccggttctggaaacaaatcccaaatatggaaatttcctgggggtcctttaactggggattttactccaccgggagagtcccaaaccgagagccctcaataatccaattta

SEQ ID NO: 71377 - DNA, 451 bp, Homo Sapiens
ggcctggggcccggtagcacagcgcttaacggtatctgcctgctccactccacggggccagaggcaccagcacgatgccgccccgactcggctctgcggtggcccctgtgggcctgcccttcctttagctccagctgctgcccgcggcatccccgctcattcccgctgcgcagctccgcgcttgctatctaagatctcccctccagttgtcactccaagagagcagccgtctccttgtcgggggcaggaccaggtgccgattgtggcagcaggtgaacaagatgtgctcccagcttggggtctcctcctggccttctcacccacacagtggtggtacttcagcagggggctggtgcagatgaagacctgcgtgtccggtaggtcgttcatctcccgcacagcgtccaaggctcccgggatgggctccaggtccaggaaaaaacccggggct

SEQ ID NO: 71378 - DNA, 1251 bp, Homo Sapiens
  misc_feature (366)..(421): n is a, c, g, or t
  misc_feature (936)..(971): n is a, c, g, or t
tcggtacccgggagtggagagagaatgtaatccacacggccaaccccatggaacacgccaaccacatggctgcccagccacagttcgtgcacccggaacaccgctcctttgttgacctgtcaggccacaacctggccaacccccacccgttcgcagtcgtccccagcactgcgacagttgtgatcgtggtgtgcgtcagcttcctggtgttcatgattatcctgggggtatttcggatccgggccgcacatcggcggaccatgcgggatcaggacaccgggaaggagaacgagatggactgggacgactctgccctgaccatcaccgtcaaccccatggagacctatgaggaccagcacagcagtnnnnnnnnnnnnnnnnnnnnnnnnnnnnnnnnnnnnnnnnnnnnnnnnnnnnnnnntgacatcaccagcgccgagtcggagagcagcgaggaggaggagggggagcagggcgacccccagaacgcaacccggcagcagcagctggagtgggatgactccaccctcagctactgacccgtgcccccggccacctcggattctgctttcgaagactctgctgccatccgttctcccagtcccaagggtccacgatgtacaaagtcatttcggccagtaggtgtgcagacccctccccgccacgatcgtcgctgtgcttggtgtgtaggaccctaggctccccgcccaccctctgcctggtcgcgctcttcagtcccacgaggagctgacacgtcctctctggccgccatccggctcgcacaggggcctcccagcgcctcaggcccccgcgtttgtgtctggagtctccccccgggggagaggacactgggcccctcgcactccagaaaagccatgcccagctgggctcgtttgacaaagggtaaaacatggctcactcccacccgggaatcannnnnnnnnnnnnnnnnnnnnnnnnnnnnnnnnnnnccaacctagggcatggaataaaaaatgcgcacgaaggggggggaactcttgaccatgcattaaccgaacttctttcacccttctggtcaatcaacccgggtatcccttggccgaccatccgaggccagccgataacccccggcccctccggacagccaacctccgaaagcttcggccaatcacctttcgcaacacggcacccacatacccgccgggtgtcccctcggctttcacacgcgcaacctcatctccgagacccaaagtcacccgccacactcac

SEQ ID NO: 71379 - DNA, 1170 bp, Homo Sapiens
  misc_feature (61)..(83): n is a, c, g, or t
gtgccaagctaaaattaaccctcaactaaagggaataagcttgcggccgcttacgcggtcnnnnnnnnnnnnnnnnnnnnnnnaaaaaaagtttttattttttccaaactagtgcatgtataaataatggcaggatggggggtactgtgtagatgattaactgactttttaatattttgtaaataaatcggattccttgtgtcctttgtgctagtgtaacccgggactggaatgtaaagtgaagttcggagctctgagcacgggctcttcccgccgggtcctccctccccagaccccagagggagaggcccaccccgcccagccccgccccagcccctgctcaggtctgagtatggctgggagtcgggggccacaggcctctagctgtgctgctcaagagactggatcagggtagctacaagtggccgggccttgcctttgggattctacctgttcctaatttggtgtggggtgcggggtccctggccccttttccacactcctcctccgacagcagctccctgggcagtggcctggtctcaccgtgtgcagccttgtggtttatgcttaaatgtacattttcctgctggtaaaaggagaaactgagaggtgtcctgcagaccggctgaccactccttttggagacggcaggaggcctgagcgatccgtactcagaacgtccaggagagacgcatggcccgaagtcaaagtgctggaattttccaaaacagcctgttctctcctctctcctccccagagcaccccctgccatcaggggggttgaaatccctctcccccaggagccctgctgctttgcttggtggtagggcaggagagcaaacaaacagtcatggtctaaaacccacatagcactttgctcttagttacatgtaaaattttagatttctaaaacaggtgggcaatcattttgaatactgttctgtgaccctgactgctagttctgaggacactggtggctgtgctatgtgtggccatcctccatgtcccgtccctgtagctgctctgtttagacagcggacagacgctcacgcccaggggatgtcctcacgctgtcgccgcgcggtttcccttcgcagatgtgtatactcatgataggtcagaaagtgtatccgctacaataaagttctggttctaactaactccagccgg

SEQ ID NO: 71380 - DNA, 986 bp, Homo Sapiens
  misc_feature (180)..(234): n is a, c, g, or t
  misc_feature (673)..(673): n is a, c, g, or t
  misc_feature (698)..(698): n is a, c, g, or t
  misc_feature (729)..(729): n is a, c, g, or t
  misc_feature (731)..(731): n is a, c, g, or t
  misc_feature (773)..(773): n is a, c, g, or t
  misc_feature (801)..(801): n is a, c, g, or t
  misc_feature (907)..(907): n is a, c, g, or t
  misc_feature (966)..(966): n is a, c, g, or t
ccaaactagtgcatgtataaataatggcaggatggggggtactgtgtaaatgattaactgactttttaatattttgtaaataaatcggattccttgtgtcctttgtgctagtgtaacccgggactggaatgtaaagtgaagttcggagctctgagcacgggctcttcccgccgggtcctnnnnnnnnnnnnnnnnnnnnnnnnnnnnnnnnnnnnnnnnnnnnnnnnnnnnnnntgctcaggtctgagtatggctgggagtcgggggccacaggcctctagctgtgctgctcaagagactggatcagggtagctacaagtggccgggccttgcctttgggattctacctgttcctaatttggtgtggggtgcggggtccctggccccttttccacactcctcctccgacagcagctccctgggcagtggcctggtctcaccgtgtgcagccttgtggtttatgcttaaatgtacattttcctgctggtaaaaggagaaactgagaggtgtcctgcagaccggctgaccactccttttggagacggcaggaggcctgagcgatccgtactcagaacgtccaggagagacgcatggcccgaagtcaaagtgctggaattttccaaaacagtctgttctctcctctctcctccccagagcacccctgccatcaggngggttgaaatccctctccccaaganccctgctgctttgcttggtggtaggcaaganancaaacaacatcatggtctaaaaccaatagcactttgctctanttacatgtaaaatttagattctaaaaangtgggcatcatttgatactgtctgtgacctgactgcattctgaggacactggggtgtgcatgtgtggcatctcatgtccgtcctgtactgctcgtttaacacggcnacctccgccagggattctcagctgtcgcgcgcgttcctcgcaagttaatcatgaagcanaatgtacctctgcgatctgg

SEQ ID NO: 71381 - DNA, 1168 bp, Homo Sapiens
  misc_feature (68)..(95): n is a, c, g, or t
  misc_feature (436)..(448): n is a, c, g, or t
  misc_feature (553)..(592): n is a, c, g, or t
cggccaagtgccatgctcgaaattaaccctcactaaagggaaaaagcttgcggccgcggctgttggcnnnnnnnnnnnnnnnnnnnnnnnnnnnncaagtattttattaataatttattgtcagtaagaaagactggctaatggtagttttcattaaaaacctttacaagaccattgcatcacaaatatacagacactataaaaactgtgtcatggtggttttggttctaaacaggtatgcagaaggtccccgttacactttccaataatgaaaaatgtttataattctaaatacagcaacccatgtaagacatgttcatgtatctgatctctccttcatcctatgtacagctagaaatgaatgactacactgaaatgtactaacaaaatgtcacacttcagtggaaaaagacagaatgaaaccctggttatagtnnnnnnnnnnnnntcagggtgctagataatggcactaccaccaccaaaattcagttgaaacaaatgcacaaaatatcttggaaatctagttaaaactatgaaaaatcaagtctgtacnnnnnnnnnnnnnnnnnnnnnnnnnnnnnnnnnnnnnnnntcaaatctatataaatacatgaatcatgctgacaacacaggactgatttttcgtttgattattttaacacagacagatgtaaatcccaaaagacgttgggaaatggcacagccgatgaaaacctcacgatgacaatagttgggacactggaaatggctagcacgcccagaggcgcaggatccagcgcagccatgcccattcggctcaccaaaaaaagcttggaaacactgctgcaaagaacagcgcggattactcacaccacccctaggttcactaaagtcaagcactttggggggagttgagagtcagacttccgtgtgctgctgggaatccaggggcgggatcgtcacctcttcgaagtggccgtcgtccccgctctcatagtcactcatcatgacctcggactccacttcgcagcaggctgacacgtcagagcaggaggcggtggaggcgtacacagacatgggcatgctctcgacagcgggcgcctcgaagtgtctttgataccctggcgggtaaggggcatggggttctctacaagtactattctcaccagtgccttttgtttgaggttca

SEQ ID NO: 71382 - DNA, 720 bp, Homo Sapiens
  misc_feature (578)..(633): n is a, c, g, or t
  misc_feature (679)..(679): n is a, c, g, or t
tgaactcaaacaaaaggcactggtgagaatagtacttgtagagaaccccatgccccttacccgccagggtatcaaagacacttcgaggcgcccgctgtcgagagcatgcccatgtctgtgtacgcctccaccgcctcctgctctgacgtgtcagcctgctgcgaagtggagtccgaggtcatgatgagtgactatgagagcggggacgacggccacttcgaagaggtgacgatcccgcccctggattcccagcagcacacggaagtctgactctcaactccccccaaagtgcctgactttagtgaacctagaggtgatgtgagtaatccgcgctgttctttgcagcagtgcttccaagctttttttggtgagccgaatgggcatggctgcgctggatcctgcgcctctggacgtgctagccatttccagtgtcccaactactgtcatcgtgaggttttcatcggctgtgcaatttcccaacgtcttttgggatttacatctgtctgtgtaaaaataatcaaacgaaaaaccagtcctgtggttgtcagcatgattcatgtatttatatagatttgatnnnnnnnnnnnnnnnnnnnnnnnnnnnnnnnnnnnnnnnnnnnnnnnnnnnnnnnncatagttttaactagatttccaagatattttgtgcatttgtttcanctgaattttggtggtggtagtgccattatctagcaccctga

SEQ ID NO: 71383 - DNA, 545 bp, Homo Sapiens
  misc_feature (204)..(214): n is a, c, g, or t
  misc_feature (292)..(353): n is a, c, g, or t
caggtatgcagaaggtccccgttacactttccaataatgaaaaatgtttataattctaaatacagcaacccatgtaagacatgttcatgtatctgatctctccttcatcctatgtacagctagaaatgaatgactacactgaaatgtactaacaaaatgtcacacttcagtggaaaaagacagaatgaaaccctggttatagtnnnnnnnnnnntcagggtgctagataatggcactaccacacccaaattcagttgaacaaaatgcccaaaatatcttggaaatctagttnnnnnnnnnnnnnnnnnnnnnnnnnnnnnnnnnnnnnnnnnnnnnnnnnnnnnnnnnnnnnnataatcaaatctatataaatacatgaatcatgctgacaacacaggactgatttttcgtttgattattttaacacagacagatgtaaatcccaaaagacgttgggaaatggcacagccgatgaaaacctcacgatgacagtagttgggacactggaaatggctagcacgtccagaggcgcaggatccagcgca

SEQ ID NO: 71384 - DNA, 794 bp, Homo Sapiens
tcacgtcaggagcaagcagccgtggacccctaagccgagctggggaaggcccctcccctgtcgccagccgggccctcatgctgaccttgcaaattcagccgctgctttgagcccaaaatgggaatattggttttgtgtccgaggcttgttccaagtttgtcaatgaggtttatggagcctccagaacagatgccatcttcctgaatgttgacatgccagtgggtgtgactccttcatttttccttctcccttccctttggacagtgttacagtgaacacttagcatcctgtttttggttggtagttaagcaaactgacattacggaaagtgccttagacactacagtactaagacaatgttgaatatatcattcgcctctataacaatttaatgtattcagttttgactgtgcttcatatcatgtacctctctagtcaaagtggtattacagacattcagtgacaatgaatcagtgttaattctaaatccttgatcctctgcaatgtgcttgaaaacacaaaccttttgggttaaaagctttaacatctattaggaagaatttgtcctgtgggtttggaatcttggattttccccctttatgaactgtactggctgttgaccaccagacacctgaccgcaaatatcttttcttgtattcccatatttctagacaatgatttttgtaagacaataaatttattcattatagatatttgcgcctgctctgtttacttgaagaaaaaagcacccgtggagaataaagagacctcaataaacaagaataatcatgtga

SEQ ID NO: 71385 - DNA, 882 bp, Homo Sapiens
tgcaccaagatatcaatcagcgtcagtatgaggctgaaagaaacaaggggccagggcagagggcacctgagcggctggagagcctgttggagaaacacaaagaggtgaggagtgttccctgcttcttccttccctttttcccaacttgcacccacttctgccacagacccccttatcaggccctgggcagtctttcaagatcatgaataacggagtctggcaatagtttcatagacccatcctgtaagggctcattgcaatgctcaccttttttctgggttgtgggctcaacaaataatgtgtaatttagagttctctcgaattccacttttgctcagtttttctttgtcagcactcattgttaggagtgtttaagtgctgtacctgcctgtcatgcagggaattaagttttgacctacttgtcaagtgtgcagtgtgcaagtgagtgcaggagtactaaaagccaaccattgacaagggaggccaaattttcaaggaatggaaagaaaacaggcctcccagtgaactcgctttaaattctgttgaatttagtcactagctccatagccttatgtaacctctcttcagttttcttttctttaaaaaaaggaataatctcacctttttgtgaagaataaatgagatgagtaaattgcctcgcttggctcatagtagatacttgttttgtttccttttaaacttaaagatgaccactggggggcataagccatagcaaaatcttttacgctgatgaaatctttaatcagctgggtctgtcataagagtaacactactggtgttttctcctcactctctgttagtgtctaagacccctcctatgaggttggcaggactcaccatgtctgaccatatcatttggct

SEQ ID NO: 71386 - DNA, 1015 bp, Homo Sapiens
acaataggctaggtacgaggcctgggtggtgaatcggcacgagggtccgcccccagtcgtagcctcggacggtttctgagcgttggtgtttggcacgcgccaccctctcttgctttggttccgccatgccgatgtaccaggtaaaaccttatcacgggcgcggcgcgcctctccgtgtggagcttcccacctgcatgtaccggctctctaacgtgcaaggcaggagcggcggcccagcgcccggcgttggccacctacagtctttggtagatgagtggctggatagctacaagcaagaccaggatgcaggatttctggagcttgttaactttttcatctgatcttgtggatgtaaaggactcgggggactatcctctgacagctccaggtctatcctggaagaagttccagggcagcttctgtgagtttgtggggacattggtctgtcggtgccagtacatcctcctccatgatgacttccctatggacaacctcatctccctgctcactggcttctcagactcacaagtctgcgccttctgtcacactagcaccctggctgctatgaaactgatgacctccctggtaagagttgccctccaactgagtctgcacgaagatatcaatcagcgtcagtatgaggctgaaagaaacaaggggccagggcagagggcacctgagcggctggagagcctgttggagaaacacaaagagctgcattaatactacattgtcaaagacaaagacgaacatgagacatgcgatatgagttttaaaaggagagaagagcaaaaaaacaatacagctatccaaggagcaagtgctgagcttgtgaaaaaacagcttctattttattaaataatagtgttcctgcagggatgtctgaagtactctgcaaggctaattaggacagatcaatgtacacttacctctccagaaggctgaaaggtgtgtagtgactatgtgtcattaaaaatttacttgaccatgggcaacagatgtccatgaaagaatg

SEQ ID NO: 71387 - DNA, 1271 bp, Homo Sapiens
tttctagggatgtttttacttctgacttgacacatttttttctttccagtttaaaattggtggtgaatggtggacatggatcgattataaccgcttccaggagctcatccaggaatatgaagatagtggtggatcaaaaacgttcagcgcaaaggattatatggccagaactcctcactgggcattatttggtgccagtgaaagaggctttgatcccaaggacacaagacatcagagaaagaacaaatcaaaggctatttctggatgttgagattatctgatttcaaggtactgaaggacaaaaacttggatggcctcaaaaggttcttgaacaccactgtgattctccaaggacgaattacgtaaattatactttcatacaaaggagacgataaggcagtaaacatggagacacgggggacagcgtccacactcagagggcctgggccacagccccgatgtttcttttcagaactcagcccctttcctgattttacttctaagaggaaaattattttggggaggaactacacagtcgtgattagaatttatctgatggttttgtattataacttgtaagacctgccagaatgctagtcccgagagtgtcagacaaggaagaagtccctgggcctcttccccttacccggcccttagatttcatggagcagccacttagcattgaattgcactaccctgagctaaacgtgtctgtgctttctaagataagagcttgatccctttcttctatcttaagacagcacctcctgaaaagaatcgaagttgtcacaactctcaattattttttaaatactgcatagattgagttttggtttattaccaacccttcccagaattgcgttggatctaaaactactagatctcatcccattcccatgtaaattaccacagaccgcagtaccggggctggagcggagtgaagctgtctgctgtaagaggagtggccatgtgagggcatggagtcattagtctcacaaacacactttggactgaagaggatcatttctttttgttcgtgaggtcactgtccaggcctctcatatcatgaccagacggcgggtctccatcttctttcactcctgtggccctggctgctttacacaatctgttctataaggttcaggtgttttcaagttggaaagatcataaatactcaaaattgttttcaagttagcaagttcttttaacagtcttttatgcaaaaattgaattaataaaataatcttttgtaaagacttgcataaaaaaaa

SEQ ID NO: 71388 - DNA, 460 bp, Homo Sapiens
agaaaaggaacagcaggaagagaagtctggtttgttcaggaacatggggaggaatgaagatggtgaaagaagagctatgataactcctgctctccgagaagcccttactaaacaaggttatcagttgattgggagccactcgggggtgaagctttgcacctggcctgacattctttatgaaatttagaattgttgaagaactataacatttcagtagggttcaaggtggtcccaaaagttatataaaagattagtttttactataaacccttgtcttttactcagatcctagcatcccttttcacatggtttctccatgtatataacagaatcaagaaacaaattttaattaaacaatctgtaacagaatcaagaaacaaatacattttaattaaacaatctatatggaacaaacattcccaaattctaagaataaatttttctttaagttttaaaaaaa

SEQ ID NO: 71389 - DNA, 3438 bp, Homo Sapiens
tcctaggtagcgaggcctgggtggcgaattcggcacgaggaacagtttgcatgaaggtcctacgggaagtgaaggtgctggcaggtcttcagcaccccaatattgttggctatcacaccgcgtggatagaacatgttcatgtgattcagccacgagcagacagagctgccattgagttgccatctctggaagtgctctccgaccaggaagaggacagagagcaatgtggtgttaaaaatgatgaaagtagcagctcatccattatctttgctgagcccaccccagaaaaagaaaaacgctttggagaatctgacactgaaaatcagaataacaagtcggtgaagtacaccaccaatttagtcataagagaatctggtgaacttgagtcgaccctggagctccaggaaaatggcttggctggtttgtctgccagttcaattgtggaacagcagctgccactcaggcgtaattcccacctagaggagagtttcacatccaccgaagaatcttccgaagaaaatgtcaactttttgggtcagacagaggcacagtaccacctgatgctgcacatccagatgcagctgtgtgagctctcgctgtgggattggatagtcgagagaaacaagcggggccgggagtatgtggacgagtctgcctgtccttatgttatggccaatgttgcaacaaaaatttttcaagaattggtagaaggtgtgttttacatacataacatgggaattgtgcaccgagatctgaagccaagaaatatttttcttcatggccctgatcagcaagtaaaaataggagactttggtctggcctgcacagacatcctacagaagaacacagactggaccaacagaaacgggaagagaacaccaacacatacgtccagagtgggtacttgtctgtacgcttcacccgaacagttggaaggatctgagtatgatgccaagtcagatatgtacagcttgggtgtggtcctgctagagctctttcagccgtttggaacagaaatggagcgagcagaagttctaacaggtttaagaactggtcagttgccggaatccctccgtaaaaggtgtccagtgcaagccaagtatatccagcacttaacgagaaggaactcatcgcagagaccatctgccattcagctgctgcagagtgaacttttccaaaattctggaaatgttaacctcaccctacagatgaagataatagagcaagaaaaagaaattgcagaactaaagaagcagctaaacctcctttctcaagacaaaggggtgagggatgacggaaaggatgggggcgtgggatgaaagtggacttaacttttaaggtagttaactggaatgtaaatttttaatctttattagggtatagttggtacaatgcttcgttgtatttagtaagcctttacaagacttgttaaagatgtcagagtgccccaagctgccgttccttcccttcctgccccacaagctccttttcctgaatttcctacctaaatattaaccatatgcctagtctctgaaactaaaaacttggacctcatcctcaattattttctcctttcaactctgttgaccctctgtctggtcttcctctagaaggttctaccgcagaaattgatgtgtgctccctgccctcgtcactgcccaagcccgggcctgcacatactcactggactgttccagttttgacagctgccagtcttcctgcccctttcacactgcagctgaagttcattacctgaaggacgcctcatcatttcattccttggctccaaaccttctgctgcctctaagataaaagctcaacttcttaacagtgtacagtgtgcaacttccaacctttttatctgttctctccaccttcagtttagcgtcattccaaaaccacacccttgcaaagctttgtactccgcaccccagatgatctccaggcagctcagatctctttcctgcctttgccctgcactgttccccggtacttcctcctttattgtagcactcagctccccagccaatctgtacatccctcagaggcagcgatctgatgaattggtttttgaatcccagaaagggtctgccatggagttggcagtcatcacggtagatggcgtatgattttgctgaattttaaataaaatgaaaaccataaattacatgatgcttttattgacacttgacaactggcctaaataaaaagactctgactctaatacaagtccccttactgataataggcatgaaagagcaccattcttaaaatctaaaccctttaaaatcagttacggcaattcacttaaggagcttgagggccgtgttaaaaggagccagattttcacaagacctcatccacctctgcacattggctggcactgtcacactgcagcctccgatctgctggagtacagaccacagcaccacgtctgctacggtgagttcattcccagcgagccaagggctcttcccaagagcagagttcatggagcggaaaacagcggctttttctttactgcttccctcttttaactgaaaaatcgcaatatctacccagctatctataagggttgcgttgacagcattatgcttctggccaaacagagagaacaagaaacgtgcaatgttcccttcgccttcgatggggcacatcgtctggatgctgaatttcatctgcgtcttcggcacattcttccaaattaaagtgaatcccagctgatagtcttggcggggctgttttttattctgttctccaaagcacttgagaaggttttcaggcacgctcttgaccgaggagtgcgtgtgcaccgtggacaggaccctgaagtgctcacagagcagcctgtgcagcacaagcagggagaggggaggggaggccgggtttgcgttgatcacgatgtctttcagcgccccgtaatccttcccaagcactgaattcaagtccagcgcattggtggttaaagtcgtgggctcatccgcttggattatgttggttacatccaagtctgcatctggtgtttgaatcatcttggagaggccatcaactgcagctttcaactcatacagacgttttaaaatatcatcttggcgggactcaagagcttgcagagacaggttagactcttcctgcacgtggccagcgcccggcgctgggccgtagctcctgccgtgcacgttggggagccggtacatgcaggtgggaagctccacacggagaggcgcgccgcccccgtgatagggctttacctggtacatcggcatggcagaaccaaagcaaaagggggtagcgcgtgccaaaggccaacgctcagaaaccgtcagaggtcacgacggagaccggccacctcccttctgaccctgctgcgggcgttcgggaaaacccccccggccgtaatggccgaattcccgggcatatgtccggtaccgtcgactg

SEQ ID NO: 71390 - DNA, 1384 bp, Homo Sapiens
ctggaccggtccggaattctcgggatcgcccccagtcgtagcctcggacggtttctgagcgttggtgtttggcacgcgccaccctctcttgctttggttccgccatgccgatgtaccaggtaaaaccttatcacgggcgcggcgcgcctctccgtgtggagcttcccacctgcatgtaccggctctctaacgtgcaaggcaggagcggcggcccagcgcccggcgttggccacctacagtctttggtagatgagtggctggatagctacaagcaagaccaggatgcaggatttctggagcttgttaactttttcatctgatcttgtggatgtaaaggcaccacaccaaccccgtgggcactgagtggcggtggaagatggaccagcctgaaatgatcttgaaggaagccattgaaaaccatcagaacatgattaagcagtttaaaggagtaccgggcgtcaaagcagaacgctttgaagaaggaatgacggtaaagcactgtgcattgtccctcgtgggagaaccaataatgtacccagagatcaacaggtttttgaagctactccaccagtgtaaaatttccagcttcctggtcacaaacgcacaatttcctgcggaaatcaggaacctcgagccggttactcagctgtatgtcagtgtggatgccagtaccaaagacagcctgaagaaaatcgaccgcccactcttcaaggatttctggcagagattcattgacagtttaaaagccttggcagtcaagcaacaacgaactgtctacagactgacgctcgtgaaagcatggaacgtggacgagctccaggcctacgcgcagctcgtgtccctgggagaatcctgaacttcatcgaagtgaagggcgttacctactgcgaagaaagttcagcaagcagtcttaccatggcccacgtgccctggcatgagaaagtggtacagtttgtccgcgagctggtggatctgatccccgaatatgaaattgcatgtgaacacgaacactctaattgcctcctgatagcacacagaaagaccgcagtaccggggctggagcggagtgaagctgtctgctgtgagaggagtggccatgtgagggcatggagtcattagtctcacaaacacactttggactgaagaggatcatttctttttgttcgtgaggtcactgtccaggcctctcatatcatgaccagacggcgggtctccatcttctttcactcctgtggccctggctgctttacacaatctgttctataaggttcaggtgttttcaagttggaacgatcataaatactcaaaattgttttcaagttagcaagttcttttaacagtcttttatgcaaaaattgaattaataaaataatcttttgtaaaa

SEQ ID NO: 71391 - DNA, 1476 bp, Homo Sapiens
tgcagtaaccctaacggtttaaggtagcgaggcctgggtggcgaattcggcacgagggcgctagctgcagcatcggagtgtggcagtgctgggctggccggcgggctgggctgcggcccgcgcgcggccggcgatgcaggggggcaactccggggtccgcaagcgcgaagaggagggcgacggggctggggctgtggctgcgccgccggccatcgactttcccgccgagggcccggaccccgaatatgacgaatctgatgttccagcagaaatccaggtgttaaaagaacccctacaacagccaaccttcccttttgcagttgcaaaccaactcttgctggtttctttgctggagcacttgagccacgtgcatgaaccaaacccacttcgttcaagacaggtgtttaagctactttgccagacgtttatcaaaatggggctgctgtcttctttcacttgtagtgacgagtttagctcattgagactacatcacaacagagctattactcacttaatgaggtctgctaaagagagagttcgtcaggatccttgtgaggatatttctcgtatccagaaaatcagatcaagggaagtagccttggaagcacaaacttcacgttacttaaatgaatttgaagaacttgccatcttaggaaaaggtggatacggaagagtatacaaggtcaggaataaattagatggtcagtattatgcaataaaaaaaatcctgattaagggtgcaactaaaacagtttgcatgaaggtcctacgggaagtgaaggtgctggcaggtcttcagcaccccaatattgttggctatcacaccgcgtggatagaacatgttcatgtgattcagccacgagcagacagagctgccattgagttgccatctctggaagtgctctccgaccaggaagaggacagagagcaatgtggtgttaaaaatgatgaaagtagcagctcatccattatctttgctgagcccaccccagaaaaagaaaaacgctttggagaatctgacactgaaaatcagaataacaagtcggtgaagtacaccaccaatttagtcataagagaatctggtgaacttgagtcgaccctggagctccaggaaaatggcttggctggtttgtctgccagttcaattgtggaacagcagctgccactcaggcgtaattcccacctagaggagagtttcacatccaccgaagaatcttccgaagaaaatgtcaactttttgggtcagacagaggcacagtaccacctgatgctgcacatccagatgcagctgtgtgagctctcgctgtgaggattggatagtcgagagaaacaagcggcgccgggagtatgtggacgactctgcctgtccttatgctatggccaatgttgcaacaataattttttcagaagtgggtagaacgtgtgatttacatacgtaacatgggaaattgagcaccctagatctgaagccgagag

SEQ ID NO: 71392 - DNA, 508 bp, Homo Sapiens
  misc_feature (85)..(85): n is a, c, g, or t
tttagacttcagtcttcagagccccactcaggtgcctgactgttgttgggatgaaacaataaagatctatgaccctgcttgtccntactattcctgcttgagatacactactttggtcagaaacagaggatgttggctgaagaactgcctaacagcaaataaattaactatggaaaacatagacattatgcttttatatgctattcagatttcaaatctttccaatttaccctggaatcagttttgagggagctgataaagactttagctgactcgttaagcctgatacataagccatatttaaaattctaagaaataattaatgttatgatatatcttgtagtatctattaaaatgtctctgggtcataaaatggattaaaatatgggagatcagtaggttatacttatatagatagtgatatatttcatttttaatttgtcatttttgatgtaaaatataatcactgctgtgataaataaactatctattgatcatttatcatttt

SEQ ID NO: 71393 - DNA, 926 bp, Homo Sapiens
  misc_feature (663)..(718): n is a, c, g, or t
aattaggtctaggtacgaggcctgggttttgaattcggcacgaggggatggccaggaaattgctgtggtttacttccgggatggctacatgcctcgtcagtacagtctacagaattgggaagcttctactgctggagaggtcacatgctgccaagtgcccagacattgccacccagctggctgggactaagaaggtgcagcaggagctaagcaggccgggcatgctggagatgttgctccctggccagcctgaggctgtggcccgcctccgcgccacctttgctggcctctactcactggatgtgggtgaagaaggggaccaggccatcgccgaggcccttgctgcccctagccggtttgtgctaaagccccagagagagggtggaggtaacaacctatatggggaggaaatggtacaggccctgaaacagctgaaggacagtgaggagagggcctcctacatcctcatggagaagatcgaacctgagccttttgagaattgcctgctacggcctggcagccctgcccgagtggtccagtgcatttcagagctgggcatctttggggtctatgtcaggtgagccaatcaggagaagctctttccactacctgcttgcaagagtgccagccaagtgagccagcctagaggggaacactggaaannnnnnnnnnnnnnnnnnnnnnnnnnnnnnnnnnnnnnnnnnnnnnnnnnnnnnnngtttctttatctattaaatgaggccaaggacccaagactgcccacttaccagggtatcagatgaagcctgatgagaagtcctttgcaaccgtgaaggaaactcaaaatagcaccaagaggactcagaacacctggtttgacaccctagactagaggagatcagagaggctagagatctaaaatctaggtttcttggttaggaagtccg

SEQ ID NO: 71394 - DNA, 2037 bp, Homo Sapiens
ccccccactccccaccctcgttgtcaacaaagcaggctgttataaacgacggcagtaactacaacggtcctaaggtagcgaggcctgggtggcgaattcggcacgagggcctgggtagcggcgcgagggccgggagaaccgttcgcggaggaaaggcgaactagtgttgggatggccaccaactgggggagcctcttgcaggataaacagcagctagaggagctggcacggcaggccgtggaccgggccctggctgagggagtattgctgaggacctcacaggagcccacttcctcggaggtggtgagctatgccccattcacgctcttcccctcactggtccccagtgccctgctggagcaagcctatgctgtgcagatggacttcaacctgctagtggatgctgtcagccagaacgctgccttcctggagcaaactctttccagcaccatcaaacaggatgactttaccgctcgtctctttgacatccacaagcaagtcctaaaagagggcattgcccagactgtgttcctgggcctgaatcgctcagactacatgttccagcgcagcgcagatggctccccagccctgaaacagatcgaaatcaacaccatctctgccagctttgggggcctggcctcccggaccccagctgtgcaccgacatgttctcagtgtcctgagtaagaccaaagaagctggcaagatcctctctaataatcccagcaagggactggccctgggaattgccaaagcctgggagctctacggctcacccaatgctctggtgctactgattgctcaagagaaggaaagaaacatatttgaccagcgtgccatagagaatgagctactggccaggaacatccatgtgatccgacgaacatttgaagatatctctgaaaaggggtctctggaccaagaccgaaggctgtttgtggatggccaggaaaattgctgtggtttacttccgggatggctacatgcctcgtcagtacagtctacagaattgggaagcacgtctactgctggagaggtcacatgctgccaagtgcccagacattgccacccagctggctgggactaagaaggtgcagcaggagctaagcaggccgggcatgctggagatgttgctccctggccagcctgaggctgtggcccgcctccgcgccacctttgctggcctctactcactggatgtgggtgaagaaggggaccaggccatcgccgaggcccttgctgcccctagccggtttgtgctaaagccccagagagagggtggaggtaacaacctatatggggaggaaatggtacaggccctgaaacagctgaaggacagtgaggagagggcctcctacatcctcatggagaagatcgaacctgagccttttgagaattgcctgctacggcctggcagccctgcccgagtggtccagtgcatttcagagctgggcatctttggggtctatgtcaggcaggaaaagacactcgtgatgaacaagcacgtggggcatctacttcgaaccaaagccatcgagcatgcagatggtggtgtggcagcgggagtggcagtcctggacaacccataccctgtgtgagggcacaaccaggccacgggaccttctatcctctgtatttgtcattcctctcctagccctcctgaggggtatcctcctaaagacctccaaagtttttatggaagggtaaatactggtaccttcccccagctttccatctgaggaccagaaaagttgtgtctcccttagatgagatctagacgcccccaaatccttgagatgtgggtatagctcagggtaagctgctctgaggtaaaggtccatgaaccctgccccactcctgtcagcccctcatcagccttttcagcaggttccagtgcctgacttgggataggactgagtggtaggaggagggggagtggaggggcatagcctttccctaattctgccttaaataaaactgcattgctgattcagtaagtttctctccattctaatatatacccccgtgccgaattctt

SEQ ID NO: 71395 - DNA, 1044 bp, Homo Sapiens
gccccctgagcctgggttagcggcgcgagggccgcgagaaccgttcgcgcaggaaagagcgaactagtgttgggatggccaccaactgggggagcctcttgcaggataaacagcagctagaggagctggcacgtgcaggcctgtggacctgggccctggctgagcggagtacttagcttgaggacctcgacgatggagcccacttcctcggaggtggtgatgctatgcccctagttcagcgctctttcccctcactggtccccagtgccctgctggacgctaagcctatgctgtgcagatggacttcaacctgctagtggatgctgtcagccagaacgctgccttcctggagcaaactctttccagcaccatcaaacaggatgactttaccgctcgtctctttgacatccacaagcaagtcctaaaagagggcattgcccaggtaaccattcccagccctactccagtctgtaacctgtccctcccatctctgtttgttttctgttgttgcttgaagaatttggtccaggccctcagctcatgggaatctgcctctcactggtcctcactgggtttatcccagtgaccaattctaggatgaccagaagaatgattccactgggcttgggagtgtttgctggtacctctaatctctgtgtagagttcatggtacctgtgtgctctgtggctaggtcctcagagtcagtccctgggcaggtactgtcagccttcagttttccccacagactgtgtacctggtgcctgaatcgatcagaactacatgttccaagcgcagcgcagatggctcccccagccctgaaacagatcgaaatcaacaccatctctgccagctttgggggcctggcctcccggaccccagctgtgcaccgacatgttctcagtgtcctgagtaagaccaaagaagctggcaagatcctctctaataatcccagcaagggactggccctgggaattgccaaagcctgggagctctacggtcacccaatgctctggtgctactgattgctcaagagaaggaaagaa

SEQ ID NO: 71396 - DNA, 933 bp, Homo Sapiens
  misc_feature (56)..(75): n is a, c, g, or t
  misc_feature (691)..(800): n is a, c, g, or t
  misc_feature (810)..(824): n is a, c, g, or t
  misc_feature (830)..(848): n is a, c, g, or t
acagtgagctgagattgcgccactgtactcctgggcaacagcgagactccgtctcnnnnnnnnnnnnnnnnnnnngaaaccatttattttaaaaatgattagattgctatgcctcaactcatagaagatgaacccttcaagaaaacgtgaagtagaacgggtgggccagaaatgaaaacaggcaagtaaagtatttcttcggaaaacattttatcaaaccaaatgttaaaaagactttccttttgtaaaactggattagagaagacttttcaatgggttatctctaggatgatcagtagttgagcacttaaaaactgcagagaaaactgaaagttatgttccagataactttccgttgtttaccaaattttcttagacttggtcatcatcaggaagcatttgtaaaaataaaaatctccaccaattactggcccatctcggacttgctgaatcaatttgataggattaatctccagtgaagctgtgtttacagggcattccaagtgattcttatcaggaagtgtgaaaaacactcctgtacataatcggttaatttaaaattttacttaataagtgaacaagtaatgaagatttcacctgtttacttagggtatctacccagacccatcgattctgagttcgggagatgattttgaaattactgttttccaaataaaggtgctcccttctnnnnnnnnnnnnnnnnnnnnnnnnnnnnnnnnnnnnnnnnnnnnnnnnnnnnnnnnnnnnnnnnnnnnnnnnnnnnnnnnnnnnnnnnnnnnnnnnnnnnnnnnnnnnnnccttggcggnnnnnnnnnnnnnnnaaaaannnnnnnnnnnnnnnnnnngggcccggggccccaaaaggaaaggaaacggggcaaaacttgttcccaagaaaacccgggcataaaaaagggttggaatcccccc

SEQ ID NO: 71397 - DNA, 1198 bp, Homo Sapiens
atttgaaacaacaactttattagcacctggcactaggcggagagaggcggtaagccgcgaggaggaaagggactcacgtcccgctgtggaccgatcctgctaagcagagaatcgctgtggccggacgacggggcgtcgagacaagaagaaagacgttggcaactcagaggactggttgcggcgttagacaagaaagcaaggcctttaagcagggattcggggtggacgtgggggtgggccgaagcgaagccggaaacaggaaactacaactcccacaaggcctagggccacgtcccgccgtcctcggctgctgagcctgatgggacaagtagttttgcgaacggcttaacctacagattgaagaggtcggaagctctgaggcccggggcttccggaggtcgcggagatggaattggagcagagagaagggaccatggcagccgtgggctttgaggagttctcagcgccgccaggctcagagttggcgttgcctcccctatttggtggccacatcctggagagcgagctggagacggaagtggagtttgtgtcaggtggtctgggcggctcagggctccgggagcgagatgaagaggaagaggcagcccggggtcggcggcggcgccagcgggaattaaatcgcagaaagtaccaggcactaggtcggcgctgccgggagatcgagcaggtgaacgagcgggtcctgaacaggctccatcaggtgcagaggataactcggaggctgcagcaggaacggaggttcctcatgagagtgctggactcctacggggatgactaccgggccagccagttcaccattgtgctggaggatgagggcagccagggcacggatgcccccaccccaggcaatgcggagaatgagcctccagagaaagagacactgtccccgcccagaaggactcctgcacccccagaacccggcagcccagcccccggtgaggggcccagtgggcggaagaggcggcgagtgccacgggatggacgccgagcaggaaatgcgctgactccagagctggccccggtgcagattaaggttgaggaagactttggctttgaagcagatgaggccctggattccagttgggtttctcggggtccagacaaactgctgccctacccgaccctggccagcccagcctctgactgacgcatgcccaataaactgaccccacactca

SEQ ID NO: 71398 - DNA, 1035 bp, Homo Sapiens
  misc_feature (25)..(26): n is a, c, g, or t
  misc_feature (56)..(57): n is a, c, g, or t
  misc_feature (60)..(61): n is a, c, g, or t
  misc_feature (77)..(77): n is a, c, g, or t
  misc_feature (80)..(80): n is a, c, g, or t
  misc_feature (88)..(89): n is a, c, g, or t
  misc_feature (191)..(191): n is a, c, g, or t
aggcagacaccggttcccgtcttcnntaagcgcagcagctcgggccggtacaacgnnagnnagacgggctcagcagnagncgagccgnncccagcgcctgccgagggagaaggcccagcccagctcccatcccgtgggcagccgctgtgaggtgcgggcggcgggacaatccccctcgccggggcaccgtncatgtatgtaggtctcacagatttcaagcctggctactggattggtgtccgctatgatgagccactggggaaaaatgatggcagtgtgaatgggaaacgctacttcgaatgccaggccaagtatggcgcctttgtcaagccagcagtcgtgacggtgggggacttcccggaggaggactacgggttggacgagatatgacacctaaggaattcccctgcttcagctcctagctcagccactgactgcccctcctgtgtgtgcccatggcccttttctcctgaccccattttaattttattcattttttcctttgccattgatttttgacactcctgcattagattctctagaacccctcccgcatttattctaaaataaacacaaattttgtcggccgctttaggcctatctagaagtttttcaagacccattctgttgggccccccgcggcccaccaatgttcacccggaaccttggccaattatgccgtcttccataaggagaatcccttggttcctttaacttaagggccttgggatctccccacttaaccaacaacaccccctcgctggtgcaacccaaaacctttttcccgaccaaacccccaaatgcgaatttcctgaaggaccatttactggcctcccacttaaccccggttccccacccgccccctctaaatatccaaccttacattcccttccgcctggccccttcctccgccatataaccgtctgccaattcccatataaatattctctcggccgaacctcggaaagaccttctccacaccgcggacttgccataaaccccttgaatccccatattcgtataattcaccccccc

SEQ ID NO: 71399 - DNA, 2108 bp, Homo Sapiens
ttgggtttctagtgaatttaatgcatgagtctcaaaaatcaatggcaaaggaaaaaatgaataaaattaaaatggggtcaggagaaaagggccatgggcacacacaggaggggcagtcagtggctgagctaggagctgaagcaggggaattccttaggtgtcatatctcgtccaacccgtagtcctcctccgggaagtcccccaccgtcacgactgctggcttgacaaaggcgccatacttggcctggcattcgaagtagcgtttcccattcacactgccatcatttttccccagtggctcatcatagcggacaccaatccagtagccaggcttgaaatctgtgagacctacatacatgacggtgccccggcgaggggattgtcccgccgcccgcacctcacagcggctgcccacggggatggagctggcctgggccttctcctcggccaggcgctgggcggcctcggcctcctgctgagcccgctcctcctcgttgtaccggccgagcttgctgcgcttcaggaaagagcggaccgtgtcttgcctctggtcgtaggcttcttgtgagatcgtgtacttctccacccgggacacgtcctcatactcaccaaggcgggcgccactgtggtcaatgacgtggatgcggcagccgtcatctacagggtaggagcccaggagcgcatcctcttgatccagcttgctgtagaacttgtcgtcaactccatacagctccagttccatgcaggaagcagggctgcccaccagcaactccagtttacacttgaactcagcgatggtgaggctgcggctgtatcgcttctcggagcggaaggtgttgagggagctgctgatgaaaacggtcaccgtgggtgccgacacccccgtcacctccatcttgccgcgccctgcggatgcctgcagcgcggtccagccgcctcacacccgctccgcagccgccgccgccgctgctgctgctgctgggctatcagccccgcctcctgctccgtgcctgaccaatccgcgctctcctgccaggagcgtccgccaatcgccgccgtcccttccccaccgccaggaagagggctctccttactcttgggccagcccagccaatccagaggggccttccatagttcacggttcttccaatagcggcccggaaaaggaccagaacaggcggcgaagactgaagcccggaggtaggagtggcaagagctcgcccagtccgcgaagggtaaactcgcgcatgcgcactggccttcaaccaagccaagcgccttggcttctgtcctggatgctcagtgttttgcggtttacgatgcgcatcgttttcccggctctggcaccagatccatactattctgtaaactgaggcggcgatgcccaaaaattggaagcaattactctaagatatcaaaagattgaagcaagccatgaaacctctgcgcggagagagccgaccccgacgcggcggggagccagcacgtgtgcgcagctccgccctcttttggcgaagcacctaggcctggcccctcccgcgacctgtagcgcggcggaccaagcgcagaaggctgggagggctgcgcgggctgcgcgtcgccatggagcccgacgggacttacgagccgggcttcgtgggtattcgcttctgccaggaatggtgaggcggagggagcgggtgatgttagaaggcgggcgaggaatggctccagaactaacccctggcacctccccctccccacagtaacaacatgctgtaccccaaggaagacaaggagaaccgcattctgctctacgcgtgccggaactgtgattaccagcaggaggccgacaacagctgcatctatgtcaacaagatcacgcacgaagtggacgaactgacccagattatcgccgacgtgtcccaggaccccacgttgccgcggaccgaggaccacccgtgccaaaagtgcggccacaaggaggctgtgttcttccagtcacacagtgcgcgggccgaggacgccatgcgcctttactacgtgtgcacagccccacactgcggccaccgctggaccgagtgacctcctctctcccccgagtgtaataaacaccagattccatgaaa

SEQ ID NO: 71400 - DNA, 1208 bp, Homo Sapiens
  misc_feature (721)..(733): n is a, c, g, or t
  misc_feature (738)..(754): n is a, c, g, or t
cgcatagtactatagacccgtgtgacaaaaagcaaggctggtaccggtcggaatccgggatatcgtcgaccacgcgtcggcgatgcccaaaaattggaagcaattactctaagatatcaaaagattgaagcaagccatgaaacctctgcgcggagagagccgagcccgaggcggcggggagccagcaagtgtgcgcagctccgccctcttttggcgaagcacctaggcctggcccctcccgcgacctgtagcgcggcggagcaagcgcggaaggctgggagggctgcgcgggctgcgcgtcgccatggagcccgacgggacttacgagccgggcttcgtgggtattcgcttctgccaggaatgtaacaacatgctgtaccccaaggaagacaaggagaaccgcattctgctctacgcgtgccggaactgtgattaccagcaggaggccgacaacagctgcatctatgtcaacaagatcacgcacgaagtggacgaactgacccagattatcgccgacgtgtcccaggaccccacgttgccgcggaccgaggaccacccgtgccaaaagtgcggccacaaggaggctgtgttcttccagtcacacagtgcgcgggccgaggacgccatgcgcctttactacgtgtgcacagccccacactgcggccaccgctggaccgagtgacctcctctctcccccgagtgtaataaacaccagattccnnnnnnnnnnnnntacannnnnnnnnnnnnnnnnacagacaacaacaaaccttgtcgggccgcctcgcgccctcgaagaagcttttcaaaaccatttcgttttggccgcgcggggccccagaaaggtaaagggaaacatgggtcaataccctgctttcccaaggaaaatccctgggtcatggcactagtgggcttgggattttctctaccaaataaaaaaaccgcccgcgggggggaaccccggaagcggttcctggaaaaaaatccccacaaagggagaggtcccgggagggcctctctcaccggggattccatacccaccaggggaagtcccaaggccggagcctttctgaatattccaaatatcaatggtcccccgcccgccctggacgcccatcgtctatcccgggcgataggtgggtgtgtttcttcctcgcactttatcgcgccgtttctctgtcaccctcactattggggtggatataccc

SEQ ID NO: 71401 - DNA, 773 bp, Homo Sapiens
  misc_feature (590)..(615): n is a, c, g, or t
agaatacaaaaatatatttatataacctagtgagaaacagttgaaaatgaaacaaactcatatcatatataatagcagtacaattatagaataatataaatccaacaacatatgttcaactactatatgattaaaatacaagatactgatgaaagatgtcaaagaagatccacataaatgcagcaatataatgtgtttgtatgtcagaagacttagtaattttaagacgtgtatttcttcccaaatatttagacagattgttatcgaaatgaacaagctaattctaaatgtatgaaaaaggcaaatgagccggaatagccaatacaatttaggaaacaacacagttggaagactcaactacctgatttccaaacttattataaagtgtacagcagttcagacaatgtagtaatggcaaaattaaagacatgtagatttatgtttaagaaaagacagtgaagaaatagatgaacacacacacatagagacagaaagagaagatatatgtccttttattttattctaaggcacaaagaaaatttgatagagaaaagatcaactcttcaaaaacattcgaatacacatatgcnnnnnnnnnnnnnnnnnnnnnnnnnnctttgacccatacttcatacaagttttaaaactcaagaaggatattatacatttatagaaaccctaagattttaaaacttctggaagaaaacaaaagacaaaatatttgtgacttcacattgggtaatttttttagatatcatcaataatacaattta

SEQ ID NO: 71402 - DNA, 921 bp, Homo Sapiens
  misc_feature (413)..(425): n is a, c, g, or t
tttggtataatcagtgcttcataaaggcatcctaatttttatatctttaaagacaacctaccatgaaataagaagaatccataattataattctaaaaaccatgtaatcaacttgtgtccatgaactcacgcatagcagcatcctctactcagggacacattatgttgctatgaatccttttaagaattctttgagtttttcttcctttctacttctacctcattatatctacacctttcttaactaccttgcagtcaaaagccaaactacctgggatgctgctcctctagtttgtcttcagctaaggatagaggcaaagaatgagggaaggggaggaaaaagggagcagggatacgagaaacagaaaggaagaaaaaagaatccttttattttccaccctctcttcgcccannnnnnnnnnnnncccttcactgtacatctaattcttttgacccacttcaattttcatcatagtaggtagagccacatcttgagaaaccttaaaactatagatttactacaaaaaagatgagctaatacaaagtctaaagtaaactaaaagaggggttgatttacatctggcacaacttagtctttgttccaatcattttagaagtctcaatttaactccaggctagactccagtttgttctgggcctctcaggaattatgttttgtcatttacattgtatcagacagactacctctcaaaaaatgtatatcttaaatcttacggatgtgaaacaggtagggaagaaataagtatagactgtattagctcacaggattcacactataaagtacactgactcaaattttctctaatcattcatactcgcacattcactcaagcatacatactagacataaaaattgtgcaagatcaagcatcagctttctattttaaaagccttaattta

SEQ ID NO: 71403 - DNA, 927 bp, Homo Sapiens
  misc_feature (43)..(81): n is a, c, g, or t
  misc_feature (86)..(120): n is a, c, g, or t
gtaagatctatagactcactatagggcgctagctctttatagnnnnnnnnnnnnnnnnnnnnnnnnnnnnnnnnnnnnnnntgcgnnnnnnnnnnnnnnnnnnnnnnnnnnnnnnnnnnncagtcgacggtaccggacatatgcccgggaattcggccattacggccgggggagattgctgggcggttcttgccggaacgcggttcttgccggaagcggagagcggctgatcgcagtccggaggtgaggcggaactctgagcaggtggtccattatggctgacatgcaaaatctggtagaaagattggagagggcagtgggccgcctggaggcagtatctcatacctctgacatgcaccgtgggtatgcagacagtccttcaaaagcaggagcagctccatatgtgcaggcatttgactcgctgcttgctggtcctgtggcagagtacttgaagatcagtacagagattgggggagacgtgcagaaacatgcggagatggtccacacaggtttgaagttggagcgagctctgttggttacagcttctcagtgtcaacagccagcagaaaataagctttccgatttgttgccacccatctcagagcagatcaaagaagtgataacctttcgggagaagaaccgaggcagcaagttgtttaatcacctgtcaactgtcagcgaaagtatccaggcctgagctgggtgcctatggtcccaacctggccttatgtgaagaaatgatgatgccccctgtttaacaaaccaatcctcaaattaaaaatgtgaataaaacagtaaatgggcaaatttttaatttttgaaaactgcggtcattaagattcttacccggagcgtgaaaaagggctgtgtaaaaattaaaaacctatgatcttcgaaggcctcccccccagacgatatcttatattg

SEQ ID NO: 71404 - DNA, 788 bp, Homo Sapiens
gggggagagcggctgatcgcagtccggaggtgaggcggaactctgaggtggtccattatggctgacatgcaaaatctggtacaaagattggagagggcagtgggccgcctggaggcagtatctcatacctctgacatgcaccgtgggtatgcagacagtccttcaaaagcaggagcagctccatatgtgcaggcatttgactcgctgcttgctggtcctgtggcagagtacttgaagatcagtaaagagattgggggagacgtgcagaaacatgcggagatggtccacacaggttttgaaagttggagcgagctctgtttggttaccagcttctcagtgtcaacagcccagcagaaaataagctttccgatttgttggcacccatctcagagcagatcaaagaagtgataaccctttccggagaaagaaccgaggcaccaagttgtttaatcacctgctcagcttgtcagcgaaagtatccaggccctgggctgggtggctatggctcccaagcctggcccctttatgtgaaaagaaatgaatgatgcccgccatgtttttatacaaaccgagtcccccaaaaaatacaaagatggggataaaaaaacattgtagaatgggcccaaagctttattttaagtatatggaccaaaacctgccaggcttacatttaaggagttcccataccaaccggacttggccctggaaaccaaaacggggcccctgtgggcaaaaagaacttgaagcgggacctgccaatctgggaacccttctgcccggattaaggg

SEQ ID NO: 71405 - DNA, 2707 bp, Homo Sapiens
  misc_feature (1294)..(1309): n is a, c, g, or t
  misc_feature (1695)..(1700): n is a, c, g, or t
  misc_feature (1702)..(1752): n is a, c, g, or t
  misc_feature (1763)..(1769): n is a, c, g, or t
  misc_feature (1772)..(1772): n is a, c, g, or t
  misc_feature (1774)..(1774): n is a, c, g, or t
  misc_feature (1776)..(1776): n is a, c, g, or t
  misc_feature (1779)..(1780): n is a, c, g, or t
  misc_feature (1782)..(1783): n is a, c, g, or t
  misc_feature (1788)..(1894): n is a, c, g, or t
  misc_feature (1924)..(1936): n is a, c, g, or t
  misc_feature (2104)..(2104): n is a, c, g, or t
  misc_feature (2107)..(2107): n is a, c, g, or t
  misc_feature (2296)..(2296): n is a, c, g, or t
  misc_feature (2343)..(2343): n is a, c, g, or t
  misc_feature (2346)..(2346): n is a, c, g, or t
  misc_feature (2348)..(2348): n is a, c, g, or t
  misc_feature (2352)..(2352): n is a, c, g, or t
  misc_feature (2359)..(2360): n is a, c, g, or t
  misc_feature (2364)..(2365): n is a, c, g, or t
  misc_feature (2370)..(2370): n is a, c, g, or t
  misc_feature (2427)..(2427): n is a, c, g, or t
ctatgggcgagagggtatgaagtcgacggcgcgccgaattcggcacgaggcctaaaccccaaaccagcccatcccccaaacgagccacaaagaaggagccagctgtacttgaactggagggcaagaagtggagagtggaaaatcagtgaaaatgtttccaacctggtgattgaggacacagagctgaaagcaggtggcttacatatacaagtgtgtcaacacgacattgcaaatcaagggcaaaattaactccattacagtagataactgtaagaaacttggcctggtattcgatgacgtggtgggcattgtggagataatcaacagtaaggatgtcaaagttcaggtaatgggtaaagtgccaaccatatccatcaacaaaacagatggctgccatgcttacctgagcaagaattccctggattgtgaaatagtcagtgccaaatcttccgagatgaatgtcctcattcctacagaaggcggtgactttaatgaattcccagttcctgagcagttcaagaccctatggaacgggcagaagttggtcaccacagtgacagaaattgctggataagcgaagtgccactgggttctttgccctcccttcacaccatgggataaatctgtatcaagacggttcttttctagatttcctctacctttttgctcttaaaactgcttctctgctctgagaagcacagctacctgccttcactgaaatatacctcaggctgaaatttggggtgggatagcaggtcagttgatcttctgcaggaaggtgcagcttttccatatcagctcaaccacgccgccagtccattcttaaggaactgccgactaggactgatgatgcattttagctttgagcttttgggggttattctaccaacaaacagtccattggaaagaaaacagtccctggaattaacagatcagaatgttcacactggttaatctttttttaacaatgagcatgaaggtagcagaagctggtgtgtttccagatggttcttctaaccaaactaatttttcactgttgacaagcgaggcaagggttgcactggaccaaaggctgaggcttggccatctagcattccatacaaaattgtttcctataagcattccttttattctctattctatcctgggtctgcctcaaccgtgagataggagagtctctggtactagctgctgtagcagtgcccttcatccagggcagttaatggagtcttggaccctttctttctctgggatccctgcccagcaccttcctatagagatgactttaaaaggnnnnnnnnnnnnnnnncaaacccacatgatttcaaggagtctggcattcctgaatccttcttccctgccaggtgcctgtcacctgtcttcactgcctccttttccctgtcatgctcatcagcttatggcttctgtctaagcacctgaacagaggactgaaacctccactgcaggctggttttaggtcttgaattatgtaagaatcttgcacagcactgctaatgtaaatttcagttgtttttccctctaggacaaacacttaccaaaatatgcaacttttttttggtgggaagagagattgtcctgtgatttctacccatttcctgaggcctgtggaaataaacctttatgtacttaaagttatacagaaaatagaataaagttaataccaaacttgaaaannnnnnannnnnnnnnnnnnnnnnnnnnnnnnnnnnnnnnnnnnnnnnnnnnnnnnnnaaacacccccnnnnnnnaanancnaanncnnactcnnnnnnnnnnnnnnnnnnnnnnnnnnnnnnnnnnnnnnnnnnnnnnnnnnnnnnnnnnnnnnnnnnnnnnnnnnnnnnnnnnnnnnnnnnnnnnnnnnnnnnnnnnnaaactatccattactcctatttttcgcttnnnnnnnnnnnnntatccgaacgtcactttttctaataaaaacccgagggtggggcaggcgggctaccacacgcccgggtacccccacctcgcccagagggctcaatcaacctcctccgccccctattagaccactctctaattagccaagatcctgcgacaaaggtattctcgtgccatntgncccccacccccgcacaccacgtttagaggtacatacacacgcgctgccgcgctcacaccgaatacacgctcatgctactgcctagtgtggtattccgacccgccgccccacatcatgacgagccgacccgcattattggtgtcttgtcgccacaccgctacttctctcgccgctgtacgtagtgacacntctctctcctaagacgatgcgccaccagatgtactacacccgactcncananccanctcggtnntatnncacgntatatcactcccccctgctccgccctccgtcatagacgagtcgcccgctcggccganacgttgcacttttatcgtctacaccccgcgcgacggccccgcacgatttatccgcacatataactatgatcgccaacccttcttactctcgatcacaccccacacagagatgcgaaaatatcacctcgcccatcactcggacacaatgacgatctcccgtcacccctacgcaagacgatctatctacactcgactaccgacgtaggcgaccatgttaccaccctcctctccccgacacagatttattgcacaccgcctactcaatcacagcctcagccac

SEQ ID NO: 71406 - DNA, 889 bp, Homo Sapiens
  misc_feature (849)..(849): n is a, c, g, or t
ggcgagagagtatgaagtcgacggcgcgccgaattcggcacgagggcccagtgagggcccggaagtgggtcgcgcggagattgctgggcggttcttgccggaagcggagagcggctgatcgcagtccggaggtggtccattatggctgacatgcaaaatctggtagaaagattggagagggcagtgggccgcctggaggcagtatctcatacctctgacatgcaccgtgggtatgcagacagtccttcaaaagcaggagcagctccatatgtgcaggcatttgactcgctgcttgctggtcctgtggcagagtacttgaagatcagtaaagagattgggggagacgtgcagaaacatgcggagatggtccacacaggtttgaagttggagcgagctctgttggttacagcttctcagtgtcaacagccagcagaaaataagctttccgatttgttggcacccatctcagagcagatcaaagaagtgataacctttcgggagaagaaccgaggcagcaagttgtttaatcacctgtcagctgtcagcgaaagtatccaggccctgggctgggtggctatggctcccaagcctggcccttatgtgaaagaaatgaatgatgccgccatgttttatacaaaccgagtcctcaaagagtacaaagatgtggataagaagcatgtagactgggtcaaagcttatttaagtatatggacagagctgcaggcttacattaaggagttccataccaccggactggcctggagcaaaacggggctgtggcaaaagaactgagcggactgcatctggaaccctctgcccgatcaggtcctccttccccctccacaaggnccccccttctccccccagtctcttacagtttcaggcgtcc

SEQ ID NO: 71407 - DNA, 1733 bp, Homo Sapiens
  misc_feature (771)..(806): n is a, c, g, or t
ggggattgctgggcggttcgtgccggaagcggagagcggctgatcgcagtccggaggtgaggcggaactctgaggtggtccattatggctgacatgcaaaatctggtagaaagattggagagggcagtgggccgcctggaggcagtatctcatacctctgacatgcaccgtgggtatgcagacagtccttcaaaagcaggagcagctccatatgtgcaggcatttgactcgctgcttgctggtcctgtggcagagtacttgaagatcagtaaagagattgggggagacgtgcagaaacatgcggagatggtccacacaggtttgaagttggagcgagctctgttggttacagcttctcagtgtcaacagccagcagaaaataagctttccgatttgttggcacccatctcagagcagatcaaagaagtgataacctttcgggagaagaaccgaggcagcaagttgtttaatcacctgtcagctgtcagcgaaagtatccaggccctgggctgggtggctatggctcccaagcctggcccttatgtgaaagaaatgaatgatgccgccatgttttatacaaaccgagtcctcaaagagtacaaagatgtggataagaagcatgtagactgggtcaaagcttatttaagtatatggacagagctgcaggcttacattaaggagttccataccaccggactggcctggagcaaaacggggcctgtggcaaaagaactgagcggactgccatctggaccctctgccggatcaggnnnnnnnnnnnnnnnnnnnnnnnnnnnnnnnnnnnnagtctctaccagttcaggctcagatgagtctgcttcccgctcagcactgttcgcgcagattaatcagggggagagcattacacatgccctgaaacatgtatctgatgacatgaagactcacaagaaccctgccctgaaggctcagagtggtccagtacgcagtggccccaaaccattctctgcacctaaaccccaaaccagcccatcccccaaacgagccacaaagaaggagccagctgtacttgaactggagggcaagaagtggagagtggaaaatcaggaaaatgtttccaacctggtgattgaggacacagagctgaaacaggtggcttacatatacaagtgtgtcaacacgacattgcaaatcaagggcaaaattaactccattacagtagataactgtaagaaacttggcctggtattcgatgacgtggtgggcattgtggagataatcaacagtaaggatgtcaaagttcaggtaatgggtaaagtgccaaccatatccatcaacaaaacagatggctgccatgcttacctgagcaagaattccctggattgtgaaatagtcagtgccaaatcttccgagatgaatgtcctcatttcctacagaaggcggggactttaatgaattcccaagtcctgagcagttcaagaccctatggaacgggcagaagttggtcaccacagtggacagtaaatttgctgggataaaccaaagtgcccactggggttctttggccctcccttcaccccaatggggataaaatcctggatcaagaacgggttcctttttctagaattcccttctaacctttttttgctccttaaaaacggccttcttctgggctctgaaaaaaaccaaaaggctaacctggcccctttcacctggagaacaataacccctcgagggtttgaaaaatttgtggc

SEQ ID NO: 71408 - DNA, 866 bp, Homo Sapiens
  misc_feature (779)..(779): n is a, c, g, or t
ggctagggtggatttggcaggggagacctgtgtttgcattgctcccaatactgttgatggctggcggcactgagctggatgggtggaagggcacgtgtccattttcccggggtggcttgtcctgccagcctggccctgcctccccagggcctagctctgcagggcccccccactcatctgagccttgacgtgaatggtaggagggctctggccgggagcggaagccactagccaaccgctcttccaggtggctcagccagagggccagtgcgttgcggtcctccagtgtggtggctgggtggatgagggcataggaaagcagctggcgactctcctcgatgaaagcattgctctcgattgagtaggccagcactttctgcagtagcctcatgtactccgacttggcctctgtgttgcctggctgaagcaggggaaggtgggacagcaggagggacaccaccttctctttggactcctgctgccactgcctgacgatggctacagaagggataagaagaaatatcaggagagccagggtggggtactcctattcacctgagagcactgcctatggcctattccctaagctccaatcttcttttcataacgattgtcttttcataactcccaaacttatccctcatataggtgagatcaaacacactgaccctgcctctggagtaatttttgtcttaatttttttaaagagatgggttctcactatgttgcacaggctcagtctagtggctattcacaagtgcaatcccactattgatcangcacgggagttttgacctgctccatttcaaactgggccagttacccctccttagcaaccaagtggagcagggatcctctagatacca

SEQ ID NO: 71409 - DNA, 1615 bp, Homo Sapiens
  misc_feature (462)..(491): n is a, c, g, or t
  misc_feature (1417)..(1429): n is a, c, g, or t
aacttacggctaggtacgaggcctgggtttgaaatcggcacgaggtggtttccgtcatgtggaaagtgatgcgtgggcgttccctgcataaaggcaccttggggcttccctgccgcatcctctcccctcaggaaggggactgacctgggcttgggggaagggacgtcagcaaggtggctctgaccctcccaggtgactctgccaagcagctgtggcccccagggctaccctacacaacgccctccccaggcccccctaagctgctctcccttggaacctgcacagctctctgaaatggggcattttgttgggaccagtgacccctggcatggggaccacaccctggagccctggtgctggggacctcctggacaccctgtccttcactcctttgccccagggacccaggctcatgctctgaactctggctgagaggatgctgctcaggagccagcacaggannnnnnnnnnnnnnnnnnnnnnnnnnnnnnttacaccagagggccatcgtgacgtagacaggatgccaggggcctggccagcctcccccaatgctggggagcatccctgggcctggggccacacctgctgccctccctctgtgtggtccaagggcaagagtggctggagccgggggactgtgctggtctgagccccacgaaggccttgggctgtgcgtccgaccctgctgcagaaccagcagggtgtcccctcgggcccatctgtgtcccatgtcccagcacccaggcctctctccaggtctccttttctggtcttttgccatgagggtaaccagctcttcccagctggctggggactgtcttgggtttaaaactgcaagtctcctaccctgggatcccatccagttccacacgaactagggcagtggtcactgtggcacccaggtgtgggcctggctagctgggggccttcatgtgcccttcatgcccctccctgcattgaggccttgtggacccctgggctggctgtgttcatccccgctgcaggtcgggcgtctccccccgtgccactcctgagactcccaccgttacccccaggagatcctggactgcctgactcccctccccagactggcttgggagcctgggccccatggtagatgcaagggaaacctcaaggccagctcaatgcctggtatctgcccccagtccaggccaggcggaggggaggggctgtccggctgcctctcccttctcggtggcttcccctacgccctgggagtttgatctcttaagggaacttgcctctccctcttgttttgctcctggccctgcccctaggtctgggtgggcagtggccccatagcctctggaactgtgcgttctgcatagaattcaaacgagattcacccagcgcgaggaggaagaaacagcagttcctgggaaccacaattatnnnnnnnnnnnnntgtgatctgagtgcctcaagatggttttcaaaaaaatttttttaaagaaaataattgtatacgtgtcaacacagctggctggatgattgggactttaaaacgaccctctttcaggtggattcagagacctgtcctgtatataacagcactgtagcaataaacgtgacattttataacgaaaaaaaa

SEQ ID NO: 71410 - DNA, 1537 bp, Homo Sapiens
gggcagtaactatcacggtccttaaggtagcgaggcctgggtggcgaattcggcacgagggtctgctggggcacctgaaggagacttgggggcacccgcgtcgtgcctcctgggttgtgaggagtcgccgctgccgccactgcctgtgcttcatgaggaagatgctcgccgccgtctcccgcgtgctgtctggcgcttctcagaagccggcaagcagagtgctggtagcatcccgtaattttgcaaatgatgctacatttgaaattaagaaatgtgaccttcaccggctggaagaaggccctcctgtcacaacagtgctcaccagggaggatgggctcaaatactacaggatgatgcagactgtacgccgaatggagttgaaagcagatcagctgtataaacagaaaattattcgtggtttctgtcacttgtgtgatggtcaggaagcttgctgtgtgggcctggaggccggcatcaaccccacagaccatctcatcacagcctaccgggctcacggctttactttcacccggggcctttccgtccgagaaattctcgcagagcttacaggacgaaaaggaggttgtgctaaagggaaaggaggatcgatgcacatgtatgccaagaacttctacgggggcaatggcatcgtgggagcgcaggtgcccctgggcgctgggattgctctagcctgtaagtataatggaaaagatgaggtctgcctgactttatatggcgatggtgctgctaaccagggccagatattcgaagcttacaacatggcagctttgtggaaattaccttgtattttcatctgtgagaataatcgctatggaatgggaacgtctgttgagagagcggcagccagcactgattactacaagagaggcgatttcattcctgggctgagagtggatggaatggatatcctgtgcgtccgagaggcaacaaggtttgctgctgcctattgtagatctgggaaggggcccatcctgatggagctgcagacttaccgttaccacggacacagtatgagtgaccctggagtcagttaccgtacacgagaagaaattcaggaagtaagaagtaagagtgaccctattatgcttctcaaggacaggatggtgaacagcaatcttgccagtgtggaagaactaaaggaaattgatgtggaagtgaggaaggagattgaggatgctgcccagtttgccacggccgatcctgagccacctttggaagagctgggctaccacatctactccagcgacccaccttttgaagttcgtggtgccaatcagtggatcaagtttaagtcagtcagttaaggggaggagaaggagaggttataccttcagggggctaccagacagtgttctcaacttggttaaggaggaagaaaacccagtcaatgaaattcaatgaaattcttggaaacttccattaagtgtgtagattgagcaggtagtaattgcatgcagtttgtacattagtgcattaaaagatgaattattgagtgcttaaagattatttttgactt

SEQ ID NO: 71411 - DNA, 1293 bp, Homo Sapiens
  misc_feature (755)..(827): n is a, c, g, or t
  misc_feature (1213)..(1235): n is a, c, g, or t
gctgccgggcggtcctgccgagctgtgagggcaacggaggggaaataaaagggaacggctccgaatctgccccagcggccgctgcgagacctcggcgccgacatcgcgacagcgaagcgctttgcacgccaggaaggtcccctctatgtgctgctgagccggtcctggacgcgacgagcccgccctcggtcttcggagcagaattcgcaaaaacggaaggactggaaatggcagaccatatgatggcaatgaaccacgggcgcttccccgacggcaccaatgggctgcaccatcaccctgcccaccgcatgggcatggggcagttcccgagcccccatcaccaccagcagcagcagccccagcacgccttcaacgccctaatgggcgagcacatacactacggcgcgggcaacatgaatgccacgagcggcatcaggcatgcgatggggccggggactgtgaacggagggcaccccccgagcgcgctggcccccgcggccaggtttaacaactcccagttcatgggtcccccggtggccagccagggaggctccctgccggccagcatgcagctgcagaagctcaacaaccagtatttcaaccatcacccctacccccacaaccactacatgccggatttgcaccctgctgcaggccaccagatgaacgggacaaaccagcacttccgagattgcaaccccaagcacagcggcggcagcagcacccccggcggctcgggcggcagcagcaccccnnnnnnnnnnnnnnnnnnnnnnnnnnnnnnnnnnnnnnnnnnnnnnnnnnnnnnnnnnnnnnnnnnnnnnnnnatgcccgcctccgtggcccacgtccccgctgcaatgctgccgcccaatgtcatagacactgatttcatcgacgaggaagttcttatgtccttggtgatagaaatgggtttggaccgcatcaaggagctgcccgaactctggctggggcaaaacgagtttgattttatgacggacttcgtgtgcaaacagcagcccagcagagtgagctgttgactcgatcgaaaccccggcgaaagaaatcaaacccccaacttcttcggcgtgaattaaaagaaacattcccttagacacagtatctcacttttcagatcttgaaaggtttgagaacttggaaacaaagtaaactataaacttgtacaaattggttttaaaaaaaattgctgccnnnnnnnnnnnnnnnnnnnnnnncctgagaggcggccgcaagcttattccctttagttgagggttaattttagcttggcac

SEQ ID NO: 71412 - DNA, 684 bp, Homo Sapiens
  misc_feature (407)..(425): n is a, c, g, or t
  misc_feature (429)..(429): n is a, c, g, or t
tcgtttttgtagccttgacattcacccacctcccttatgtagttgaaatatctagctaacttggtctttttcgttgtttgtttttactcctttccctcactttctccagtgctcaactgttagatattaatcttggcaaactgcttaatcttgtggattttgtagatggtttcaaatgactgaactgcattcagatttacgagtgaaaggaaaaattgcattagttggttgcatgaacttcgaagggcagatattactgcacaaactgccatctcgcttcatttttttaactatgcatttgagtacagactaatttttaaaatatgctaaactggaagattaaacagatgtgggccaaactgttctggatcaggaaagtcatactgttcactttcaagttggctgtnnnnnnnnnnnnnnnnnnnaccnccatatgtacagatgataatagggtgtggaatgtcgtcagtggcaaacatttcacagatttttattttgtttctgtcttcaacatttttgacactgtgctaatagttatattcagtacatgaaaagatactactgtgttgaaagctttttaggaaattttgacagtatttttgtacaaaacatttttttgaaaaaatacttgttaatttattctattttaatttgccaatgtcaataaaaagttaagaaataaaa

SEQ ID NO: 71413 - DNA, 1184 bp, Homo Sapiens
  misc_feature (447)..(447): n is a, c, g, or t
  misc_feature (705)..(768): n is a, c, g, or t
  misc_feature (770)..(820): n is a, c, g, or t
ctgtttgtgcagcgtccggctgtgttatgagtggtagctcttccgtggtggctagcccgggtgcacaggctgttagtgggatcttgggggtggtggttcgcagccgacgtgcgcccgggaatcctggggggcagaggcgagcaaaagtggggtgcgctgtggtgggcgacacgtgtggcgcgggtctcattatctgcccttttcacttccaggactggaaatggcagaccatatgatggccatgaaccacgggcgcttccccgacggcaccaatgggctgcaccatcaccctgcccaccgcatgggcatggggcagttcccgagcccccatcaccaccagcagcagcagccccagcacgccttcaacgccctaatgggcgagcacatacactacggcgcgggcaacatgaatgccacgagcggcatcaggcatgcgatggggccggngactgtgaacggagggcaccccccgagcggcgctggcccccagcggccaggattaacaactcccagttcatggggtcccccggtggccagccagggaggctccctgccggccagcatgcagctgcagaagctcaacaaccagtatttcaaccatcacccctacccccactaccactacatgccggatttgcaccctgctgcaggccaccagatgaacgggacaaaccagcacttccgagattgcaaccccaagcacannnnnnnnnnnnnnnnnnnnnnnnnnnnnnnnnnnnnnnnnnnnnnnnnnnnnnnnnnnnnnnntnnnnnnnnnnnnnnnnnnnnnnnnnnnnnnnnnnnnnnnnnnnnnnnnnnncatgcccgcctccgtggcccacgtccccgctgcaatgctgccgcccaatgtcatagacactgatttcatcgacgaggaagttcttatgtccttggtgatagaaatgggtttggaccgcatcaaggagctgcccgaactctggctggggcaaacgagtttgattttatgacggacttcgtgtgccaacagcagcccagcagagtgagctgttgactcgatcgaaaccccggcgaaagaaatcaaccccctacttcttcggcgtgaattaaaagaaacattcccttagacacagtatctcacttttcagatcttgaaaggtttgagaacttggaaacagagtaaactataaacttgtacaattctc

SEQ ID NO: 71414 - DNA, 1234 bp, Homo Sapiens
cggtaggcgccgcggtgatcctggcgcagctgctgcggcgctgccgcgggggcttcctggagccagttttccccccacgacctgaccgtgtcgctatagtgacgggagggacagatggcattggctattctacagcgaagcatctggcgagacttggcatgcatgttatcatagctggaaataatgacagcaaagccaaacaagttgtaagcaaaataaaagaagaaaccttgaacgacaaagtggaatttttatactgtgacttggcttccatgacttccatccggcagtttgtgcagaagttcaagatgaagaagattcctctccatgtcctgatcaacaatgctggggtgatgatggtccctcagaggaaaaccagagatggattcgaagaacatttcggcctgaactacctagggcacttcctgctgaccaaccttctcttggatacgctgaaagagtctgggtcccctggccacagtgcgagggtggtcaccgtctcctctgccacccattacgtcgctgagctgaacatggatgaccttcagagcagtgcctgctactcaccccacgcagcctacgcccagagcaagctggcccttgtcctgttcacctaccacctccagcggctgctggcggctgagggaagccacgtgaccgccaacgtggtggaccccggggtggtcaacacggacctctacaagcacgtgttctgggccacccgtctggcgaagaagcttctcggctggttgcttttcaagacccccgatgaaggagcgtggacttccatctacgcagcagtcaccccagagctggaaggagttggtggccgttacctatacaacgagaaagagaccaagtccctccacgtcacctacaaccagaaactgcagcagcagctgtggtctaagagttgtgagatgactggggtccttgatgtgaccctgtgatatcctgtctcaggatagctgctgccccaagaaacacattgcacctgccaatagcttgtgggtctgtgaagactgcggtgtttgagtttctcacacccacctgcccacagggctctgtcctctagttttgagacagctgcctcaacctctgcagaacttcaagaagccaaataaacattttggaggataatcaccccaagtggtcttcaaccataaactttgtgattccaaagtgcccagttgtcacaggtgccataaataatttacatttttccaacattaaa

SEQ ID NO: 71415 - DNA, 1090 bp, Homo Sapiens
  misc_feature (803)..(803): n is a, c, g, or t
  misc_feature (1041)..(1041): n is a, c, g, or t
gcggccctgcgggtctacgcggtaggcgccgcggtgatcctggcgcagctgctgcggcgctgccgcgggggcttcctggagccagttttccccccacgacctgaccgtgtcgctatagtgacgggagggacagatggcattggctattctacagcgaagcatctggcgagacttggcatgcatgttatcatagctggaaataatgacagcaaagccaaacaagttgtaagcaaaataaaagaagaaaccttgaacgacaaagagacgtgagtcttgctgtgttgcccgggctggctttgcctctggaactcaagcgatcctcccacctcagcctctcgaggagctgggactacaggcgtgcaccatcatttcctcctaaaatttggaatttttatactgtgacttggcttccatgacttccatccggcagtttgtgcagaagttcaagatgaagaagattcctctccatgtcctgatcaacaatgctggggtgatgatggtccctcagaggaaaaccagagatggattcgaagaacatttcggcctgaactacctagggcacttcctgctgaccaaccttctcttggatacgctgaaagagtctgggtcccctggccacagtgcgagggtggtcaccgtctcctctgccacccattacgtcgctgagctgaacatggatgaccttcagagcagtgcctgctactcaccccacgcagcctacgcccagagcaagctggcccttgtcctgttcacctaccacctccagcggctgctgggcggctgaagggaagccacgtgaacgnccaacgtggtggaccccctggagtggtcaacacggacctctacgagcacgtgttctgggccacccgtctggcgaagaagcttctcggctggttgcttttcaagacccccgatgaaggagcgtggacttccatctacgcagcagtcaccccagagctggaaagagttggtggccgttacctataccacgagaaagagaccaaggtccctccacgtcacctacaaaccagaaactgcagncggcagctgtgggtcttaaaaatttgtggaaaatgaactggggggtccc

SEQ ID NO: 71416 - DNA, 1511 bp, Homo Sapiens
  misc_feature (161)..(162): n is a, c, g, or t
  misc_feature (164)..(169): n is a, c, g, or t
  misc_feature (172)..(173): n is a, c, g, or t
  misc_feature (182)..(183): n is a, c, g, or t
  misc_feature (205)..(209): n is a, c, g, or t
  misc_feature (221)..(221): n is a, c, g, or t
  misc_feature (224)..(224): n is a, c, g, or t
  misc_feature (231)..(233): n is a, c, g, or t
  misc_feature (235)..(236): n is a, c, g, or t
  misc_feature (238)..(246): n is a, c, g, or t
  misc_feature (248)..(251): n is a, c, g, or t
  misc_feature (253)..(254): n is a, c, g, or t
  misc_feature (256)..(256): n is a, c, g, or t
  misc_feature (258)..(258): n is a, c, g, or t
  misc_feature (260)..(273): n is a, c, g, or t
  misc_feature (275)..(293): n is a, c, g, or t
  misc_feature (296)..(300): n is a, c, g, or t
  misc_feature (1028)..(1097): n is a, c, g, or t
ctgagagttccatgaaggctgacaccattttgtgtctctgcccccagttaatttgtccgtctttgttgattgacgaacattaccggacagttgctgaccgaataacgatcactggaaatgcccgagccagaacggccgagggtgagcgcgcggccgagcgnncnnnnnnggnnagggagccnngaagcaaaaacagggagggggnnnnnggggagggaccnagnggggggnnnanngnnnnnnnnngnnnngnngnancnnnnnnnnnnnnnngnnnnnnnnnnnnnnnnnnnccnnnnnccccagtccactggagccccctgtgccctgcagcctcagggtaggccgtgggtcaccaggctggagagggcccctgccttggccaggggtgcgaggtgacccggctgcattgctgggtgggagctgctgtctgttgttcaggggcctggccacccgccctcccccccgaccccgacctcgcaaagcgcactcccaggcagggtgtggtctggaaggcggggctggcggggacatgggtgttcctgcatctcctagcgcagttcctgctggtgggtggaagggtgcctggtttaggcggggtcccaggagggggtgaggggtgacacccttggggagggggcctgcaaagggcactgcctgtggccacgtggtgtctgtgggaattggtcctggggactttgatgggtgtttgcggccccagttgccgccctgctccctcttccagggctcctggcttgggccccccgacccccctgctcagctcgggaaaatccccgtgcggctccagccccgggtcacgctcaggagcgatgagaggggcgccctggccacgcttcaggaaagcctgtgtctgcgcgcggggcaaggggctccacgacaaaaggacaagatttgacttaaattaagtttttcccttgaggatattttcattttctttaaaagaatataattttcttctaagatcttggaccagcctgttatttttaaagcaaatgccggcaaactcnnnnnnnnnnnnnnnnnnnnnnnnnnnnnnnnnnnnnnnnnnnnnnnnnnnnnnnnnnnnnnnnnnnnnngaggggggggcgcgccctcaaataaaatacccccgcgggggggcgcccaaaatattgggccgaccccgcagtttttttaaaaaaggggtgccccccaataagaggccgttataataacaacgagacatcaggcgcgcatatattaaacacactgttctaccatgggaaaaactgtgtacagcggcggaccatcttgtgaaagaacaccccacacttctggggcggggggagaaacaatatggggggaaccaacacctccccgaaagaaatatattaacgcctccagaagggcaaaataacaacgttgaagagcttaatcagtggttaaaacacacacggtaataatactctggcgccgccgaagacaatattgtgcatcacgaaaataatatatcagagaaacaatttttacag

SEQ ID NO: 71417 - DNA, 1409 bp, Homo Sapiens
  misc_feature (50)..(50): n is a, c, g, or t
ttgcgatggttttcactgcaactagatgaatcagctgatgtttcaggacntgctgtgctgcttgtgtttgttcgttataggtttaataagtctattgaggaagacctactcctgtgtgaatctttgcaaagtaatgctaccggtgaagaaatattcaactgtatcaacagttttatgcagaaacatgaaattgaatgggaaaaatgtgttgatgtttgtagtgatgcttctagggcagtggatgggaaaattgccgaagctgtcaccttaataaaatatgtggctcccgaaagcaccagtagtcactgcctattatacagacatgcactggcagttaaaataatgcctacatctctaaaaaatgtgctagaccaggcagtacaaatcatcaattatattaaagctcgaccacatcaatccagactattaaaaattttatgtgaggaaatgggtgctcagcacacagcacttcttctaaatacagaggtgaggtggctttctcgaggtaaagttcttgtaagactttttgaacttcgtcgtgaacttttggttttcatggattctgcttttcgactatctgattgtttaacaaattcatcttggctgctaagacttgcatatcttgcagatatttttactaaattaaatgaagttaatttgtcaatgcaaggaaaaaatgtgaccgtttttacagtatttgataaaatgtcgtcattgttaagaaaattggaattttgggcctcatctgtagaagaagaaaactttgattgttttcctacactcagtgattttttgactgaaattaattctacagttgataaagatatttgcagtgccattgtgcagcacctaaggggtttgcgcgctactctgttaaaatactttcctgtaacaaatgacaataatgcttgggttagaaatccatttacagttactgttaaaccagcttcattagtagcacgggactatgagagcctgattgatttaacatctgattctcaagtgaagcaaaattttagtgaactttcactaaatgatttttggagtagcctaattcaggaatacccaagcattgcaaggcgtgcagtgcgtgtacttcttccttttgctacaatgcacctgtgtgaaacggggttttcatattacgctgcaacaaaaacaaaatataggaaaagacttgatgctgcacctcatatgcgaatccgacttagcaatattacacctaatattaagcggatatgtgataaaaagacacaaaaacactgttctcattaaaattggaggagtttgcatgtctcatgataaccaaatgtaagatgaaaataaaagatgatttacttcatctctggtatttgggggatttaaataaaatgattccatttttttatactatttagattttaagaagg

SEQ ID NO: 71418 - DNA, 1224 bp, Homo Sapiens
tacgaggcagtactatacggtcctttggtagcgaggcctgggtggcgaattcggcacgaggggacgccggggacacccggttgggctctgcgtgctcccttctgggttccgaggcccaagcccttggcagtgtttgtgagtggaagggaggtcacgctatcgtccgcggccccagcagccctgtgccctcgttggatcccgcgacgcggctcctttaagagcctcgcgggtcgcccgccgctaggtcgctccccggccatgcgggcgctgcgggccggcctgaccctggcgttgggcgcggggctgggtgcggtcgtcgagggctggcggcggcggcgggaggacgcgcgggcggcgccgggactgctgggccggctgcccgtgctgcccgtggcggcggcagccgagttgccccctgtgcccgggggaccccgcgtgccgggcgagctggccaagtacgggctgccggggctggcgcagctcaagagccgcgagtcgtacgtgctgtgctacgacccgcgcacccgcggcgcgctctgggtggtggagcagctgcgacccgagcgtctccgcggcgacggcgaccggcgcgagtgcgacttccgcgaggacgactcggtgcacgcgtaccaccgtgccaccaacgccgactaccgcggcagtggcttcgaccgcggtcacctggccgccgccgccaaccaccgctggagccagaaggccatggacgacacgttctacctgagcaacgtcgcgccccaggtgccccacctcaaccagaatgcctggaacaacctggagaaatatagccgcagcttgacccgcagctaccaaaacgtctatgtctgcacagggccactcttcctgcccaggacagaggctgatgggaaatcctacgtaaagtaccaggtcatcggcaagaaccacgtggcagtgcccacacacttcttcaaggtgctgatcctggaggcagcaggtgggcaaattgagctccgcacctacgtgatgcccaacgcacctgtggatgaggccatcccactggagcgcttcctggtgcccatcgagagcattgagcgggcttcggggctgctctttgtgccaaacatcctggcgcgggcaggcagcctcaaggccatcacggcgggcagtaagtgagggtggagcccagtgagactgtgggtgtgtgcaggccggggagtattaaaggtggtgatttttggagacaaa

SEQ ID NO: 71419 - DNA, 2170 bp, Homo Sapiens
  misc_feature (135)..(143): n is a, c, g, or t
gcgctaggtacgaggcctcgtgtttaattcggcacgaggacatggcggagcgcggcaggaagcggccgtgcggcccgggtgaacacggccaaaggattgagtggcgaaaatggaagcaacagaagaaagaggagnnnnnnnnntggaaggatctcaagctgatgaaaaaactggagcggcagcgggcacaggaggaacaggcaaagcgcctggaagaggaggaggcagcggcagagaaggaggaccgcgggcggccctacacactgagcgtagccctgccgggctccatcctggacaatgctcagtcgccggagcttcgcacctacttggccggtcagattgccagagcctgtgccatcttctgtgtggatgagatcgtggtgtttgatgaggagggccaggatgccaagactgtggagggggaattcacaggagttgggaagaaggggcaggcgtgcgtacagctggcccggatcctgcagtacctggagtgtccacagtacctgaggaaggcgttcttccccaagcaccaggatctacagtttgcagggctcctgaaccccctggacagcccccaccacatgcgtcaggatgaggaatccgagttccgagagggcatcgtggtggatcggccacccggccaggccacggctcctttgtcaactgtggcatgaaaaaggaggtgaagattgacaagaacctggagcccgggcttcgggtgactgtgcgactgaaccagcagcagcacccagactggcaagacctaccatggcaaagtggtatcatcgcaggaccctcgcaccaaagctggtctctactggggctacaccgtccgagtggcttcctgcctcagtgctgtgttgctgaggccccttccaagatgggtatgacctgaccatcgggacgtcagagcgcggctcagatgtggcctctgcccagcttcccaacttcaggcatgctcttgtggtgttcgggggcctccagggtctggaagctggagcggatgctgaccccaacctggaggtggctgaacccagtgtcctctttgacctgtacgtcaatacctgtcctggccagggtagccgtaccatccgcacggaggaagccatcctcatctccctggccgccctgcagcctggcctcacccaggcgggtgcccggcacacctgaaagttctaaggggccgaggacatcagtgaagcagcagtgaaaccaggggctctgcaggtcacttgggacggacgccaccagaattgtctccaaaaaatcaccacctttaatactccccggcctgcacacacccacagtctcactgggctccaccctcacttactgcccgccgtgatggccttgaggctgcctgcccgcgccaggatgtttggcacaaagagcagccccgaagcccgctcaatgctctcgatgggcaccaggaagcgctccagtgggatggcctcatccacaggtgcgttgggcatcacgtaggtgcggagctcaatttgcccacctgctgcctccaggatcagcaccttgaagaagtgtgtgggcactgccacgtggttcttgccgatgacctggtactttacgtaggatttcccatcagcctctgtcctgtgggcagacccaggcacacgtgggcagggggcctggatgaacccaaagccacctcttccaggcagccttccctgatctgtcctctaacttctgtcaacctgcaggaccacgccctcactgtgagacttctgtagcctgcctggctcctccttgaggctggaactctctccagggtggttaactctttccctctgttttccttatgcccaacactgggtcaggcagagtgggcgacaataaacgctgctaggagaatcgagccttctgaatattcacattcgtctgaagggagactttacgactgtccatctctcccacagaggtgagcaacaagtggcaagggacatgacggtgacatccagcccagcacagtgccagacaccgacggggctcccttcacaaatctctccttcacagccctagagcactgctatgaattgataggccacaccgctggcagctatcagcttactggacagctgggacatgtaatacaaagtcagtttcaaaggacagttttccacccagaaagaaagctgcccccactgatcaggccccc

SEQ ID NO: 71420 - DNA, 902 bp, Homo Sapiens
ggggcgcaaacctccctcaccgagcccttctgcattacaggccagctgccccagctctggtcaataccagtttccctactcatctggtttcttggcaagccttgtcagcttccctgcctcgagtcccctcattccacctccacagccaaagacctgtcgggtacccctgaccatctcgtcctctgcccatgggcagcagcaggccctgaatctgcccccgcttctccctgctgtcacctcttggcatgcccacccaatcttgttctgccaatatggaaccccccgcaggtctgcagtgcaccaagctctcccaccttccccccgcaggtctgcagtgcaccaagctctcccgccttccccctgcaggtctgcggtgcaccaagctctcccaccttccctctgcaggtccgaggtgcaccgagctctcccgccttccccatgcaggtccccagtgcaccgagctctcacgccttccccatgcaggtccccagtgcaccgagctctcccgccttccccatgcaggtccccagtgcaccgagctctcacgccttccccctgcaggtccgcggtgcaccaggctctcccgccttcagtctctgctctgcttggagcacttccctccacccttctcgggagtttgaatctagatctgcctgacccagggcctccactcttgctcctgtgcagccctgcctctcaggtggaagcaactgagcacctctgggtgtgctccgtggtttttctggcctgcagagggctggggctgagaggcaacaggtccaggctgagcagctcactctggaatccacaggctcgggatggagtccaggcctcatcacctagttccttgtgctgtgcctcgtgccgaattccacacccagcctcgtacctagcctatattt

SEQ ID NO: 71421 - DNA, 1344 bp, Homo Sapiens
  misc_feature (166)..(188): n is a, c, g, or t
ctaaagcaagtgcaaattatagtcaaagaaagcataaaaagaaatgaattaaatagaaaagagacaataaagacaaatgcccctcgtgccgaattcggcacgagggagaaaacataaaggaaaagcgaaaggctatcttagaggcaagacttgccaaacttcgacnnnnnnnnnnnnnnnnnnnnnnngaaggtggaacagaagaagaaaatagagatggagatgttattgggcctttgccaccggagccagaggctgtgccaaccccacgtcctgctgcccagagtagcaaagtagaagtcattgtccaggagaggaaggacaccaagcctggagtgccacacatccgggagtgggaccgcggaaaagaattttcctttggatactggtcgaagaggcagtcagatctccgggctgagagagatcctgagtttgccccgccgtcagattactttgtgggtcagaagagaactggtttttccagcagccaggcatggagcagacctgggccagcacagagtgacccagggcagtgccctgaccagagccacggacctagccctgaacatacgtcacccactcctgcccccgacaacccaccacaagcccccacagttactttcaaaactctggatgacatgatttcctattacaaacaagtgacatgatctttcaaagcacgctgacttgggtttgtactttgacagtgcctttctctcccagagggagaaataactttaggaactgaattgtacctttgtcctgtcctttccctaggaggcacagacttcgggttggatttgtcagcaaggaggaaagttatggaaactttggccacttggctgttcattttattctaagtgggatagggacatacctacctggatttacatgtgagctgcgatagaatagaagtatttattctgtaaaattagacaatgagaatacagtagcacaagtccttgttctctgaagagtgggaaggagaggagtgagtgaagtagcctgtcccctgcaggtcctctgcgatggcattgtctcggttcccgcagtgctgcagtgtggaagggagtgccccatcctcattacagatgacacactggagtgtggaggggtcgatgacttgtgcagggtcatatggtacctaaggggcagatctcagacttaaacacaattgatgtctaacccctagacagtctttttagtgccctctgctctcagtcttgttgccctagtatcaagcaatcttagacaaacatcctgaattcttacaaacttacctctaaactctgaggataaagttgccagtccttttaatggtcagcctaatcattctgtcagcct

SEQ ID NO: 71422 - DNA, 804 bp, Homo Sapiens
  misc_feature (46)..(46): n is a, c, g, or t
  misc_feature (121)..(121): n is a, c, g, or t
  misc_feature (173)..(173): n is a, c, g, or t
  misc_feature (245)..(245): n is a, c, g, or t
tgaggatgggagtactggagctgtggactgtcagagatgattgctngcggcattgttagagtttcagtgcatcccacctcccttcgccccatgctcgcttcctcacatcaggagcctgacntgatcagactggggctgcacagtggagcagtgggttcccatgtcattagtantaaggagagggttgggggtgggcaggctcccagaaagtcagcagtgtgcctgggcaacccccacccctcctntacctgccacacctcagagggttcctacagctgcacacaagcagttgagagttgatgaccaggcccatagggctcccacagctggttcccaggccagtgagtgctgtgagaatacagtagcacaagtccttgttctctgaagagtgggaaggagaggagtgagtgaagtagcctgtcccctgcaggtcctctgcgatggcattgtctcggttcccgcagtgctgcagtgtggaagggagtgccccatcctcattacagatgacacactggagtgtggaggggtcgatgacttgtgcagggtcatatggtacctaaggggcagatctcagacttaaacacaattgatgtctaacccctagacagtctttttagtgccctctgctctcagtcttgttgccctagtatcaagcaatcttagacaaacatcctgaattcttacaaacttacctctaaactctgaggataaagttgccagtccttttaatggtcagcctaatcattctgtcagcctaatcgggtaattgctttttttaataaatacacataaaaaccacaaaaa

SEQ ID NO: 71423 - DNA, 1065 bp, Homo Sapiens
catgaaatgtaaaatatttttatagtttgttcatactatatgaggttctattttaaatgactttctggattttaaaaaatttctttaaatacaatcatttttgtaatatttattttatgcttatgatctagataattgcagaatatcattttatctgactctgtcttcataagagagctgtggccgaattttgaacatctgttatagggagtgatcaaattagaaggcaatgtggaaaaacaattctgggaaagatttctttatatgaagtccctgccactagccagccatcctaattgatgaaagttatctgttcacaggcctgcagtgatggtgaggaatgttctgagatttgcgaaggcatttgagtagtgaaatgtaagcacaaaacctcctgaacccagagtgtgtatacacaggaataaactttatgacatttatgtatttttaaaaaactttgtatcgttataaaaaggctagtcattctttcaggagaacatctaggatcatagatgaaaaatcaagccccgatttagaactgtcttctccaggatggtctctaaggaaatttacatttggttctttcctactcagaactactcagaaacaactatatatttcaggttatttgagcacagtgaaagcagagtactatggttgtccaacacaggcctctcagatacaaggggaacacaattacatattgggctagattttgcccagttcaaaatagtatttgttatcaacttactttgttacttgtatcatgaattttaaaaccctaccactttaagaagacagggatgggttattcttttttggcaggtaggctatataactatgtgattttgaaatttaactgctctggattagggagcagtgaatcaaggcagacttatgaaatctgtattatatttgtaacagaatataggaaatttaacataattgatgagctcaaatcctgaaaaatgaaagaatccaaattatttcagaattatctaggttaaatattgatgtattatgatggttgcaaagtttttttgtgtgtccaataaacacattgta

SEQ ID NO: 71424 - DNA, 811 bp, Homo Sapiens
  misc_feature (56)..(56): n is a, c, g, or t
  misc_feature (76)..(76): n is a, c, g, or t
  misc_feature (624)..(664): n is a, c, g, or t
  misc_feature (801)..(801): n is a, c, g, or t
acagcagaatctcaaggatgtaatggaaagaactaccacactgaccatccagaatntaagagaccatctgggtgtntgggaaaccatctgacgaggcctgactctattccagttagattgacaataattgagcagcaggcatttttcatttctggtcaggaaagcattgtgcctttagcaaacaatcagtgtgcaacagtgatgtggtcatctagccagggaatggctgctccatcccctgcataatatattcctgcttcaaacacctctcagaaaaccagttccgcgagggtttttatatccccacaaagttgttgagagacaatgatgaccctggaagtggggaggaggacttctgagaaacagcaacctctctcctgattggggtagccatgagatttctctagctatatccaacttggcatctgtacatcatctttggaggaacatcttatttgtggaaggaccttgacaagccgtttgagatggaatgtaggccctgatgttatgcttcagtaaaaaaagatggaagcttccctgctataccaaaacatggagcaaaatttgcatttttctcaagaaggagagaaaaggagtaggactccagcaaagtttgtcagaagnnnnnnnnnnnnnnnnnnnnnnnnnnnnnnnnnnnnnnnnntcagcagtggtggtatggatgaaagggacttgagagaacaaaaatggctaagggaaaattttaagtcatctgctgagcagtgtgctgtgtcaacctcctcctaggtaacctctatgaaatatttagtgaagtcatcntttctcttta

SEQ ID NO: 71425 - DNA, 728 bp, Homo Sapiens
  misc_feature (34)..(34): n is a, c, g, or t
  misc_feature (40)..(40): n is a, c, g, or t
actgttcagctagctctcctgagcaggacgctcnccaganccaacagaaatcagtgccaagcatgcgatattcagagtctccccagaccggcagtcatcatggcagtttcagcgttcaaacagcaatagctcaagtgtgataactactgaggataataaaatccacattcacttaggaagtccttacatgcaagctgtagccagccctgtgagacctgccagcccttcagcaccactgcaggataaccgaactcaaggcttaattaacggggcactaaacaaaacaaccaataaagtcaccagcagtattactatcacaccaacagccacacctcttcctcgacaatcacaaattacagtaagtaatatatataactgaccacgctcaccctcatccagtccatactgatatttttgcaaggaactcaatccttttttaatcatccctccatatcccccaagactgactgaactcgtactttgggaaggtttgtgcatgaactatacaagagtatctgaaactaactgttgcctgcatagtcatatcgagtgtgcacttactgtatatcttttcatttacatacttgtatggaaaatatttagtctgcacttgtataaatacatctttatgtatttcattttccataactcactttaatttgactgcaacttgtcttggtgaaatactttaacattataaaacagtaaataatttgttattattaaaa

SEQ ID NO: 71426 - DNA, 1330 bp, Homo Sapiens
  misc_feature (44)..(44): n is a, c, g, or t
attcggcacaggcccagacttcttttgcaatttgtccctgggangagggggtctcccagtgcccccagcttcatcccagcagaaccagcaggatcctcctggtctctcactggccttcctccacacttggtttctatcctcaggggtagaagctcagagctttttatggcccaggagaaaatgtagaccctgagaaacctgtccctgcagaaaggttcccttgggccatgctttgggccctctgctctttatatgtttattctattctccatttttccaccccgtccttaccctaggcctaaacacaggtacagatatgtgcatgctcaagggcagctcctaggcctggactgaagctctcaggggggaattagataaatattccaacatcctcatgcctggcccatttagtttcatcctttagttacccaggccagtagctttggggtaacccttcctgtagctccaaaaccagcacttggagcagcaaaatagggcactgacaggagatgaaactctctcctatctcagaatttgccaacttctgggctgggctcctaggaggtagttttcttgaaggggactgcatcctagttgacctgaattttccagaccaggagggactgctgtgctctcccttctcgccatcatactgtttggctagattcattcagcagtagaagctgtttgatctgttgaccccagcatactgctgtttcttcaccagcttcattgtgtcacagtagcttcctttgggaggatgatgtgatagaacactcagagagagggagggagaagagagatagtgggtatgcttctctagctccccatcttccaggtccacctcttgacttcctgttcccctaaacctgagcacatcacgccaggcctctttgctgccaggacagcatcagctcactcctcagcaataatctagggtatgtgggaaggtcagggctgtggtaaggaatagaatcaaagaggggagtgatacggggtgggggcacttggccgcctgctaaacttggacattaattttatatcatgacccccttttaagccagtgagctgggcttcagtttttcccaggccatgcacatttaatttatttcagagaaactctaattgtattttcactgcagtatcttgtattttttatttgtgatttaagaaatgtgaagagaaaatacacagacacaataatggctaacattgtttctttcattccttgttctagagctaaccactctaaaattgtttggtaatgtcacttagtgtaattaattgtaacatattcttttaaataaattgatttattgatcaaacactt

SEQ ID NO: 71427 - DNA, 1868 bp, Homo Sapiens
  misc_feature (1787)..(1787): n is a, c, g, or t
atgtaacaggggggcagtgacaaaagcaagaacgcacgaagccagcctggagaccaccacgtcctgccccccgccatttatcgccctgattggattttgtttttcatctgtccctgttgcttgggttgagttgagggtggagcctcctggggggcactggccactgagcccccttggagaagtcagaggggagtggagaaggccactgtccggcctggcttctggggacagtggctggtccccagaagtcctgagggcggaggggggggttgggcagggtctcctcaggtgtcaggagggtgctcggaggccacaggagggggctcctggctggcctgaggctggccggaggggaaggggctagcaggtgtgtaaacagagggttccatcaggctggggcagggtggccgccttccgcacacttgaggaaccctcccctctccctcggtgacatcttgcccgcccctcagcaccctgccttgtctccaggaggtccgaagctctgtgggacctcttgggggcaaggtggggtgaggccggggagtacggaggtcaggcgggtctgagcccacagagcaggagagctgccaggtctgcccatcgaccaggttgcttgggccccggagcccacgggtctggtgatgccatagcagccaccaccgcggcgcctagggctgcggcagggactcggcctctgggaggtttacctcgcccccacttgtgcccccagctcagccccctgcacgcagcccgactagcagtctagaggcctgaggcttctgggtcctggtgacggggctggcatgaccccgggggtcgtccatgccagtccgcctcagtcgcagagggtccctcggcaagcgccctgtgagtgggccattcggaacattggacagaagcccaaagagccaaattgtcacaattgtggaacccacattggcctgagatccaaaacgcttcgaggcaccccaaattacctgcccattcgtcaggacacccacccacccagtgttatattctgcctcgccggagtgggtgttcccgggggcacttgccgaccagccccttgcgtccccaggtttgcagctctcccctgggccactaaccatcctggcccgggctgcctgtctgacctccgtgcctagtcgtggctctccatcttgtctcctccccgtgtccccaatgtcttcagtggggggccccctcttgggtcccctcctctgccatcacctgaagacccccacgccaaacactgaatgtcacctgtgcctgccgcctcggtccaccttgcggcccgtgtttgactcaactcagctcctttaacgctaatatttccggcaaaatcccatgcttgggttttgtctttaaccttgtaacgcttgcaatcccaataaagcattaacagccctctcctccacagccccacccatcacactacttgccggccgccctcggtcctcgaaaaactccttaaaccctttcatttgggcccgcggtgcccgcttacgtaagggacactggcacatactttgtttcccaactgaaaacctgggccatgaactaaggcctggggatttttccccacaaaaaataacgtcccgggccggacaaccgcacgcgctttgtaaaaaaattccgaaatgtgaatcccctgaaggcccattcactggggatctcttcaacaagggcccttcccacggttcaagcctcacacatataaatattaacgacccacggcgcgctgggccgcctctcagtgcaaaagagcctgtgttgatagatgtccnatctgaccattcttctgcggccgacattttgtggaaactcgcctcttatcgaaaccccacctcatggcgccaatcccgccg

SEQ ID NO: 71428 - DNA, 794 bp, Homo Sapiens
ggatagaagtatctgcctgcagccaagacttcattttgatggcaaatacattgtctgtagttcagcacttggtctctaccagtgggactttgccagttatgatattctcagggtcatcaagactcctgagatagcaaacttggccttgcttggctttggagatatctttgccctgctgtttgacaaccgctacctgtacatcatggacttgcggacagagagcctgattagtcgctggcctctgccagagtacaggaaatcaaagagaggctcaagcttcctggcaggcgaagcatcctggctgaatggactggatgggcacaatgacacgggcttggtctttgccaccagcatgcctgaccacagtattcacctggtgttgtggaaggagcacggctgacaccatgagccaccaccgctgactgactttgggtgccggggctgcgggttttgggtgcaacctctgcggcagccgactgcatgaaccaaagttctcacctaatggtatcatcacgcagtgcacaatcatttatctatgttttgccaggggccagggctcggggtgggggagggcttgttttattgacatacaacgcagcatgctaatggggtacaccattgacttcatttgtacttagttatgttggtcagtgttagaggatgcattttgggttcatctttcttgagtggagtattggttttaagtaaagaaagttaaatgatccattaatctgctaattggttgcctatgaaatcacattgtctgttattaaagctttttaccataaaaaaaa

SEQ ID NO: 71429 - DNA, 1632 bp, Homo Sapiens
tcctgggttaccccgcagacagatttggccgtcgcgggattgtgctgctgagccttggggctggtgggcccctgtggagtaggaggggctgctgcaggctcctccacaggcgtcatggccctccgattcctcttgggctttctgcttgccggtgttgacctggtgtgtctacctgatgcgcctggagctgtgcgacccaatgccagaggcttcgggtggccctggcaggggagtaggtgggggtgggagggcacttcctgttcctgggcctggcccttgtctctaaggattggcggattccgtacgagcggaatgatcaccgaatccctgcatcctcttcctgtttatatggctggcctggtttgttcctggagtccgcacggtggctgatagtgaagcggcagattgaggaggctcagtctgtgctgaggatcctggactagtagcgaaaccggccccatgggcgagatgctgggggaggaggcccaggaggccctgcaggacctggagaatacctgccctctccctgcaacatcctccttttgccctttgcttcccgtccgtcaactaccgcaacatctggaaaaatctgctgtatcctgggcttcaccgagacttcattgcccatgccatgtcgccactgctaccaggcctgtgggaggaggagggagcccatcggacttctaccttgttgctctcgtgctggccacgcggcaaccgcaaccctggcctgtggtcttcctgggggggtcaccgtggaacgaattgggccgccggggcatcctatcttcttctccatgacccttaccggcattgcttccctggtcctgctgggcctgtgggattgtgagcatcctatcttccccacagtgtgggctcaacaagggaaccccaacagagatctgaacgaggctgccatcaccactttctctgtccttgggctcttctcctcccaagctgccgccatcctcagcaccctccttgctgctgaggtcatccccaccactgtccggggccgtggcctgggcctgatcatggctctaggggcgcttggaggactgagcggcccggcccagcgcctccacatgggccatggagccttcctgcagcacgtggtgctggcggcctgcgccctcctctgcattctcagcattatgctgctgccggagaccaagcgcaagctcctgcccgaggtgctccgggacggggagctgtgtcgccggccttccctgctgcggcagccaccccctacccgctgtgaccacgtcccgctgcttgccacccccaaccctgccctctgagcggcctctgagtaccctggcgggaggctggcccacacagaaaggtggcaagaagatcgggaagactgagtagggaaggcagggctgcccagaagtctcagaggcacctcacgccagccatcgcggagagctcagagggccgtccccaccctgcctcctccctgctgctttgcattcacttccttggccagagtcaggggacagggagagagctccacactgtaaccactgggtctgggctccatcctgcgcccaaagacatccacccagacctcattatttcttgctctatcattctgtttcaataaagacatttggaataaacgagcat

SEQ ID NO: 71430 - DNA, 994 bp, Homo Sapiens
tgaggcatcctttcctctagaagacctgagtcttcctgaccgactccaccatcacccaatctgttgattctccattgggaaaggcatttacaggtaaaagacttctgtatggattgcagttactctggtgatagttttcacctttattctgctgtgaaacaatcaaatcaaagccttgtgtcagttaacacatgacaagtggtctcaatgcagctaggaccatgccagaaacctggatctcttaagagattggtacctacctaggtacgaaagttctacccttggcatactcagcattcctcaaaaagaccatcagtgttagcacaaactgagcagaaaaaataagctgttgattttctacctgatacttaagccagtggcctactttaattcacaattccattttgattagcaggacttttccactttgaagataaatagcaactttatcaaagtgactgtactgcaaattaattcataatgcctgatagttttatatatagagacttatgtggaaggcatgttaataggtttccatgagacaccaaagaaaagaggactctatactgggtggagcagggtcttcacctttttgtttctgtcaacttgtcatatacacctccagggaccaaaaacaaaagcagctcggagtctgtgttgcctgattggaaagtagaagctctggtgtatgctacagcacataacacatttttactaaaggaaaaaagctaattatgtccatgcctctcgtaaaactggggggaaccttaaagagaaagaactaaggcttaagttatctgtagtataatcaattagaagtaatgaatggatgcatgtaaaatggatgtgattttttttcaagcttattttgaaatcttaaaaatcaggttacaccatagctactcaaaagttttacacacttaaaactcagatcagtaagtgttggtaccttttagactcataaaattgaataaaccattgcaatgctttaaaa

SEQ ID NO: 71431 - DNA, 136 bp, Homo Sapiens
agtagaagcaggaacagttgtcaatactaccttctgttggtcccctgttagacaacatacctttctttgaaatgtaaaatgtcaaatatataatcacacaactttagaaaaaacaaactttgacaacaccaacaac

SEQ ID NO: 71432 - DNA, 766 bp, Homo Sapiens
gacagaacgtctcctaggtattcattctgtattttgcaagcctcaaaacatacgtgaagttggctttgaatacatgaatagggaacttctctggcatggttttgctgaatttctgatttttctcttaccacttatcaatgtccagaagttgaaagccaagctgtcttcatggtgtattcctcttactggtgcacctaatagtgacaatacattagccaccagtggcaaagaatgcgctctatgtggagagtggcccaccatgcctcacaccataggatgtgagcatattttctgttatttctgtgctaagagtagtttcttatttgacgtgtactttacttgtcctaagtgtggcacagaagtacacagtctgcagccactgaaatcaggaatcgagatgtcagaagtaaatgctctttagaaactaaaattgcttcctttgaggaaaaaaatgcaccgtgtttaaattcttaatattagtcatcctaagtataccatttatgtatcctttataaggaatgtgctcctagccactgtcttctcctttccaggcatgactgaaatctaatcactggaaaccatgtgattctaaatatattatgtaaatgttaatgtattatgttttttaaatcattgcattcaatttttaatgtcaagaataatggacagcttttgtcaggtgactactaacaatgctccttcattttactacttcttaaaacaaggttggattctaaagataaagattttggagactctggaaaaa

SEQ ID NO: 71433 - DNA, 620 bp, Homo Sapiens
accggtcctcgtagatggagatctcaatctggggtcggtggttaaggagagctgcgagcccagctgctgagcaggggtgggacatgaaccagcggatggagtccagcaggggagtgggaaagtgggcttgtgctgctgcctagacagtagggatgtaaaggcctgggagctagaccctccccaagcccatccatgcacattacttagctaacaattagggagactcgtaaggccaggccctgtgctgggcacatagctgtgatcacagcagacagggtcgctgccctgatggcgcttacattccagtgggtctaatgaccatatcttaggacacagatgtgcccagggaggtggtgtcactgcacaggaagtatgaggactttagtgtcctgagttcaaatcctgattcaggaactcacaaagctatgtgaccttacaccagtcacttaacttgttagccatccattatcgcatctgcaaaatggggattaagaatagaatcttggggttagtgtggagattagattaaatgtatgtaagaccacttggcaccaaaacctggcacatagtaaaggctcaataaaaacaagtgcctctccactgggctttgtcaacacgtg

SEQ ID NO: 71434 - DNA, 1049 bp, Homo Sapiens
ggtccggtccggaattcccgggatatcgtcgacccacgcgtccggcgaggccctggacggcggcggcagtggggctcctccttctgtttcccagaccgagagccgcgccggcaccatgtcagcttaccctaaaagctacaatccgttcgacgacgacggggaggacgaaggcgcccggccggccccttggagggacgcccgagacctccccgacgggcccgacgcgcccgcggacaggcagcagtacttgcggcaggaggtcctccgcagggctgaggccacggccgccagcaccagcaggtccctggccctcatgtacgagtccgagaaggttggggtcgcctcttccgaggagctcgcccgtcagcgaggagtcctggagcgcacagagaagatggtggacaagatggaccaagatttgaagatcagccagaaacacatcaatagcattaagagcgtgtttggggggctggtcaattacttcaaatccaaaccagtagagaccccacctgaacagaatggcaccctcacctcccagcccaacaacagattgaaagaagctataagtacaagtaaagaacaggaagcaaagtaccaggccagccacccaaaccttagaaagctggatgatacagaccctgtccccagaggggctggttctgccatgagtactgatgcttacccaaagaacccacaccttcgagcctatcaccagaagatcgacagcaacctagatgagctgtccatgggactgggtcgtctgaaggacatagccctggggatgcagacagaaattgaggagcaagatgacattcttgaccggctgacaaccaaagtggacaagttagatgtcaacataaaaagcacagaaagaaaagttcgacaactctgaagacagacggatttccactctattgtgatgaaaagatttgaaagatctttttttgaacttccaagaaatttcatttactattttagtatgtaaattaatgtgtgtttgcaaatgttataatacagtaggtcttaagacatttttgctgttataaaaa

SEQ ID NO: 71435 - DNA, 2054 bp, Homo Sapiens
ggggcccagcggggctgaaacgcgcctcctgagtgttgaaaccggcaggcgccggcctgttgcaccaagaggccagggcgtctcactcaccttcacatccaggcctcttaggggagcgcggctttggcttttccaggaaggaatggactccaacggacagggaaagaagaagtgtggagagacgggcaggataagcaggcactgggcccaagccgcccttggaggctctgcctgttctgatctgaaggcggaggctcagccgtgctctcccaggaagccacctgggcgtttggggctttagctaggaaagaggatgtcgcctgcggctgcgaaggcgccaaagcccagacctcgcgcctccgcccgcgacggcggcactgagggcccggagcgggcgggagacgtggattactgcgggcttcggggccctagcctcgaccgcgacgttcgctcgcatcgcgtacggacagaaacccgtgagcgctgaagaaagaacacctgaatccggagccccagcccccgtcgctcgtttgcgcgaccccaaaacctggcgggacgagggtcgcccgatgtctagctgccgccacagacgacgcttttgcgtctgcgcagcgcgccgccttgtgggtaatctcagggtgagacgaggctagcgcgaggtacggctagagcgtcatttccggctcgaatgcccggcagccgtggcggctagagcgttcctccccagctcgaatgcccggcggccgaggcggctagagcgtcgcctcctcccggggaaccgcgtgtgaccttccagcccgcggaccgatgctgccggcggccgctcgccccctgtgggggccttgccttgggcttcgggccgctgcgttccgccttgccaggcgacaggtgccatgtgtctgtgccgtgcgacatatgaggagcagcggccatcagaggtgtgaggccctcgctggtgcacccctggataacgcccccaaggagtacccccccaagatacagcagctggtccaggacatcgccagcctcactctcttggaaatctcagacctcaacgagctcctgaagaaaacgttgaagatccaggatgtcgggcttgtgccgatgggtggtgtgatgtctggggctgtccctgctgcagcagcccaggaggcggtggaagaagatatccccatagcgaaagaacggacacatttcaccgtccgcctgaccgaggcgaagcccgtggacaaagtgaagctgatcaaggaaatcaagaactacatccaaggcatcaacctcgtccaggcaaagaagctggtggagtccctgccccaggaaatcaaagccaatgtcgccaaagctgaggcggagaagatcaaggcggccctggaggcggtgggcggcaccgtggttctggagtagcctccagctcggaggacttgtgttcaggggtcctgggccccgggcgaggtcccgccctcccgtggtcactggctccgcccccagcaccaggcgcccagtggagccgtttgggagaattgcctgcgccacgcagcggggccggacaggccgcacagacctactgtggcgggagggaggggcggctgctgcctggtgacggcacccggaggcccaccaggacgcgccaccggtgaatgtgcctctggtggctgctgagaaaaatacactgtgcagctcaaaaaagcctttgaacttcaacttgccaattcagataacaaccccctgggaaaggcaagaaatcaacaacagggggggctgccctaagaatatcctctcgggagggccccaaccttaacccggtacctaggctttcttgttaaaaaaggagggccccattaaggaagtctatattattaaactaagacacttggccggccgacatttcacccctttgtggaacggggaaaaacccgcctaacctggggaaacgtttcggagaaggaaaccactaactcctggcgccggggcgaaaacatttgggccgaaccttaccgctaaacaaagatttaacaccgccctagggacgaaatgatcacaaatcgtctcgtaag

SEQ ID NO: 71436 - DNA, 785 bp, Homo Sapiens
aacttacggctaggtagcgaggcctgggtgttaaattcggcacgaggcagccgcggacgatgctgccggcggccgctcgccccctgtgggggccttgccttgggcttcgggccgctgcgttccgccttgccaggcgacaggtgccatgtgtctgtgccgtgcgacatatgaggagcagcggccatcagaggtgtgaggccctcgctggtgcacccctggataacgcccccaaggagtacccccccaagatacagcagctggtccaggacatcgccagcctcactctcttggaaatctcagacctcaacgagctcctgaagaaaacgttgaagatccaggatgtcgggcttgtgccgatgggtggtgtgatgtctggggctgtccctgctgcagcagcccaggaggcggtggaagaagatatccccatagcgaaagaacggacacatttcaccgtccgcctgaccgaggcgaagcccgtggacaaagtgaagctgatcaaggaaatcaagaactacatccaaggcatcaacctcgtccaggcaaagaagctggtggagtccctgccccaggaaatcaaagccaatgtcgccaaagctgaggcggagaagatcaaggcggcctggaggcggtgggcggcaccgtggttctggagtagcctccagctcggaggacttgtgttcaggtggtcctgggccccgggcgaggtccccgccctcccgtggtcactggctccgcccccagcaccaggcgcccagtggagccgtttgggagaattgcctgcgcac

SEQ ID NO: 71437 - DNA, 823 bp, Homo Sapiens
ggggcgtttggtgagtcccggattctggtgggttcttccgctcaggctgggtgaagcgcttccgggtcgccgccggcagcagcctcccggcgcgatgaagacactgaggctcagagaggttaagtgactcagccaaggtcaaacagctatctaggagccatgtccactttgttcccctcactcttccctcgtgtgactgagactctgtggtttaatctggatcgaccctgtgtggaagagacagagctgcagcagcaggaacagcagcatcaggcctggctccaaagcatcgcggagaaagacaacaacctggttcctattggcaagccagcctcagagcactatgatgacgaggaagaagaggatgatgaagatgatgaggatagtgaagaggactcagaggatgatgaggatatgcaggacatggacgagatgaatgactacaatgagtcaccggatgatggagaggtcaatgaggtggacatggaaggcaacgaacaggatcaggaccagtggatgatctaggtagacaaggcagggtggcctcagggagattccaggccagcccaaactaccctgcatcccaacccccaacccctgcccacagaaccagctgatggccccagtgcctgaaagtgcccttgggcacctcctcagctgctgccaggatctggtctctttggcccctcccaggccatcagtctgcacttgaaatccccagggcctgaaacctactccaccttcctggccagtacctcaccccttgattgccaggtctggtctaagtttctttaataaagacaaaggagtgattttccaaaaa

SEQ ID NO: 71438 - DNA, 923 bp, Homo Sapiens
cagtcgacggtaccggacatatgcccgggaattcggccattacggccgggggggagcggggaaaacaaaaggagacgaaggacgcatgcgtttggtgagtcccggattctggtgggttcttccgctcaggctgggtgaagcgcttccgggtcgccgccggcagcagcctcccggcgcgatgaagacactgaggctcagagaggttaagtgactcagccaaggtcaaacagctagtaagtggtggagccaggactcaaagccagtctaggagccatgtccactttgttcccctcactcttccctcgtgtgactgagactctgtggtttaatctggatcgaccctgtgtggaagagacagagctgcagcagcaggaacagcagcatcaggcctggctccaaagcatcgcggagaaagacaacaacctggttcctattggcaagccagcctcagagcactatgatgacgaggaagaagaggatgatgaagatgatgaggatagtgaagaggactcagaggatgatgaggatatgcaggacatggacgagatgaatgactacaatgagtcaccggatgatggagaggtcaatgaggtggacatggaaggcaacgaacaggatcaggaccagtggatgatctaggtagacaaggcagggtggcctcagggagattccaggccagcccaaactaccctgcatcccaacccccaacccctgcccacagaaccagctgatggccccagtgcctgaaagtgcccttgggcacctcctcagctgctgccaggatctggtctctttggccccctcccaggccatcagtctgcacttgaaatccccagggcctgaaaacctactccccctttcctgggccagtaccctccaccccttggattgcccgagtccggggccaaagtttctctttaaaa

SEQ ID NO: 71439 - DNA, 728 bp, Homo Sapiens
  misc_feature (71)..(71): n is a, c, g, or t
ttatctgacagatgcaaaacctctttcagcatgcgcatttgatggcaatactgagcaggggctacattagnaggctatttctgcccacagtgtcgggcaaagtactgtgagctacctgtgaaatgtaaaatctgtggtcttactttggtgtctgctccccacttggcacggtcttaccatcatttgtttcctttggatgcttttcaagaaattcccctagaagaatataatggagaaagattttgttatggatgtcagggggaattgaaagaccaacatgtttatgtttgtgctgtgtgccaaaatgttttctgtgtggactgtgatgtttttgttcatgattctctacactgttgccctggctgtattcataagattccagctccttcaggtgtttgattccagcatgtagtatacattgtatgtgttaaaaagaaatttgcaactgtgaataaaaggacttctttagaagaagcttcatttaaaacatgaaaggataatctgacttaagaaactttttgctaagaaaaggtaatattttattaaattttaaatttgtgttgtcacagaaatacctgaaattcagtagtacttcattcaattaattttgttttctattattttgagttatactgttttcaaagtcattatgcagtatgtataaacttataagaattaaattgatgtgataattttatgtttttataattaaatatagaatctttaaa

SEQ ID NO: 71440 - DNA, 1817 bp, Homo Sapiens
tgtctggggagagagtatgaagtcgacggcgcgccgaattcggcacgagggcgaaccgcaccacccagatcccggggtgcgcggagggcggcgtctctgacggaagccggggcggacggtcggagtccggaagaaaaacagtccgcgacagctaggcgcgtgagaccggccgcccgcagggctgctctggcctggacccgctggccgggagacgcgaacctgccggaccaccgcgcggggacgacggcggccatgagctcgcggaagctgagcgggccgaaaggcaggaggctcagcatacacgtcgtgacttggaacgtggcttcggcagcgccccctctagatctcagtgacctgcttcagctgaacaaccggaacctcaatcttgacatatatgttattggtttgcaggaattgaactctgggatcataagcctcctttccgatgctgcctttaatgactcgtggagcagtttcctcatggatgtgctttcccctctgagcttcatcaaggtctcccatgtccgtatgcaggggatcctcttactggtctttgccaagtatcagcatttgccctatatccagattctgtctactaaatccacccccactggcctgtttgggtactgggggaacaaaggtggagtcaacatctgcctgaagctttatggctactatgtcagcatcatcaactgccacctgcctccccacatttccaacaattaccagcggctggagcactttgaccggatcctggagatgcagaattgtgaggggcgagacatcccaaacatcctggaccacgacctcattatctggtttggagacatgaaacttcggatcgaggactttggggtgcactttggtcgggaatccattaaaaatcggtgctaccgtggcctgtgggagaaggaccagctcagcattgccaagaaacatgacccgctgctccgggagttccaggagggccgcctactcttcccgcccacctacaagtttgataggaactccaacgactatgacaccagtgagaaaaaacgcaagcctgcatggaccgatcgcatcctgtggaggctgaagcggcagccctgtgctggccccgacactcccataccgccggcgtcacacttctccttgtctctgaggggctacagcagccacatgacgtacggcatcagcgaccacaagcctgtctccggcacgttcgacttggagctgaagccattggtgtctgctccgctgatcgtcctgatgcccgaggacctgtggaccgtggaaaatgacatgatggtcagctactcttcaacctcggacttccccagcagcccgtgggactggattggactgtacaaggtggggctgcgggacgttaatgactacgtgtcctatgcctgggtcggggacagcaaggtctcctgcagcgacaacctgaaccaggtttacatcgacatcagcaatatccctaccactgaagatgagtttctcctctgttactacagcaacagtctgcgttctgtggtggggataagcagacccttccagatcccgcctggctccttgagggaggacccactgggtgaagcacagccacagatctgagccaggatgggagtgaatcccaggcggaggccagagctggcagccagctctgcctttccactgccgggagtgctgggggcccagcctggccccctgaagagacagccaagtgtcgtccacatactcctcccagagtgagctctaaccaggctcatttgctctctccactactcatctctggaattagccgcttaaatacaggttataaaagctgaaaa

SEQ ID NO: 71441 - DNA, 1242 bp, Homo Sapiens
gaggctggaccggtccggattccctgcatgcgtgtggaggcgctgaggctgctggaggcgcgggccgggcggtgcgcactgcgggcgcatccctgccccggcgccgtccgtgcccgcgggacctgacagccgggtcagagggcgaagctgtgctcaggcccgggctggacgcagagccagagctgtccccagaggagcagagggtcctggaaaggaagctgaaaaaggaacggaagaaagaggagaggcagcgtctgcgggaggcaggccttgtggcccagcacccgcctgccaggcgctcgggggccgaactggccctggactacctctgcagatgggcccaaaagcacaagaactggaggtttcagaagacgaggcagacgtggctcctgctgcacatgtatgacagtgacaaggttcccgatgagcacttctccaccctgctggcctacctggaggggctgcagggccgggcccgagagctgacggtgcagaaggcggaagccctgatgcgggagctggatgaggagggctctgatccccccctgccggggagggcccagcgcatccgacaggtgctgcagctgctctcctagtgggttcagcgcggggcggggccgctgcccagtgcagggctgcctcagaccacacagggtgcagctcctccggcggtgggggccgggttcaccagcagggcagcggctgagcaagggctttcagctcctccggtggtgggggccgggatcaccagcaccagagcctcgcaagggccccttccctcctccagaccctccttggccggtgacggctgtgacagtgatggcaggttcagtgccttcagcgcagagcgtggatgctctggaatcacccggacccctggccttggagggaccctccagccccaggaatctgctttggagggaaatgtctatttttctaccgggaatattttagagattggggcatgctggctcctcccgccagctgcaaacctgcaccttccgcctgattcccgatccccctgcgtgggccgcattcctggtcccctgcctgcgtccatcgaggggcctggctgtggcctgttttcctttgaccccacacagcgtcattgcgggtcatggggagcccctggtgggagcttgtggagtcggatcacgtacctgtgcagaaaccgcctctgtggctgcatttgaaataaaacccgacccagcagcagccgtgggtcctgctctgtaaaaaaaa

SEQ ID NO: 71442 - DNA, 919 bp, Homo Sapiens
ctggcagtactactacggtctctaggtagcgaggcctgggtggcgaattcggcacgagggcgacgcagctgttcacgcttaggtgggcgcaggatggcaaaacagaagagaaaagttcctgaagtgacagagaaaaagaacaaaaagctgaagaaggcgtcagcagaggggccactgctgggccctgaggctgcaccaagtggcgaaggagccggctccaagggcgaagctgtgctcaggcccgggctggacgcagagccagagctgtccccagaggagcagagggtcctggaaaggaagctgaaaaaggaacggaagaaagaggagaggcagcgtctgcgggaggcaggccttgtggcccagcacccgcctgccaggcgctcgggggccgaactggccctggactacctctgcagatgggcccaaaagcacaagaactggaggtttcagaagacgaggcagacgtggctcctgctgcacatgtatgacagtgacaaggttcccgatgagcacttctccaccctgctggcctacctggaggggctgcagggccgggcccgagagctgacggtgcagaaggcggaagccctgatgcgggagctggatgaggagggctctgatccccccctgccggggagggcccagcgcatccgacaggtgctgcagctgctctcctagtgggttcagcgcggggcggggccgctgcccagtgcagggctgcctctagaccacacagggtgcaggctcctccggcggtgggggccgggttcaccagcagtgcagcggctgagcaagggctttcaggctcctccggtggtgggggccgggattcaccagcacagagcctcgcaaggggccctttcctcttcagaccctctttggccgtgacggttgtgaccagtgatgggcaggtcagtgc

SEQ ID NO: 71443 - DNA, 1106 bp, Homo Sapiens
tattcggctagtacgaggctgggggtcgaattcggcaccgagggccggaaggcggcgtccgcgacgcagctgttcacgcttaggtgggcgacgtgggcgcaggtgggcgcaggatggcaaaacagaagagaaaagttcctgaagtgacagagaaaaagaacaaaaagctgaagaaggcgtcagcagaggggccactgctgggccctgaggctgcaccaagtggcgaaggagccggctccaagggcgaagctgtgctcaggcccgggctggacgcagagccagagctgtccccagaggagcagagggtcctggaaaggaagctgaaaaaggaacggaagaaagaggagaggcagcgtctgcgggaggcaggccttgtggcccagcacccgcctgccaggcgctcgggggccgaactggccctggactacctctgcagatgggcccaaaagcacaagaactggaggtttcagaagacgaggcagacgtggctcctgctgcacatgtatgacagtgacaaggttcccgatgagcacttctccaccctgctggcctacctggaggggctgcagggccgggcccgagagctgacggtgcagaaggcggaagccctgatgcgggagctggatgaggagggctctgatccccccctgccggggagggcccagcgcatccgacaggtgctgcagctgctctcctagtgggttcagcgcggggcggggccgctgcccagtgcagggctgcctcagaccacacagggtgcagctcctccggcggtgggggccgggttcaccagcagggcagcggtgagcaagggcttcagctcctccggtggtgggggccgggatcaccaacaccagagctcgcaatgggcctttcctctcagagcctcttggcggtacgggtgtgacagtatggaggttcgtggctcgggcaagcgttgatttctggaattcccggccctgcttggtgacctcagccagattgttggggacttatttttccggatttaagtgggtgtggcccgcggtagcggtcgcgtccccgggggtttgcgcgataggcgggggtctcccgtcttgcgggggtgtcttcggtttcccactgtt

SEQ ID NO: 71444 - DNA, 905 bp, Homo Sapiens
cacctgtcacacgtcacgccaagagtttggaggaggaagggcccttcgagctctgtctgtgatccggcccccacaccggaggactgaaagcccttgctcaccgctgcctgctggtgaacccggccccaccgccggaggagctgcacctgtgtggtctgaggcagccctgcactgggcacagccccgccccgcgctgaacccactaggagagcagctgcagcacctgtcggatgcgctgggccctccccggcagggggggatcagagccctcctcatccagctcccgcatcagggcttccgccttctgcaccgtcagctctcgggcccggccctgcagcccctccaggtaggccagcagggtggagaagtgctcatcgggaaccttgtcactgtcatacatgtgcagcaggagccacgtctgcctcgtcttctgaaacctccagttcttgtgcttttgggcccatctgcagaggtagtccagggccagttcggcccccgagcgcctggcaggcgggtgctgggccacaaggcctgcctcccgcagacgctgcctctcctctttcttccgttcctttttcagcttcctttccaggaccctctgctcctctggggacagctctggctctgcgtccagcccgggcctgagcacagcttcgcccttggagccggctccttcgccacttggtgcagcctcagggcccagcagtggcccctctgctgacgccttcttcagctttttgttctttttctctgtcacttcaggaacttttctcttctgttttgccatcctgcgcccacctgcgcccacgtcgcccacctaagcgtgaacagctgcgtcgcggacgccgccttccggcagggacccgccctcgtgccgaattcgccacccaggcctcgctaccttg

SEQ ID NO: 71445 - DNA, 1071 bp, Homo Sapiens
  misc_feature (37)..(38): n is a, c, g, or t
  misc_feature (41)..(41): n is a, c, g, or t
  misc_feature (45)..(45): n is a, c, g, or t
  misc_feature (69)..(69): n is a, c, g, or t
  misc_feature (83)..(84): n is a, c, g, or t
  misc_feature (112)..(112): n is a, c, g, or t
ttcaccactgatacctgtcatagtccacttgacatannccnttgnaagaatggactaaagttctctgtntggcaaaatcagtnncagggatggatgtatgtgttctgctccntatcaaatccaccacgtctctgtgaaacactctaccttgtttttggtttgattctactgatgtcagggtttagccggtagaaggagtagttcagtttgtcaattcaggagaaactgtactggtcagtcacatcttacggcgaagggagagggaccttaggggagcagagaagacaggcaaagttgtggactgtttgatcttgtattacccacaggaatgagggcagctaaacccatagaaggagttggaccaaggcgaattacgagtcctggtcccagcagtatgtgtgctgacttctgggtgccccagaaatagacctctcctgtagagtggtgatatacagaatgagtttcagtttgcattgcagctgggattgaaagtaatcagtcgtgagcaggcaggcaggaggtcctgttagccctgccttccaggaaggttggggtgggagttttgagtgggaaagaggatgacatgtgtgagagagttctgagcctgtttgctagggagagtgagtgagtgctcttgggcactgctcaggccgtttctgctgacttgcctggcttacaataaatgcccaataaatatttgttgaccatatgtgttgtacactgtggtgccctgtccagtcccctctaccaagctgagacccccatccccagctgctctgagtttgggctgcaagtgctcacagctcttgttctccagaaactggagaattgccctcaggagatgagagccatctcacctcacccaggagtcacttcctctctacaccccaacacctggttcatttgattaaagcggagaaaactccagggtgctatgactgctctggcacccttggatcaggccaagctagactttttctgagccttcatccgtgctaagctctctcccttctctatcctgtttcattccctccctcaaaggcgtttcccaaataaatcacactgtcaatc

SEQ ID NO: 71446 - DNA, 357 bp, Homo Sapiens
  misc_feature (56)..(117): n is a, c, g, or t
agttgtaggtcgcagcggggaaattttttgcgactgtacacatagctgcagcattnnnnnnnnnnnnnnnnnnnnnnnnnnnnnnnnnnnnnnnnnnnnnnnnnnnnnnnnnnnnnngataaacagttacaccttgttttcaatgtgtggctgagtgcctcgattttttcatgtttttggtgtatttctgatttgtagaagtgtccaaacaggttgtgtgctggagttccttcaagacaaaaacaaacccagcttggtcaaggccattacctgtttcccatctgtagttattcgatgaagtcatgtacatgaccgttctgtagcaataaatgtgccatttttataaactgttcaaaa

SEQ ID NO: 71447 - DNA, 355 bp, Homo Sapiens
  misc_feature (355)..(355): n is a, c, g, or t
aaatttcttaaaattttgattaatcattggcaagtaacaagaaccaagtatatataaacacataaaaacattttgggcaaatagctaattttatttttttcacatattaaaacccactaaaaataaccatttttctaactaaccacaacaaaaattagtgagaagagtactgctgctttacatttctccaaatctcttcaatgtctgatgacagacgaaagctggaatcttgtatctgcttttgcattcagcctattacaatatcacaccagatagcctcttgaaaactcctctgcatactcatgaaaaaatgagtgaaaaagataaatgatggctgggcgttgtggctcatacn

SEQ ID NO: 71448 - DNA, 714 bp, Homo Sapiens
  misc_feature (56)..(56): n is a, c, g, or t
  misc_feature (74)..(123): n is a, c, g, or t
  misc_feature (179)..(179): n is a, c, g, or t
gactcagatcttactctaagttgagtgatctttttctattttgctttggcagcctntaaactgtttcaaaactnnnnnnnnnnnnnnnnnnnnnnnnnnnnnnnnnnnnnnnnnnnnnnnnnnataaaaattacataatcgttggtggggggatggtgggggagtaaagaacagaccanaaaaataaattcaggtgtttgcaagaagactcaatcctgaattgaagaggaactcagacacgagaagaggtcacctgagacattgagctatgagctaggagagaagagacagagaaggaaaaggaaatgatatgtttattctttctccaaatcgtgagattgtggacgtgagggcgatctggctgcgacatttgtcaaccctttgatcgccagggttgattcagctgatctggctggctaggcgggtgtccccttccttcctccctgctccatgtgcatcgctcccgaagctgtgcacttggccaaagagaatgaccatccccgatgaaggaggaccggtctttggtcaacggtatatgagtagctgcgctcccctgccagaacctccaaacaagctctcaaattactaaattatcaggaaccactgtctttggagaatattttctaacctttccaggaggtgtttttgtgtgttttggggggccttggattttacaagagggctggtagaataaatacatacttgaagactgtt

SEQ ID NO: 71449 - DNA, 877 bp, Homo Sapiens
  misc_feature (850)..(850): n is a, c, g, or t
atatttggaagaaggggtcagggggaaccttgcctctagtggacaagggccctggtttacacagccctccatatttattaggcaaaagagatagcgaaaaagcggggttgggggcggtgattgtcgggtaattgtcagtcagctgtttggttcacagcaggctttgaactacatgctttgaacaataggcgctaattttctccgtagataacttcaaggagccatcagggaatgatgtccctcagcaaacgttttggtggcaggacaatgtgagtttgcccacatcctgcattcatgataaacagtttgctgtttgatcatatagcctccagcgaaatgctgagctggtcacgtcccacgggccttcggctccctgcatatccccctttttgttttatgtattaattgaaagaatgtaagtccaggctgggcagctcttactatccaattggtggtccatcgaattttacagaaaatgtagcattagagctgtgtcgtgactcctatcggccctctctccatctttgcactcaggctcagctggctcatggctcgtaccggagggaccgggctcatggttggccaccataggttcctccagtctcccgttccatggtcgcacgcacagtttgtccatctccttatatccactgtctcattgtctggatgtggtgatatgggagatttcagttcctcgattctctctgggaggcctgatggttggtttcctccagaagtgtgcggatcctctccaggtctgggggctgtccagcctgcagcagctgccatatgctgtggttctcatccagggtcacctcgagcaggtccccctccatcatgagctcctccnaaggggggtataaagaagaggagtttg

SEQ ID NO: 71450 - DNA, 197 bp, Homo Sapiens
ccagaagtgtgcggatcctctccaggtctgggggctgtccagcctgcagcagctgccatatgctgtggttctcatccagggtcaacctcgagcaggtccccctccatcatgagctcctcaaagggggcccgggttgcctcaggaagttccaacacagggccagtcaactgtgggcaacagcgaggacagcagctcca

SEQ ID NO: 71451 - DNA, 901 bp, Homo Sapiens
  misc_feature (22)..(22): n is a, c, g, or t
ctaagcctaaagagggaccatngtagagtcactgctacatggtgtatcaatccctgggacccaagttgccattgagccttattgactcaggttcccaaattctagttgtatcctcctccctgacctgagctgatagagggttcaacagagtcatatcatagatcctggcccggagggcagtccacatccaaccatgctacggagagtgaacctgcaccccaagacccagctgccacaataggttcatgagactctgagcttagaaacccaacgccacataagctccaagcaccagtacctagaacccagcactgctgcagctacttgtaggccatgccagacctgacactaagagggatccccctgactgagtctcctcatttggggaaaatgagaagagaaagacccaaaaagccctttacgctaaggatattaacaacctatgctaccaccgctgctgcacaaacttctatagtctaggccactgaggcactcccagttattgttgatgttgaacataggcaaagaagctgcatggagactataccattgcacctaagtggaaacacagtcatcacatccttctcaactggaacactaaaacccaactgcaggtgaaagtctttctctaagaaatccactccagaaagtctggaagaggtgatctttccaccagaagcatggacacttaacatgaggacacaagaaacacaaaaaaggaaggaaatataacaccaaaaaagcaccaaaggaactctggctagtaactagagcccagtgaaaaggagatcaacaaattacagaaagggaattcaaaataatgaccttaagaaaactcaatgaggtacaagaaaacacacacaattcaaagaaattaggaaaaagaattcacaatttgaac

SEQ ID NO: 71452 - DNA, 784 bp, Homo Sapiens
  misc_feature (52)..(52): n is a, c, g, or t
tcagccatgaatcaggcataaatattctgatggttaatcgtagacatctacntaactggattgagagacacacatagctggtcaaacacgatgtcagccatgaatcaggcataaatattctgatggttaatcgtagacatctacttaactggattgagagacacacatagctggtcaaacacgatttcagccatgaatcaggcataaatattctgatggttaatcgtagacatctacttgactggattgagagacacacatagctggtcaaacacgatttcagccatgaatcaggcataaatattctgatggttaatcgtagacgtctacttgactggattgagagacacacacagctggtcaaacacgatttctgggcatatctatgagggtgtttctggaagacactgagataaccatgacccaatgtggatgggcactgatatggtttggctgtgtccccacccagatctcatcttgaattgtagttcctgtaatacctacatgtcgtgggagggacccaatgggaggtgactgaatcatggtggtggttaccgccatgctgttctcatgacagtgagtgagttctcatgatctgatggttttataaggggcttttcccctttgggtcagcacttcttgttgctgccatgtgaagagggatagctttgcttccccttctgccatgattgtgaggcccctgcagccatgtggaactgtcagcccattaaacccctttgttctttataaattgctcagactcaggtatttcttcatagctgta

SEQ ID NO: 71453 - DNA, 641 bp, Homo Sapiens
  misc_feature (205)..(222): n is a, c, g, or t
  misc_feature (426)..(436): n is a, c, g, or t
cagtgcgcctccgagaaggacccaggtacgctactcggaggaaagtgccttcccatcagccccagcgcatggccccgggaccctggcgtccctgtttcgaacccagggagaatctcggcccgctagggtttccccagtgcgggcagaaggcccctgaggggaaggtggggtttgagggagggaaagtgcagcacctgagggaggnnnnnnnnnnnnnnnnnnctcgccaccagaaagcgttcctgggtcctgcacgcacgaaagttccttcccttcaatccctgcgctgggacccggggaccctggcgttcctgattccaacccagggagcgcctcgggccagctaggggtatcgcaaagtgggcagaaggcccctgaggggaaggttaggtttgagggaggggatgtgaggcacctgtggcaggnnnnnnnnnnntcgcgccgccgagaagcggggcctgggtcccccatgcacgaaactgccttcccttcaacccctgctctgggtcccagggaacctggcgcccctgattcgaacccatggagcttctcgggcccgctaggggtaccccaaagtgggcagatggcccctgaggtgaaggtaagatttgagggaggggaggtgaagcacctgtgtcagg

SEQ ID NO: 71454 - DNA, 699 bp, Homo Sapiens
gaaaacccacctcaaatcacggcttatagcaacaccctttatttgcttataatcctatgctctggcagtctgggcagagctctgctggcgtgatccaccactgctccatgggtgccagttgggactccacacacctttgtggttagtgagcagattggttggaggctgattgaccttgactggcctcatgtatgtgtctcaaagttggctggggctgtcggctgaaattccttagttctactccacatggcctttccccatggccagcccaggctgagatctgagattgaagagggtgagaacagaaagtacaagatcttcttttgacttgaaagctagcccagaatcgagggaaataaaccccaccttttgatggaaggagcttcaaagaatttgtagtcatttccaatccacgaagagtaggtacccactatttgttgaataaagccctattgaaagctttttagctatccagatgcaaattactggccaacctttgggtagaattataaaattctgcccaaaattctaccaaattactggtacttgtaaaattctaccaaataactggccaacttttgggtagaattgtaaaaattaagttgtaaataaagcctattgcctaacaggaacttcaaagtcagagaatcctaaaatgattgtgctacacagggccacatagagcacagctctgtctca

SEQ ID NO: 71455 - DNA, 1223 bp, Homo Sapiens
  misc_feature (537)..(566): n is a, c, g, or t
  misc_feature (1052)..(1060): n is a, c, g, or t
  misc_feature (1157)..(1165): n is a, c, g, or t
gggtccggaattcccgggatggaagcccacggcccacaggggtgtagcccgagacccacctgcagcccccagcccttgccaggaaagcagcagccgcagccatggcggggatgaagacagcctccggggactacatcgactcgtcatgggagctgcgggtgtttgtgggagaggaggacccagaggccgagtcggtcaccctgcgggtcactggggagtcgcacatcggcggggtgctcctgaagattgtggagcagatcaatcgcaagcaggactggtcagaccatgctatttggtgggaacagaagaggcagtggctgctgcagacccactggacactggacaagtacgggatcctggccgacgcacgcctcttctttgggccccagcaccggcccgtcatccttcggttgcccaaccgccgcgcactgcgcctccgtgccagcttctcccagcccctcttccaggctgtggctgccatctgccgcctcctcagcatccggcaccccgaggagctgtccctgctccgggctcctnnnnnnnnnnnnnnnnnnnnnnnnnnnnnngagccagaggaagagctctatgacttgagcaaggttgtcttggctgggggcgtggcacctgcactgttccgggggatgccagctcacttctcggacagcgcccagactgaggcctgctaccacatgctgagccggccccagccgccacccgaccccctcctgctccagcgtctgccacggcccaggctccctgtcagacaagacccagctccacagcaggtggctggactcgtcgcgggtgtctcatgcagcagggcattaaggccgggggacgcactctggctgcgcttcaagtactacagctttcttcgatttggaatcccagacagaaccccgggcgggctgaccacagctgtatgaacaggccccgggggggacctgctgcttggaggagaattggctggccccgaaggaggagatgatggggggttggccccccctggcagaaaccccctctaacaaggcttgtcccaaaaaccggggaannnnnnnnnaaacccggcttggccacaacccccggggctgggaaccaacctggatggggggccctggaccaaccctggagggggaaaccttggagaggtgccgggnnnnnnnnnaaaagtgctttgggaaaccctctcccccccattcccaaaagttccagggggacctccc

SEQ ID NO: 71456 - DNA, 743 bp, Homo Sapiens
  misc_feature (54)..(55): n is a, c, g, or t
  misc_feature (62)..(127): n is a, c, g, or t
  misc_feature (608)..(617): n is a, c, g, or t
gtaaagcgtaaaaacatcacaaagtaggtcattccatcaccacccttgtctctnntacacannnnnnnnnnnnnnnnnnnnnnnnnnnnnnnnnnnnnnnnnnnnnnnnnnnnnnnnnnnnnnnnnnaggtaaattgcacttttaaaaaaataattggttgacttaatatatttgctttttttctcacctgcacttagaggaaatttgaacaagttggaaaaaaacaatttttgtttcaattctaagaaacacttgcagctctagtattcacttgagtcttcctgtttttcctgtaccgggtcatggtaatttttggttgttttggttgttttcttaaaaaacaagttaaaacctgacgatttctgcaggctgtgtaagcatgtttacctgttggcttgctttgtgtgtctgttaaatgaatgtcatatgtaaatgctaaaataaatcgacagtgtctcagaactgaataactgcagtgacttgatgctctaaaacagtgtaggacttaagaatagatggtttttaatcctggaaattgtgattgtgacccatgagtggaggaactttcagttctaaagctgataaagtgtgtagccagaagagtacnnnnnnnnnngtaaccactgtcttgatggcaaaataattatggtaaaaaacaagtctcgtgtttattattccttaagaactctgtgttatattaccatggaacgcctaataaagcaaaatgtggttgtttcaaaaa

SEQ ID NO: 71457 - DNA, 1129 bp, Homo Sapiens
  misc_feature (288)..(334): n is a, c, g, or t
cagacacacaaagcaagccaacaggtaaacatgcttacacagcctgcagaaatcgtcaggttttaacttgttttttaagaaaacaaccaaaacaaccaaaaattaccatgacccggtacaggaaaaacaggaagactcaagtgaatactagagctgcaagtgtttcttagaattgaaacaaaaattgtttttttccaacttgttcaaatttcctctaagtgcaggtgagaaaaaaagcaaatatattaagtcaaccaattatttttttaaaagtgcaatttacctttnnnnnnnnnnnnnnnnnnnnnnnnnnnnnnnnnnnnnnnnnnnnnnngatccccaaaggcaaaatgtgtagagagacaagggtggtgatggaatgacctactttgtgatgtttttacgctttacaaaaagcagatttggtattcagaaaagcctgcaaatacaacattgcttaagagaacctgtaaacacgtttggaatacaatgcaacacaagtcagcaaggacaggggtaggtccaaaggagccagctagggggaaaggtgacagaaaaggagagggaaggatggagacagacatcgcctgtggtctctaagggggccatgtgtttaatttataaggtttcctccccacaggagttctgatgtgatctatcgttcataaaacacatttctcctcttgcaaagtagaatagactttaagtttcccaatgactttttgagtttatagggcctctttctatgtagtgtgtctttagaaataattggacaagaaaaaaatacggtttttccccgaaaataaaaagctcccatgtgttctagaatctcaaaagatacttaaccaggaagcagcaggccctcgggtcagactcctattagcttagcacttctgaactggtgactttggttggttcacttgggttaatgaggctcggtgtttaggtttgaccgtgactttagccagagagcactgcacagaggaaaatctctccggttctgcagcctcatacctctaaagcttctgggccctgtctgcggttccacgtgtgatactgtgggtgagacggcatggccccccggccgtaatggccgaattcccgggcatatgtccggtaccgtcgactg

SEQ ID NO: 71458 - DNA, 338 bp, Homo Sapiens
gagggtaggtgagacttcgccaatggcatctttcctcaggaggcgatgtgcagcttcagctcaggtccctggaagcaggcagttttgggagaagtagacctgagcaagccaggcctggcttgctcaggtctggtctctaagggggccatgtgtttaatttataaggtttcctccccacaggagttctgatgtgatctatcgttcataaaacacatttctcctcttgcaaagtagaatagactttaagtttcccaatgactttttgagtttatagggcctctttctatgtagtgtgtctttagaaataattggacaagaaaaaaatacggtttttcccc

SEQ ID NO: 71459 - DNA, 482 bp, Homo Sapiens
gcctacgaggcccagcctctgtggccctgtgtcctgcaggtattgggagatccacagctaagacgccaggaccccctggaagcctagaaatggtgagagtgccggtccagcatcccgagagaggtgaagtgtctgtggcgagactcaggcctcccctcagtcagctccacaatctgcaccccgaattctccttacccagctctgcctcagtcccattcagccataagatggcggctacgctgacagcctggcccccgggcgtcctgtcgcttccccgcgcagtgactgtgcccctggcctggagcgctctgtgggcagctctgcacccgcagtgccgtgtctctcccagattgtgcagggaccaccggagggtcttcaggggagaatcctgactcgcggtgcgggttcatgaatgggaagagctttggtctgtggggttcacagtttctcttttctgctattaaaattgtatggggccgggc

SEQ ID NO: 71460 - DNA, 1002 bp, Homo Sapiens
  misc_feature (12)..(12): n is a, c, g, or t
  misc_feature (99)..(99): n is a, c, g, or t
attgaaatattntgctctgggtagttgtcaaacattggttaagtccattataacctcttttgtgtaacttacactcatccacactttcacagccttttntaaagtgtaaattgccatgtccacatttttcaaattttctcagtatcactttttggtaagaatcttttatgctctgctctggccaaaggtcttgggcaaaatgagaacacacaactgggggtttggcaatcatctcatgcctcttcatagtcaaaggttttattccttgctccagacaggtgatcaggtctggcttagagacaacaataccaaggaagaccaggtgtctgtagttctctaacatcacatccctatataaattccgctgtgcagcgtccaggcaatgccactcctccagagagaactctacagccacatctctaaattgcaatgatcccatttctaggcttctaaggggtcccggcatcttggctgtggatctcccaatacctgcaggacacagggccacagagggtgggcctctaggagcagaggacacagagtagcgaagaggcgacctagagctccggatgcagcgagagacaaaggccgcgccaaacccggaagccgtcctctttgctccagctgcctgcctgattggacggtttccagcccagcgtctctgattggataatgcttaaggccccgcccactcagtccctgagtgacagaggatgtgatcagatgctgggctgagtgatgaaagagtaacagcctaagctgcagccttttcaggcagggcttcctccctgagctgagccaggcccaccctagagcaagggaaaattctatctcttttttactctctctctttttgcatgtattcaaaaggtgaacagaagtattttgctgtcatattaataatacataaaatttttgttagaaaatcaacttttactttggtaatagtgtattatcaatactaaagctaattttaataaaaccttatatataaatcaaaaa

SEQ ID NO: 71461 - DNA, 538 bp, Homo Sapiens
gggcctttgtctctcgctgtcgccggagtcccaggtctgtcttcactgctctgtgtcctctgctcctagaggcccagcctctgtggcgctgttaccagcaggtattggagatccacagctaagatgccaggaccccctagaagcctagaaatgggactgttgacatttagggatgtggccatagaattctctctggaggagtggcaacacctggacactgcacagaagaatttatatagaaatgtgatgttagagaactacagaaacctggccttcctgggtattgctgtctctaagccagacctcatcacctgtctggaaaaagaaaaagagccctggaatatgaagcgacatgagatggtggatgaacccccaggattggatttttcattactgtgaagaaaaacactggaattttgataaggagttctttaaatcttacagggtcctttgggataatatgggcatttccataaatactttattcctttcaataagaaattaaaacatttttaaaaatcccgggacaccaaaaagg

SEQ ID NO: 71462 - DNA, 800 bp, Homo Sapiens
  misc_feature (390)..(630): n is a, c, g, or t
  misc_feature (743)..(743): n is a, c, g, or t
ggggggatttggcggggcctttgtctctcgctgcagtcgcagctccaggtctcgtcttcactgctctatgtcctctgctcctagaggtccaccttctgtggccccgtgacctgcaggtattgggagatccacagctaagacgccaggaccccctggaagcctagaaatgggaccactgacatttagggatgtggccatagaatcctctctgaaggagtggcaaatgcctggacactgcacagcagaatttatatagaaatgtgatggttagagaactacagaaacctggtcttcctgggtattactgtctctaagccagacctgatcacttgtctggagcaaggaaaagagccctgcaatatgaagagacatgcgatggtagccaaaccnnnnnnnnnnnnnnnnnnnnnnnnnnnnnnnnnnnnnnnnnnnnnnnnnnnnnnnnnnnnnnnnnnnnnnnnnnnnnnnnnnnnnnnnnnnnnnnnnnnnnnnnnnnnnnnnnnnnnnnnnnnnnnnnnnnnnnnnnnnnnnnnnnnnnnnnnnnnnnnnnnnnnnnnnnnnnnnnnnnnnnnnnnnnnnnnnnnnnnnnnnnnnnnnnnnnnnnnnnnnnnnnnnnnnnnnnnnnnnnnnatgagccacagtgcccggccaagtatttttatatttcagatcatatctactggaatggatttggtgacagaaatttgcattgcttttacctattggctttcagtaacatggtnataataaattaatgggtatgaaaaatggactcttcatatggaccacatatgtggaaa

SEQ ID NO: 71463 - DNA, 367 bp, Homo Sapiens
tgatcaggtctggcttagaacagcaatacctgccaagaagaccaggtttctgtagttctctaacatcactttcctatacaaatcctgctgagcagtgtcccaggcattgccactcctccagagaaaattctatggccacatccctaaatgtcaatggccccttttcataaaaagagtacaccagaagattcctgtcagccccagggcatccacttgcttccttgagaggatacactccagacttcaggttctccatttctaggcttccagaggttcctggcgtcttagctgtagatctcccaatacctgcaggtcacagggccacagagcctggacctctaggagcagaggacacagagcgctgaag

SEQ ID NO: 71464 - DNA, 946 bp, Homo Sapiens
  misc_feature (184)..(193): n is a, c, g, or t
  misc_feature (523)..(532): n is a, c, g, or t
  misc_feature (877)..(877): n is a, c, g, or t
gaagtgatcccccaaagagacctccagactctaccatgagtgtctccagctgaactcatggtgtctaatcctcaccctagcttatcctgttcaaatcatttccatctttttctggatgaacctgggcggatgtcagaccagagaagagcacagaatgtaccagacagagtgagactccgtctcnnnnnnnnnncaatataaggtgaaggccaagcagggtggcacatacctgttgtctcacctactcaaaaggctgaggccagaggaggattgctggaagtgagttcaaagccagcctagagaatatattgagactctgtctctaaattttatatatatatggtgaattcacctttaccatatcttttatgtataagcaatgggattgattagcaagtaatgggactctgaaatcaaaggggtaaatttgggtatatctttataaatataataaccttgaaccccacaaatctctctaagcgtcctttaaaaaatagactttctgtctgagtaggtgagtccnnnnnnnnnngtttgaagatactagaaagctcttacttgagacagctcctaaaagaatgtcaattcaacagaagtctcatagccagtataactaattctaaccccctaactagagtcagatactaggatacccctaagggacaacaatgaaatctgaatttgggtgtcattgcttacatatcaaaacagttgcaagagacagttaatttatatttgcagaaaccatatgaatttgtatgaaaatgattttttaaagtgctatatcaagaaaactagaacataatgcagaacaaataaaatttacttatatgggtgccaagaatagaattctgggttccgcatacatcagcatctnagaagaatctgcagtaggtatggatggttgattgaggcctttattcaatggtagtctacaaagaataag

SEQ ID NO: 71465 - DNA, 824 bp, Homo Sapiens
  misc_feature (117)..(117): n is a, c, g, or t
  misc_feature (208)..(252): n is a, c, g, or t
gcagagtgtataatgctcctgtagcactcatgaatgtgagtacaggaaaggattcactatagctcgggttcatggctgcatgtactgtggaagaaaggagtggctggagagctgtgngaggtaagctgctagtttccaagcaaactcccaagcacagctagcagaacatggattattaaaggcactaaagtctaatttattctaagcnnnnnnnnnnnnnnnnnnnnnnnnnnnnnnnnnnnnnnnnnnnnncaattaatggcaaaaggtctcagcctcagtgatgggaagtaaaatcaaacataggctttgccttgaatagcaggaaggactcctgagccctcttagagattgaaggaaagaaaaaatgtttatagacctagttggtttgatgctgaggggattgcaaagattcacaagtagtttccacacaatgacctcaattttcttgttaaaatagcaggtgcactaatcgtgaaagggagagattgtgtggcttgagtggggtaatgaacttttgaaatagtggccgaccacagtcagaatgaaaggattagtgaatgctattgaggggctacctcagattagaacaccataaatctgcagagtggtataattgctcctgtagcactcatgaatgtgagtacaagaaaggattcactatagctcgggttcatggctgcatgtactgtggaagaaaggagtggctggagagctgtgggaggtaagctgctagtttccaagcaaacttccaagcacagctagcagaacatggaattattaaaggcactaaaagtctaattttattctaagcaaaagaagtg

SEQ ID NO: 71466 - DNA, 701 bp, Homo Sapiens
ttcggcacgagggaggaagagattccgggaggatcccgaggacccccccagttgcagccatgtcaagactgatgctgaggaggaccccaactgtcacgagcaacacccgtcaaacacagccatccacctgaggtcagatcaagaagctgtcacagatggcagaagaaaacctgagtctgcagatgtggatcctgactctgcaagaagtagcccaccatgacaaagctgcctttgcttttatcgctttgcaaaacaaaggggacatgttgggaacaggccccccaatgtggccataaactggctccaaaactggccataaacaaaatctctgcagcactgtgacatgctcgtgatggccatgacgcccatgctggaagattgtcggtttaccagaacgagggcaaggaacacctggcccacccagggcggaaaaccgcttaaaggcgttcctaaaccacaaacaatagcataagtgatctgtgccttaacgacatgctcctgctgcagataactagccagacccatccctttatttcagcccatccctttatttcctgtaagaaatgtttttagttaatctataatctatagaaataatgcttatcactggcttgctgtcaataaatatgtgggtaaatctctgttcaaggctctcagctctgaaggccgtgagacccctgatttcccactccacaccctta

SEQ ID NO: 71467 - DNA, 1128 bp, Homo Sapiens
ttgttttacaaagtgcgaagtgcgaatcagggttctgccagccttcagactgagaggccccacagaggtttaccaccatatgtattaatagttaagtccagtcataagcaattgtttcaataggataatagagttaactgaaagtatcctcttatgggcaaatgaaggggatggccccgaagtaaaagtggtggttctggttagttatctgcaagcaggagtgtgtctttaaggcacagatcactcagctattgtttgtggtttaagacgccttaagcggttttccgccctggtgggccaggtgtcccttgccctcattccggtaaacccacaaccttccagcgtgggcgtcacggccatcatgaacgtgtcacagtgctgcagattttgtttatagccagttttggggccagtttatggccagatcttggggggcctgttcccaacatgtccccccttctttgatttgcaagctcgataacaagcaaaggcagctttgtcactgtgagttacttctcgcaggagttaggatccacatctgcagaagcaagtggtgataactgctatcatagctaccatgacaattcactcatgtgtgactcggttagtcccgctttcctcaggtatgctatctgccatctgtgacagacttcttgatctgtccccaggtgggtggctgtgttcgacaggtgttgctcgtgacagttaggggtcctcctcagccgtacagtctcaacatggctagcaacatgggccagtcctcgggatcctcccggaggtctcttcgctcagcatctaggctcatgataatgatttcacgtgtcttgatgggtatccagatcaagctgttagactttatggcctgttacaaaccacaaggccatttaactttactaagccacaaagggtttcttttacattttggccccagtgttagcccccaaagtatatgagtctcaatccaagaaattctccttccagccaaaagcacagcaagagtacatgacattcatggtccttttgcagggctgggtatcctgcgaagtgagctgttcgcatattccttgaattgaccatctggacccaatgagggaaattggattcccgagggaaaatccccgacccagg

SEQ ID NO: 71468 - DNA, 899 bp, Homo Sapiens
cagccctaggagagcttgctcacggagcctcccctgtgggtgtttgctcctccccaggctgtggccatttccccttcctccttcctgctcagccacaggcaggagtcatggaaccccaggaaaggacggaacagaacaggacagggcccccagccccatctttatctcaccggctgctgctggctcccaatgcctcccctgaatgggggagggtggtctgtgtgagtcagcggatggcacgcgtagtggacgcgaagacgggagccatctgccgggcccgttgatgcgtggcctcagaaatgcgccgcatgggttagggtctccccgaccgaggctcgaatccaggtcgaagggtcgccggagcgatggttggagaatgtggaaggggctggaggacacccgagtattcttaaagcaatccccatggccaaagatcgaacagcgtgatctgtgataccatcaagacgacctgaaatcttatcatgagccagatgctgaggaatgagactccgggaggatcccgagggacacctcgcagttgcagccatgttgagactgacgctgaggaggaccccgaagctgtcacgagcgaacagcctgtcgaacacagccacccagcctggggacagatcaagaagctgtcacagatggccagaagaaaacctgaggaaagcgggacaaccagtcacaagtgagtaatttcatggtagctatgatagcagttatcaccactgctgtgagtattccttcaacaagggctgacacagagaacaagtatacttattggggcatatttatcaacctgggcttggcaataagtgcctagatgtaatcacgtctatgacacagttacacagtgcgtttctgatctcagtatttaccatagatctgctcctata

SEQ ID NO: 71469 - DNA, 961 bp, Homo Sapiens
gttgcattgaaagccaaactggaattatgggggcaacgaatgaacattgagatttttgacatgtttcaaacattagcagagattttgaagaagactgagccagcagcttctttctctcagctgatgcatgatcacctatcttagctttcaaaagagttcgagcattactacccaaccacaaaagaaccctgaactgggaatgaatgtatccatgacccatttgtgagtaagtcaggtgaatcgattttgtccgtactagaagaggatcaattgcttgagatcacaaatgatggtggccttaaaagtatgtttgagacagcttcaaatcccatgttctggattaaactcaaggtgggatatcctgagattgccacaaaagcactgaagagtctgcttccatttccaacaggctatctttgtgaagcaggattttctgcagtgacagcaaccaaaacaagattacggagtagactggacataagcaacacacttctggtgtcactgtctcccaccacccccagatgggacaatctaattgcaggaaaaaaaaatcccagggctcccactgattccacattacagtgagttgtataactattttattatatattacaatgtaataataatagaaataaaatgcacaatacacgtaatgtgcttgaatcatcctgaaaccgtctgccacccggccctggtccatggaaaaatcctcttccgtgaaactggtccctggtgccaaaaaggctggggaccactggtttatccagggtcatccaggttggagtggggtcaggagaaatggggaaatttaggtaaaagtatacaaagttacaaacacgtaggatgaacaaatgggaagacctaatgtacaacatgagggctatagttaatgatagtggtattcaggatttatgctaaataagtagattatagctgctcttgccccaaggggggaaatgtg

SEQ ID NO: 71470 - DNA, 739 bp, Homo Sapiens
  misc_feature (232)..(273): n is a, c, g, or t
gcaagagtagatgggggagcaggagatgaccccctgtccatgtccatttctgaccactggtaccttcccctttagcagttggtgccatgcccatgttttctttgtcctaagtggggctttggtgggctgaattcttcccttccctaggggcagcccatactgagtgctggatctccagagattctgcagttccctagagacctgctggcccctgtggttgtgaaagtcaaannnnnnnnnnnnnnnnnnnnnnnnnnnnnnnnnnnnnnnnnnaattcaaaggctgaggttccctggggagggcagtgggccacaatcggtgaacaaccaatatggcacctgctgtctcagttcaggcctaaggggtatgcaggcacttctgtgtgagttggtacctggttctctatccctggaagttcccagattgccaccaacagcatttcctggggtcatgagagcacagggactcctcaaaaatttggtggtcagcaaattgttacaggggtaagaggagcagagaagccctaccctttccgtagggctatgggtttctcaggggttgatctctgctgcactcctgctgctttccttttctgcactacagcttcattctctggactctctgacagatcctggttgtcttccttcattttttcattcagattttgaccattcacctataattttgatcttatttctgaggagaactggcatctgacatccctagttagccatcttg

SEQ ID NO: 71471 - DNA, 322 bp, Homo Sapiens
gacttaaactctcctttgatataagtgtagctactcctgcatgcttttgttttgtttgcatgaggtatttttttccatcccttcattttcagtctatgtgtctttataggtgagatgagtttcatgtagacagcatatatctgggtcttatttttgttagccattcagccagtctatatcttttagttgggggagcttaaactttgacattccagcttgttattaataggtgaggacttcctgtcattttgttgttttctgattgttctgaatatcctttcttcctttattcttcttttactttcttttatgatctggaggg

SEQ ID NO: 71472 - DNA, 603 bp, Homo Sapiens
  misc_feature (197)..(205): n is a, c, g, or t
  misc_feature (333)..(341): n is a, c, g, or t
  misc_feature (603)..(603): n is a, c, g, or t
cagtcgacggtaccggacatatgcccgggaattcggccattacggccggggaaccaaagtattaagaggggaaacgcccctgtttatatctgtaggggtattttacattcaaaaatgtagtgttttttgtttcttttcaaaattaaagtatttgggactgaattgcactaagatataacctgcaagcatataatacnnnnnnnnnttgcaaaactgtttagaacgctaataaaatttatgcagttataaaaatggcattactgcacagttttaagatgatgcagatttttttacagttgtattgtggtgcagaactggattttctgtaacttnnnnnnnnntccacagttttaaaggcaataatcagtaaatgttattttcagggactgacatcctgtctttaaaaagaaatgaaaagtaaatcttaccacaataaatataaaaaaatcttgtcagttacttttcttttacatattttgctgtgcaaaattgttttatatcttgagttactaactaaccacgcgtgttgttcctatgtgcttttctttcattttcaattctggttatatcaagaaaagaataatctacaataataaacggcan

SEQ ID NO: 71473 - DNA, 1405 bp, Homo Sapiens
ggatataaaataatataagaacttctggtttacaaaatgtaaaatcttaagccaatggaacccttgatttcctacctcagtgtacacccaactattggttgtatcagtttgtgtatgtgcaaatgtcaaataatcttttgctttaattgctactgtacttgctttgaaagattacctactattttatgataaaatgtagttgtctccagagcttaaatataatttgtaaagcacttggtttaaatttctctctacctataaacagtttagcattaagggtttctattaatgacacagaattattggccaagtgtaatttcttaaaatttagcattactttaaatagccagcatgtaatacaagtaactacactacctcatatctacatgattttcaagttgtaatgcagatggacagataaaaaagattttacgtttgtcttttggccataagtgggaaagttttctgtatattgcatagcattacacatttatgcctattttaacattaacttctaaagaagttttttctaagaaaatgtttcaaggcaatattttttttgaggctgccgaagacaaatgacaggattatgagtatacagtgtatgcccttttccttcatgcagaattttgaaatgttttcagtttgtatattgcatattcacatgatcattgctcactattttatgaactggccttctcaatgtttgatgattttttaaaagctgttatgttgaattcagtaaaataacattaccttaatttttttcttattcaaattctggaactatagcaaataattcgttaaattgtcatattcaaaacaaatgtggatacagtcttggttctccatctgtaattttttttaacagtttgctatagcttactgcttaactaattttaaataaggaaataagtatgttagatgcagtagacgatacaggttgcatgtggacactcagtcacattaacaacttgggaaaaaaatggcaatgttacggtgaattctcaggtgaacttttttcagttataaaacatctattttgaatctgtaaatattttaaatgttttattaaggcatgtaataaactattctttgaaacttgttgggtagaatgaaaattaaagccataatggtaaaagatggcatactgattataaaagaagcagaaaaacattgatttttttatatctttcataatataattttctaacaatgcaataaaaccactaaacttttgtgtccatattttactgagaccatgtttcattaaaagcatagtttcatagtatttaatttacatttctccctaatgttcttacccaaatgtacctgaactaaaaaatgttagatgttggtgataagttgacagttaaataaaattctctaaaattgcttctaattg

SEQ ID NO: 71474 - DNA, 1565 bp, Homo Sapiens
  misc_feature (462)..(471): n is a, c, g, or t
  misc_feature (548)..(557): n is a, c, g, or t
  misc_feature (795)..(820): n is a, c, g, or t
tttattagtataaatggtttaatattggagacagaagcaaaaaactgcatcacacaataacatacattacaaaaataagtttgactgtttcaactacacggttatgttcacaatgaggacagaagaatcagaaaaaactttgatctaaacagcaaaaaagcaaaccctaaagttttaactaatacatttatccacttaaagtgactgagtacttctaaatctaattaccttattgtgtaactgcacaatacagaataaaaagtgaaacttaccgctgttattttaagacaaaattctaatgctagatataagcaaagggaaaaaagaaatcaagccaaagtttttaattctcaaaagaaaagcaactttctttctatcaatcaatcaatcaatcaacccgaaatcaaacttgaaatcagtcattgtcaggggcccaccagagcaagccacaaaaatttccannnnnnnnnnaatctccagtataaaaagttccactggtacaaaatgcataagtacaatcagttgtagaaataggaaagcctgcgtannnnnnnnnnggctcaaattccatcaaacaacaaaatccaaatgcatcaataaaacaaacaatactcaaatggtcttacagtttccactaggttgcattaactttggcttttctcagacaatatttaaaaactattttgtaattctaaacaaaatgattattaatctacaaacatcaattctcacagcacaaaaaaacaaatacattttttgtatgacattattcaaaaaggtaatgaaactacaggnnnnnnnnnnnnnnnnnnnnnnnnnnaattagcacttaagataataaaaacaaacagtaaaatgattccagagtagcacaagccaactataacccctatggtgaaagaaagatgaactcgttacgcctttgaggactgccattgtatcacaattctctaatttagattaaaaatgactattctctacaattgattaaaaaaagcggtttccctgtgtgtgttttcttctggcacaggccctttgcacccttgcagctttttccttttgatatttattaaaagataaaagtggatagaaggacagtttgtctctgtggaaggttattttttggagaagggcaaaaaaggactttccccctcatgtcctctcttggtgacttgtgaagaagaaacactcgattcagagggcgcgtcctgagcctcctgtcccctaccctcagtgtttcctctgggggagatgcatgcaggtgggttgaggttgagagggagatggggaggggagtcggcttcagtaaattgtttttcgttgagatttaggtaattgataagaagtttcagaatgaaatgggtcttagaaattcaagtggtgggctcttgtgtttccacgtacgtgggacgtgtcgagacacaccgtgttctcagagagagacaggggcaataagtgttgttattaagctgattgctgcagaaagtaaaaatagccctcaaaggatgaaggaaggcccagcagtagtaaaacatgtgaggatatacaatcatgtcttgtaagga

SEQ ID NO: 71475 - DNA, 1094 bp, Homo Sapiens
  misc_feature (23)..(23): n is a, c, g, or t
  misc_feature (234)..(234): n is a, c, g, or t
  misc_feature (264)..(264): n is a, c, g, or t
ccttaccttatctccgctctatntttggattggacgatacattcaccaggacagttgacatgatagattatcgactcacttaggatttgccctcagccaagaatcgcacgagttaaccagactgctacccattgcgatattgatgtgtagaggcgtgagccagatatgcattgaatatcataggtgccgggacatgctagaaagacaaactacattgagaccttcagattgtcntatcagaaagaattggaattccagtgtacncaggtcaagtgatttgaagactcagcacatctcatgcagccagtccacaataagcctgttaagacaaggacctaggtataatctacatcaagatccagggtcactcagctcctcgacatttccacacccagacccaaagttgcaacaatcagtcagaaaattttcagagaatccacatgtttaccagagacaccatctccctcctcatggtccccctggagaggactattcacacaggaggtattcttggaatgtgaagcccaatgccagtcgggcagcccaggatagaagaaggtggtatccttataattactccagactctcctatccagcctgttgggaatggacccagtgatacaaacctgtcctggaattctacctggagaccagagctggcctgaaaattactggtgtgacttttaattagttcaggtctaatcaggtttctttattgttcccttatgtattcaagcttaaggaaaaattgcattgctgtttacctctttgctgataaatttgcagtaattacagcattgcaggaaaaacaatctgttattccagtcttaaatttttctaaaagaagacaatattttagaactgaagcattgagaacttcccttgcaaattatttttaaaattctatcttgtttttctatgtatttctttctgactagacttgtgatatgcgtgtgtttatgtacagaaatttttagtgtttttgttatgttctgttattgacccaaaggccatctttattttctataactgttcaaaatttatattaaaatccacttaggagataatttctttagaacctagttactacctgt

SEQ ID NO: 71476 - DNA, 1565 bp, Homo Sapiens
gggagtcaacgcctgcctcctctcgagcgtcctcagcgcagccgccgcccgcggagccagcacgaacgagcccagcaccggccggatggagcgtccgcaacccgacagcatgccccaggatttgtcagaggccctgaaggaggccaccaaggaggtgcacacccaggcagagaatgctgagttcatgaggaactttcagaagggccaggtgacccgagacggcttcaagctggtgatggcctccctgtaccacatctatgtggccctggaggaggagattgagcgcaacaaggagagcccagtcttcgcccctgtctacttcccagaagagctgcaccgcaaggctgccctggagcaggacctggccttctggtacgggccccgctggcaggaggtcatcccctacacaccagccatgcagcgctatgtgaagcggctccacgaggtggggcgcacagagcccgagctgctggtggcccacgcctacacccgctacctgggtgacctgtctgggggccaggtgctcaaaaagattgcccagaaagccctggacctgcccagctctggcgagggcctggccttcttcaccttccccaacattgccagtgccaccaagttcaagcagctctaccgctcccgcatgaactccctggagatgactcccgcagtcaggcagagggtgatagaagaggccaagactgcgttcctgctcaacatccagctctttgaggagttgcaggagctgctgacccatgacaccaaggaccagagcccctcacgggcaccagggcttcgccagcgggccagcaacaaagtgcaagattctgcccccgtggagactcccagagggaagcccccactcaacacccgctcccaaggctccgcttctccgaaggggccttacactcagctttctggtggcgacagttgctgtagggctttatgccatgtgaatgcaggcatgctggctcccagggccatgaactttgtccggtggaaggccttctttctagagagggaattctcttggctggcttccttaccgtgggcactgaaggctttcagggcctccagccctctcactgtgtccctctctctggaaaggaggaaggagcctatggcatcttccccaacgaaaagcacatccaggcaatggcctaaacttcagagggggcgaagggatcagccctgcccttcagcatcctcagttcctgcagcagagcctggaagacaccctaatgtggcagctgtctcaaacctccaaaagccctgagtttcaagtatccttgttgacacggccatgaccactttccccgtgggccatggcaatttttacacaaacctgaaaagatgttgtgtcttgtgtttttgtcttatttttgttggagccactctgttcctggctcagcctcaaatgcagtatttttgttgtgttctgttgtttttatagcagggttggggtggtttttgagccatgcgtgggtggggagggaggtgtttaacggcactgtggccttggtctaacttttgtgtgaaataataaacaacattgtctgatagtaaaa

SEQ ID NO: 71477 - DNA, 1091 bp, Homo Sapiens
gcggccgccgccgccgcgtacctggacgagctgcccgagccgctgctgctgcgcgtgctggccgcactgccggccgccgagctggtgcaggcctgccgcctggtgtgcctgcgctggaaggagctggtggacggcgccccgctgtggctgctcaagtgccagcaggaggggctggtgcccgagggcggcgtggaggaggagcgcgaccactggcagcagttctacttcctgagcaagcggcgccgcaaccttctgcgtaacccgtgtggggaagaggacttggaaggctggtgtgacgtggagcatggtggggacggctggagggtggaggagctgcctggagacagtggggtggagttcacccacgatgagagcgtcaagaagtacttcgcctcctcctttgagtggtgtcgcaaagcacaggtcattgacctgcaggctgagggctactgggaggagctgctggacacgactcagccggccatcgtggtgaaggactggtactcgggccgcagcgacgctggttgcctctacgagctcaccgttaagctactgtccgagcacgagaacgtgctggctgagttcagcagcgggcaggtggcagtgccccaagacagtgacggcgggggctggatggagatctcccacaccttcaccgactacgggccgggcgtccgcttcgtccgcttcgagcacggggggcaggactccgtctactggaagggctggttcggggcccgggtgaccaacagcagcgtgtgggtagaaccctgagcgaccctgcctccgctctcccccagctgcctggaggggcaaaggtcgagggtagataggccttaacttagtccatagcgtcctcaccttccccaagccacacatcctcctcccatcccttgctccgatcccagcccctgagcagggagagagaagttttgttggcataggtttgcttaggtagccggcttctagaatgtagatccgtgagggcgtgagcttggactggacccactgctgattccctgcacctagcacagtgcttgccacaaagtgggctctcaataaatattatttgtccaaggaaggaatgaatg

SEQ ID NO: 71478 - DNA, 865 bp, Homo Sapiens
  misc_feature (138)..(146): n is a, c, g, or t
  misc_feature (226)..(246): n is a, c, g, or t
gctaatcgctaaccagaaagtctggttagagggggctcaactcaatccctttggtccccagcgccagacaagagttaattctggaaaattcagtacttgaatgtacctgccttattgcataccaatttactggggggnnnnnnnnngttaagagatgccggctccagatctccacttcattcacaggtgattttggaaatcctgtaagttacacttcctgttctgnnnnnnnnnnnnnnnnnnnnncctttggctgattcctgctgagtgaggccagttcctcatcaggctcagggcaggtgccttttcaggcgtggcctcctttccatctagcacagcatctttgtctctgttctgtctcctccaaatccaagatgattttaattagtacagacatgtacagtctacaattaaagagtgatttgtactaatatgattttgattcttcctcctctttgctgtcctttcaagacacttgctggaaaaagctttaatgcacttagttttcctttaggttttctatgactcagatgtaaaggactttctctgtacagtatattatccaatgcatgtttgttctctctcctgatatattgaacaccacacagttgtgaagccgtgcagtggggatgccccacaccccacagaggcatctacccctgtgtataaggaaagacattttcctttgctgtacttgcttgagcagttttattgtctgtacatgtgagctgtgtgagatagatgtgaaaagttcaaatgaatgcattttcctgccccatgtatacagattgtcatctgtacaaggaactgtatgtatgaaagcaaatgtacttatttataaatggctaacacttggaaaaccaaa

SEQ ID NO: 71479 - DNA, 2173 bp, Homo Sapiens
tgaatatagacagtgttaaaaaagaggctggtacggtcggattccgggatatgcgaccacgcgtcgcttttgtgttccggccgatcccacctctcctcgaccctggacgtctaccttccggaggcccacatcttgcccactccgcgcgcggggctagcgcgggtttcagcgacgggagccctcaagggacatggcaactacagcggcgccggcgggcggcgcccgaaatggagctggcccggaatggggagggttcgaagaaaacatccagggcggaggctcagctgtgattgacatggagaacatggatgatacctcaggctctagcttcgaggatatgggtgagctgcatcagcgcctgcgcgaggaagaagtagacgctgatgcagctgatgcagctgctgctgaagaggaggatggagagttcctgggcatgaagggctttaagggacagctgagccggcaggtggcagatcagatgtggcaggctgggaaaagacaagcctccagggccttcagcttgtacgccaacatcgacatcctcagaccctactttgatgtggagcctgctcaggtgcgaagcaggctcctggagtccatgatccctatcaagatggtcaacttcccccagaaaattgcaggtgaactctatggacctctcatgctggtcttcactctggttgctatcctactccatgggatgaagacgtctgacactattatccgggagggcaccctgatgggcacagccattggcacctgcttcggctactggctgggagtctcatccttcatttacttccttgcctacctgtgcaacgcccagatcaccatgctgcagatgttggcactgctgggctatggcctctttgggcattgcattgtcctgttcatcacctataatatccacctccacgccctcttctacctcttctggctgttggtgggtggactgtccacactgcgcatggtagcagtgttggtgtctcggaccgtgggccccacacagcggctgctcctctgtggcaccctggctgccctacacatgctcttcctgctctatctgcattttgcctaccacaaagtggtagaggggatcctggacacactggagggccccaacatcccgcccatccagagggtccccagagacatccctgccatgctccctgctgctcggcttcccaccaccgtcctcaacgccacagccaaagctgttgcggtgaccctgcagtcacactgaccccacctgaaattcttggccagtcctctttcccgcagctgcagagaggaggaagactattaaaggacagtcctgatgacatgtttcgtagatggggtttgcagctgccactgagctgtagctgcgtaagtacctccttgatgcctgtcggcacttctgaaaggcacaaggccaagaactcctggccaggactgcaaggctctgcagccaatgcagaaaatgggtcagctcctttgagaacccctccccacctaccccttccttcctctttatctctcccacattgtcttgctaaatatagacttggtaattaaaatgttgattgaagtctgaaggtccctatagtgagtcgtattataagctaggcactggccgtcgttttacaacgggcggccggtcaaaagtatccctctgggggcccaagcttacgcgcacccatctttcttgtacaaagtgggccctatagtgagtcgtattataagctaggctcggggccgtctaatttacaacgcccgggactggggaaaactgctaactggggatgccttggggaaggaaccttacttctgagggggggacaaaattgtgaaaaactacctaccgaggattttaaagctctcaagggtgaattagaaaattttttaaagtggaaaaaggcggtgaaaccttttctgggatacggcttggcggccttgagaaatgtttgcctgaaccggaaatatgactttttcgaaaaatttttttaaaccgcgggaacctggggggattcaaaaatgggttggggggaatttttaaaaattaccccgggtccccaaggggttctttttgcggggcccccttcagggccctacacaagggctggggtcgggggatctcaaaatgcgggccaataacaacaattttggaaaaagggttttaaacttggctttt

SEQ ID NO: 71480 - DNA, 971 bp, Homo Sapiens
acccggggcccaatgcgccaaatgccccccagaaggagggcccaataagcccccagccagggggccaaccttttggcaagccatggtggattctggggccgttgcccccaggtagggcaagggaaagtaaatgaagggagggggcttcccagcccagtagccggaagcagggtgcccaatggctgtcccccatcagggtgcccctcccgggataatagttgtcagacgtctccatcccatggagtaggatagcaaccagagtggaagaccagcatgagaggtccatagagtttcacctgcaattttctgggggaagttgaccatcttgatagggatcatggactccaggagcctgcttcgcacctgagcaggctccacatcaaagtagggtctgaggatgtcgatgttggcgttacaagctgaaggccctggaggcttgtcttttcccagcctgccaacatctgatctgccacctgccggctcagctgtcccttaaagcccttcatgcccaggaactcgtccatcctcctcttcagcagcagctgcatcagctgcatcagcgtctacttcttgcctcgcgcaggcgctgatgcagctcacccatatcctcgaagctagagcctgaggtatcatccatgttctccatgtcaatcacagctgagcctccgccctgtgaagacaatggctcctagagtgcaggacttttctgttccatccattaagtcctctgctcatcccagggtttagggctttgttcttccactggatgttttcttcgaaccctccccattccgggccagctccatttcgggcgccgcccgccggcgccgctgtagttgccatgtcccttgagggctcccgtcgctgaaacccgcgctagccccgcgcgcggagtgggcaagatgtgggcctccggaaggtagacgtccagggtcgaggagaggtgggatcggccggaacacaaaaaggag

SEQ ID NO: 71481 - DNA, 1253 bp, Homo Sapiens
acttacggtctaggtacgaggctgggtgttgtgaattcggcacgagggatatactccatttgccaacggtcccagtgacacaccagaggaaatcctaacccggatcggcagtgggaagtttaccctcagtgggggaaattggaacacagtttcagagacagccaaggacctggtgtccaagatgctacacgtggatccccaccagcgcctcacagctaagcaggttctgcagcatccatgggtcacccagaaagacaagcttccccaaagccagctgtcccaccaggacctacagcttgtgaagggagccatggctgccacgtactccgcactcaacagctccaagcccaccccccagctgaagcccatcgagtcatccatcctggcccagcggcgagtgaggaagttgccatccaccaccctgtgaggcaccagggcattcgggccacagggcggtgctagcttgacagagtcagcatgcttcccagagggagcaggccggaaccacagggccagagggagctggaacccgaggggccggggaagctgccagcccagaacacccctaatgagggtgtgagaagtgccttctccttccccaggatggactcttctcggctcaggctctgctggtggaaagcgattcactgtataaacttttttttatgaaaaaaatggcatcaaccaccatggatttttacaagatccatttgcctttctgggagcagaaacagccattgcggccccaggaggggaactgagtcacgctggggctctctgagactctttagagcagctttgggatcccaccctggggacccccacgattggccacctgtagccatctgcacacacctccgagacagtccagtgtcacctctctcagagcatctggctgtttagcagaactcattctatccccaatcagctccttttccgttctgttctgctgggagttctagaaccacttcctgctacaggaggggtctcatgtcctgctggcttccagcttcaggcaccagcatccaccttggctctgccagtggatcccctacggtcaggctgggcagccccagagagaggatgtggaaagcactttttggctgacttcatctggggttggcaacaggacagagttcacaggaggccagtgggcgggccatgagggacagggtcttttttcatttcttcctcagctggttactcagggttcatctgtccatggcctttctaataaactgttgagttgaagc

SEQ ID NO: 71482 - DNA, 1064 bp, Homo Sapiens
gcttggtcacatgcagcagggtggagcccaaccccatttgataggaatttgccactaagatgggcgccaaggctatgaactggatgtctgggaaaatcaaagagagttaccgtaatgggcggatctttgccaatactccagattcgggctgtgttctggggatgcgtaagagggctctggtcttccaaccagtggctgagctgaaggaccagacagattttgagcatcgaatccccaaggaacagtggtggctgaaactgaggcccatcctcaaaatcctagccaagtacgagattgacttggacacttcagaccatgcccacctggagcacatcacccggaagcggtccggggaagctgccgtctaaacctctctggagtgaggggaatagattacctgatcatggtcagctcacaccctaataagtccacatcttctcagtgttttagctgtttttttcattaggtttccttttattctgtaccttgcagccatgaccagttctggccaggagctggaggagcaggcagtgggtgggagctccttttaggtagaatttaacatgacttctgccccagctttatctgtcacacaaggctgggcacctctagtgctactgctagatatcacttactcagttagaattttcctaaaaataagctttatttatttctttgtgataacaaagagtcttggttcctctactacttttactacagtgacaaattgtaactacactaataaatgccaactggtcactgtgcttttgcttctcctgttatcatcttcctaagtggaatgtaatactgtcagccccatgtatcagacacttgtctgatgaagcagtaaagacgttaagggtatcacagggggtggaggaagggattatctctagtacactacttgctggctgtctgaaaaattgtcactgccaaactctaaaaacagttctaaatagtgactgagaaggtttgttgctggagtcagggaataaggcagccaaatactctttgcacagttctttagtgggaagagaaattaacaataaatatcaagcactgtg

SEQ ID NO: 71483 - DNA, 868 bp, Homo Sapiens
ggccagtactatacggtccttaggtagcgaggcctgggtggcgaattcggcacgagcggcgtgttcggtggcggctctggccgctcaggcgcctgcggctgggtgagcgcacgcgaggcggcgaggcggcagcgtgtttctaggtcgtggcgtcgggcttccggagctttggcggcagctaggggaggatggcggagtcttcggataagctctatcgagtcgagtacgccaagagcgggcgcgcctcttgcaagaaatgcagcgagagcatccccaaggactcgctccggatggccatcatggtgcagtcgcccatgtttgatggaaaagtcccacactggtaccacttctcctgcttctggaaggtgggccactccatccggcaccctgacgttgaggtggatgggttctctgagcttcggtgggatgaccagcagaaagtcaagaagacagcggaagctggaggagtgacaggcaaaggccaggatggaattggtagcaaggcagagaagactctgggtgactttgcagcagagtatgccaagtccaacagaagtacgtgcaaggggtgtatggagaagatagaaaagggccaggtgcgcctgtccaagaagatggtggacccggagaagccacagctaggcatgattgaccgctggtaccatccaggctgctttgtcaagaacagggaggagctgggtttccggcccgagtacagtgcgagtcagctcaagggcttcagcctccttgctacagaggataaagaagccctgaagaagcagctcccaggagtcaagagtgaaggaaagagaaaaggcgatgaggtggatggagtggatgaagtggcgaagaagaaatctaaaaaaag

SEQ ID NO: 71484 - DNA, 450 bp, Homo Sapiens
acctggccagtaggtgtatttttatagaattgctgcattcactaatttgtaacttttggatacctgacaataactcatagcatcctttggttcatcaaatattcatcttattatttttaatggctacttagctttccattgcatcattttttgtttgtttgtatttttgagatagaaaagggccaggtgcgcctgtccaagaagatggtggacccggagaagccacagctaggcatgattgaccgctggtaccatccaggctgctttgtcaagaacagggaggagctgggtttccggcccgagtacagtgcgagtcagctcaagggcttcagcctccttgctacagaggataaagaagccctgaagaagcagctcccaggagtcaagagtgaaggaaagagaaaaggcgatgaggtggatggagtggatgaagtggcgaagaagaaatct

SEQ ID NO: 71485 - DNA, 815 bp, Homo Sapiens
  misc_feature (634)..(634): n is a, c, g, or t
  misc_feature (673)..(673): n is a, c, g, or t
  misc_feature (703)..(703): n is a, c, g, or t
  misc_feature (711)..(727): n is a, c, g, or t
  misc_feature (729)..(739): n is a, c, g, or t
ggggggcgacagacatctgggattccccagaaggctctgacaccctctgcccgccctgtagctgtagtcctcccattggctagggctcttggggtcgggcaggtttcgggtgcccccagtgggcctcgggttccaggcagctcgtgacaagcccctgtgctctctagaaagcccgttttggcctgagtgcggctgaggacatcaccccccggttcagggcagcctgtgagcagcaagctgtggctctgactctgcaggaggacagagcatccctgacgctttcaggggggccctcggcactggcctttgacctctccaaggtaccaggcccagaggcagcccccaggctgcgggcgctgacactgggcctggcaaaacgcgtgtggagcctggagcggcgactggcagacccagatccccagagaggtggccctggacctggagtcaggaggcggtgtccaggagagtcgctcatcaaccccgggttcaagagtaagaaaccagctggtggcgtggacttcgatgagacctgaaggtgcagcacaagcgtggccccgcggggagtccgcctatgaggggagaggcagtctttgaggcccccatcagagaccccccgccaccaccttccactggnctgtctgggccaggactaacacgggctcctcaaattccnttccctggtcaataaacagctccccttggntggaaccnnnnnnnnnnnnnnnnnannnnnnnnnnnaaaatgttcgggcggcctccggcccctcgagaagcctttctaaaaacatttccgttttggcggcgccgggccccca

SEQ ID NO: 71486 - DNA, 836 bp, Homo Sapiens
gccgggttcccgctcgcccggcgccatggatccgctgtcgccgccgctctgcacgctggcgccgggccccgagccgccccgcttcgtgtgctactgcgaaggggaggaaagcggggagggggaccgcggcggcttcaacctctacgtgaccgacgccgcggagctttggagcacctgcttcacgccggacagcctggcggccctcaaagcccgtttggcctgagtgcggctgaggacatcaccccccggttcagggcagcctgtgagcagcaagctgtggctctgactctgcaggaggacagagcatccctgacgctttcaggggggccctcggcactggcctttgacctctccaaggtaccaggcccagaggcagcccccaggctgcgggcgctgacactgggcctggcaaaacgcgtgtggagcctggagcggcgactggcagctgcagaagagacagctgtcagcccgaggaagagcccccggcctgcagggcctcagctcttcttaccagacccagatccccagagaggtggccctggacctggagtcaggaggcggtgtccaggagagtcgctcatcaaccccgggttcaagagtaagaaaccagctggtggcgtggacttcgatgagacctgaaggtgcagcacaagcgtggcccgcggggagtccgctatgaggggagaggcagtctttgaggcccccatcagagacccccgcaacaactccaactgcctgtcctgggccaggactaacacgggtcctcaaaattccttcctgtcaaataaacagtcccttggttggaacacaaatgcaaaaacaataaaaaacagggg

SEQ ID NO: 71487 - DNA, 1075 bp, Homo Sapiens
tcccctagcccccctttcctttgtcggcggtttttggaattgagaaacaattccaggacaccatacaatctttttaaagcccataagattgcccctggccaaatttgcccagccaccccggaatttagaccctttcacggcaacctctgggcccctggggatgggggggttgaacccccaaacccccttaggcgatagttaagggggccaaaatttgggtttcccaagagttttgaacccttggccgccctagagtatagtctcccatggatagggttttggggtcgaaagtttgggggtgccacaggggctcgggttccagccagctcgtacaagcccctgtgctctctaaaaagcccgtttggcctaagtccgcctgaggacatcaccccccggttcaaggtgagacccaagcaggaaggaaggacgggtggggagaaggagggtctgccacagctctccgcacctctcctctcccagggcagcctgtgagcagcaagctgtggctctgactctgcaggaggacagagcatccctgacgctttcaggggggccctcggcactggcctttgacctctccaaggtaccaggcccagaggcagcccccaggctgcgggcgctgacactgggcctggcaaaacgcgtgtggagcctggagcggcgactggcagctgcagaagagacagctgtcagcccgaggaagagcccccggcctgcagggcctcagctcttcttaccagacccagatccccagagaggtggccctggacctggagtcaggaggcggtgtccaggagagtcgctcatcaaccccgggttcaagagtaagaaaccagctggtggcgtggacttcgatgagacctgaaggtgcagcacaagcgtggccccgcggggagtccgcctatgaggggagaggcagtctttgaggcccccatcagagaccccccgccaccacctccacctgcctgtcctgggccaggactaacacggctcctcaaattccttccctgtcaaataaacagctcccttggttggaggctctggtgtggaaacacaaaagaaaaagacatacatg

SEQ ID NO: 71488 - DNA, 751 bp, Homo Sapiens
  misc_feature (23)..(23): n is a, c, g, or t
  misc_feature (341)..(365): n is a, c, g, or t
tgagtgacccagaaagctctttngaaaagacagactcctcaaggagagataaagaggaaagcacctctttcattttttagtgtgagctaattccatcagactgctgtcctcctggacccatctgagatgtgcagtagcaaggagaggggggatcattttagagagtgggtcattggcagggagtgctccggagggaggcagaggggagactgtggtagaaggaagacagaactcacacatgctcccaggattggggacagggacagaggaggtaacagaaggcaaaggccagtttccccgttatcatgaaggggcccactcaggacaggaacaaggacaannnnnnnnnnnnnnnnnnnnnnnnngctgctcctgggataccaggtcagtgatgtagtcttgcagtttggcaacttcctagcctgagaatccctagtggggctgtgggaaacacatttccacgttgcaagcatgcaactccaaagaatctgtgatgccactgaaatgagatgggaatgatccagctctttcagcatcttggttgaacttgctttcattgtccctgggatattgtggaaggaaaggtgactgtgtgatctgattctgtggtcaaggacttgcatcttgtgtttctatccccaagccttcctggtgtctccaactcctaccccattgcatgggttgttgcggacatccaataaagatttttttagtgcttctggaaacttccagtagattctacttctaaact

SEQ ID NO: 71489 - DNA, 919 bp, Homo Sapiens
ggctggtcgaggctgggtggtaattcggcacgaggaagaggaggggctgatgtgaacatccggcattcaggccgcgatgacacctcccgctacgatgagaggcccggcccctccccgcttccgcacagggaccgggaccgggaccgtgagcgggagcgcagagagcggagccgggagcgagacaaggagcgagaacggcgacgctcccgctcccgggaccggcggaggcgctcacggagtcgcgacaaggaggagcggaggcgctccagggagcggagcaaggacaaggaccgggaccggaagcggcgaagcagccggagtcgggagcgggcccggcgggagcgggagcgcaaggaggagctgcgtggcggcggtggcgacatggcggagccctccgaggcgggtgacgcgccccctgatgatgggcctccaggggagctcgggcctgacggccctgacggtccagaggaaaagggccgggatcgtgaccgggagcgacggcggagccaccggagcgagcgcgagcggcgccgggaccgggatcgtgaccgtgaccgtgaccgcgagcacaaacggggggagcggggcagtgagcggggcagggatgaggcccgaggtgggggcggtggccaggacaacgggctggagggtctgggcaacgacagccgagacatgtacatggagtctgagggcggcgacggctacctggctccggagaatgggtatttgatggaggctgcgccggagtgaagaggtcgtcctctccatctgctgtgtttggacgcgttcctgcccagccccttgctgtcatcccctcccccaaccttggccacttgagtttgtcctccaagggtaggtgtctcatttgttctggccccttggatttaaaaataaaattaatttcctgttgatagtgggc

SEQ ID NO: 71490 - DNA, 1718 bp, Homo Sapiens
cctgggtgtgaaatcggcacgagggtcgctatcggaggccgcgcgggtggctgagcagcggcctggtgcgctcgcttagcgggcgacggaatcagacggacgtggacgcccccggagtggaagccgaagcaggagttgttgttgctgaggggctgccgcagccgccgcgagcctccggacagacgccagagcgaggagggcgctacgcgacttggcaagatgacccagttcctgccgcccaaccttctggccctctttgccccccgtgaccctattccatacctgccacccctggagaaactgccacatgaaaaacaccacaatcaaccttattgtggcattgcgccgtacattcgagagtttgaggaccctcgagatgcccctcctccaactcgtgctgaaacccgagaggagcgcatggagaggaaaagacgggaaaagattgagcggcgacagcaagaagtggagacagagcttaaaatgtgggaccctcacaatgatcccaatgctcagggggatgccttcaagactctcttcgtggcgagagtgaattatgacacaacagaatccaagctccggagagagtttgaggtgtacggacctatcaaaagaatacacatggtctacagtaagcggtcaggaaagccccgtggctatgccttcatcgagtacgaacacgagcgagacatgcactccgcttacaaacacgcagatggcaagaagattgatggcaggagggtccttgtggacgtggagaggggccgaaccgtgaagggctggaggccccggcggctaggaggaggcctcggtggtaccagaagaggaggggctgatgtgaacatccggcattcaggccgcgatgacacctcccgctacgatgagaggcccggcccctccccgcttccgcacagggaccgggaccgggaccgtgagcgggagcgcagagagcggagccgggagcgagacaaggagcgagaacggcgacgctcccgctcccgggaccggcggaggcgctcacggagtcgcgacaaggaggagcggaggcgctccagggagcggagcaaggacaaggaccgggaccggaagcggcgaagcagccggagtcgggagcgggcccggcgggagcgggagcgcaaggaggagctgcgtggtggcggtggcgacatggcggagccctccgaggcgggtgacgcgccccctgatgatgggcctccaggggagctcgggcctgacggccctgacggtccagaggaaaagggccgggatcgtgaccgggagcgacggcggagccaccggaagcgagcgcgagcgggcgccgggaccgggaatcgtgaccctgaccgggaccgcgaagcacaaaccggggggaacggcggccactgcacctgtgcccaggcatcaaggccccagggtgcggggccgtggtgtcactgcaccacggactcagagacccgtatcggaccaacttcacgctcgaaagcacgcatatcgcagatgtcccaccgactctatgacctattcgtacccaataacccacaacaggcaaacgtaaacacccgccaccggccgccagatacctccactaaatctcacctcaatattccgcggctccagcccggtagattaggtgacacacgaacacacacagattacgataagaccacgcaacggccctcacgctcacgctaccactctactagcggctcgcttctcgcctt

SEQ ID NO: 71491 - DNA, 992 bp, Homo Sapiens
  misc_feature (29)..(29): n is a, c, g, or t
  misc_feature (161)..(335): n is a, c, g, or t
  misc_feature (835)..(843): n is a, c, g, or t
ttctgattctacaatgctgcagctgtttntataaacaacaagctcttgagagattgaaaacagagagttagtagccagtaaatatttaccatcatccatatccagagtatacattgaccctggcacatagtttgactgcaaggtcacctatgcatgactannnnnnnnnnnnnnnnnnnnnnnnnnnnnnnnnnnnnnnnnnnnnnnnnnnnnnnnnnnnnnnnnnnnnnnnnnnnnnnnnnnnnnnnnnnnnnnnnnnnnnnnnnnnnnnnnnnnnnnnnnnnnnnnnnnnnnnnnnnnnnnnnnnnnnnnnnnnnnnnnnnnnnnnnnnnnnnactacattttaacctacttctgtttgaacatatggtatggttattgcttgtgcctcgttttcctaacagtgtgaagtttaaaaaaacctaacccacctttcttacccagtcttctataatgtgcctaccaaaaagcctagtcctagcccatctgcctcaactcctctcccttttaggttgtagggaagaggccggagtgtagagtatattatatcttctgtcccccttatgccaacaagatggccttcccctctgaaacaaagtaaaactgcaacactgtgacttcttaaatgagggatatgtgaaaaggctatgaaaaatacaaaggctttcctaggaaatgtgttataatgcagcgggaagctaattcttgaaatatgcacattatagttactcagtctcacatactctagttactggcaaagaagttactgagaatatgtcattcaaaggcataggggcctttgaatggaacaaatgctttcacatcatttaaagtnnnnnnnnncctccaacaactgtgaatttatagtttaagagtgatttacactgaatttcaaataaaaggactataaaacgtgttatttttctgtaagggctataacatacatgtcaatatcactgtttttaaataaaatatacttttatacagaaaaa

SEQ ID NO: 71492 - DNA, 878 bp, Homo Sapiens
  misc_feature (105)..(223): n is a, c, g, or t
tttaacacaaagcatggctgatcctagaacatgataactcagtaacctagtgtggtaaatgctaaacttgatctaagggttggtgctcctggtgaggtttaaagnnnnnnnnnnnnnnnnnnnnnnnnnnnnnnnnnnnnnnnnnnnnnnnnnnnnnnnnnnnnnnnnnnnnnnnnnnnnnnnnnnnnnnnnnnnnnnnnnnnnnnnnnnnnnnnnnnnnnnnctttcctttatttaagagggctggtagcatcctactttctattatcttagttatcaatagactaaattagaaaaaaaattagcattgtttaattatgagataaatgaactataaacctaaatatttaccagaaaagagcagagcagaactaaaaggatcaggaatccaggataacatcagtcatacagcaggattcaaaccctctcctaaactaaattccaggcaacacacaacttactcaactaccaccaaatcccagatccaggtctcagggaagtacttccggactatctctttcacttgcaatatctgaggttcttcttcgatcattgggtacattatttctacggctcctgggggtacacctcgcagacctggtcctggaagacaacacacaggcctcagtgtgaacctcatttttatcatcaatttcttattgctgccttatttctcaaatggaataaggtcatacgctcagggaatgtttattattggaacaatttaacctaccagcttgttattttgttcactttcctataaaaaggctaatcctattttttcttcaaatagaatctagagctaaatatatttttctttataaataaaaacaaatgacctgtacatgtacctcctgaatctaaaataaaagttgatt

SEQ ID NO: 71493 - DNA, 1002 bp, Homo Sapiens
  misc_feature (356)..(390): n is a, c, g, or t
  misc_feature (485)..(504): n is a, c, g, or t
  misc_feature (707)..(824): n is a, c, g, or t
  misc_feature (845)..(871): n is a, c, g, or t
cccagcaactttccttttaataaaacaacaaatggttcaactctgtctgcaaattaacagctgaacacctgcaactgcaaatgttttttgatccgacgtactgaaataggaagtcatgctcttcccaccctccacccaccagagtggaacccgctgcaaaatccccagccttaattcttgcttcaggacccagaccggtgtcttgctctagggcaacccagggcagaggggccaggtctgcccagcgtttaccactgctgtcaagccacagcccttggccaccatacgggccatcctcagtgaggcagccccccataggcttccgccaagctctggtcccgaagaggctgtgcgannnnnnnnnnnnnnnnnnnnnnnnnnnnnnnnnnntcctctgcctgctgcgtggaggcagccatgggaaggagcccaggggagctggcctgggggagcgaagcccatgttcgcttcctgacttagagctnnnnnnnnnnnnnnnnnnnncttgttcccctgcagtatctgttctgtgaagtttgttaaatgtaaggaaagcttaaattcttgtatctttaaaagagaaaatcttatttaacccttttgtgttctagatttacttacacacatagcctagagctcagttttagttttaacattgtgaaaatattaaaagaatcttgtaactttattcttttttctcctgctgnnnnnnnnnnnnnnnnnnnnnnnnnnnnnnnnnnnnnnnnnnnnnnnnnnnnnnnnnnnnnnnnnnnnnnnnnnnnnnnnnnnnnnnnnnnnnnnnnnnnnnnnnnnnnnnnnnnnnntcctaagttcagaatgttttnnnnnnnnnnnnnnnnnnnnnnnnnnngttttttggggcccgccccccccacaaaaaaattttttacaactttttgttggggccggggccccccaagagaaaagaaaaaacgagcccatcctttttcccccaaaaaaccccgtggcctacataaaagg

SEQ ID NO: 71494 - DNA, 2170 bp, Homo Sapiens
  misc_feature (72)..(106): n is a, c, g, or t
  misc_feature (1166)..(1166): n is a, c, g, or t
cagatgataacatatggggccacgctagtagcgaacgacgagcgcagcgagtagtgagcgaggaagcggcgnnnnnnnnnnnnnnnnnnnnnnnnnnnnnnnnnnncagtcgacggtaccggacatatgcccgggaattcggccattacggccgggggaggcaggcagggcggggccggcagggggacctgctgctggaagagcagcggcccgagccggggccatggcgaagctgctgagctgcgtcctaggcccccggctctacaaaatctaccgggagagggactctgaaagggccccggccagcgtccctgagacgccaacggcagtcactgccccccattccagctcctgggatacgtactatcagccccgtgccctggagaaacatgctgacagcatcctggcactggcttcagtattctggtccatctcttattactcctctcccttcgccttcttctacttgtacaggaaaggttacttgagtttgtccaaagtggtgccgttttctcactatgctgggacattgctgctacttctggcaggtgtggcctgcctccgaggcattggccgctggaccaacccccagtaccggcagttcatcaccatcttggaagcaacacatcggaaccagtcttcagaaaacaagaggcagcttgccaactacaactttgacttccggagctggccagtcgacttccactgggaagaacccagcagccggaaggagtctcgagggggcccttcccgccggggtgtggccctgcttcgcccagagcccctgcaccgggggacagcagacaccctcctcaaccgggttaagaagctgccttgtcagatcaccagctacctggtggcgcacaccctagggcgccggatgctgtatccaggctctgtgtacctgctgcagaaggccctcatgcctgtgctgctgcagggccaggcccgactggtggaagagtgtaatgggcgccgggcaaagctgctggcctgtgatggcaatgagattgacaccatgtttgtggaccggcggggggacagctgagccccagggacagaagctggtgatctgctgtgaggggaatgctggggttttatgaaggtgggctgcgtctccacgcccctggaagctggatattcagtcctggggctggaatcatccnaggctttgctggaaagcacgggggtgccattcccgcagaatgaggctaatgccatgggatgtggtggtcccagtttgccatccaccggcctgggcttccagccccaggacatcatcatctacgccggggccatcggcggcttcactgccacgtgggcagccatgtcctacccagatgttagtgccatgatcctggatgcctcctttgatgacctggtgcccttggccttgaaggtcatgccagacagctggaggggcctggtgaccaggaccgtgaggcagcatctcaatctaaacaacgcggagcagctgtgcagataccagggtcctgtactgctgatccggagaaccaaggatgagatcatcaccaccacggttcctgaggacatcatgtccaaccgaggcaatgacctcctgctgaagctcctgcagcatcggtatccccgggtgatggcagaggagggtcttcgagtggtgaggcagtggttggaggcctcctcacagctggaggaagcctcaatttatagccgatgggaggtggaagaggactggtgtctgtctgtcctccgctcctaccaggcagaacacgggcccgacttcccctggagcgtgggggaggacatgagtgcagatggacggcggcagctggctttgtttctggctcggaagcatctgcacaactttgaggccactcactgcaccccactcccagcccagaacttccagatgccctggcacctctagggaccaactgggactcattatggaagaatggggtgagaggagacatgaggaaagaccctcttatttgtgattctctgtgttcatgttgctgtttatagtttgtggaaagtgggggaccatcccccttctcaccactgttcctcttgcacgtttcccctcattcatgtggctgtacttaaccttctccaacatacatcctgcattacatgaatggattattcctaataattaataaaaaggtattttttctactatcaaaaa

SEQ ID NO: 71495 - DNA, 916 bp, Homo Sapiens
cagcggccgagccggggccatggcgaagctgctgagctgcgtcctaggcccccggctctacaaaatctaccgggagagggactctgaaagggccccggccagcgtccctgagacgccaacggcagtcactgccccccattccagctcctgggatacgtactatcagccccgtgccctggagaaacatgctgacagcatcctggcactggcttcagtattctggtccatctcttattactcctctcccttcgccttcttctacttgtacaggaaaggttacttgagtttgtccaaagtggtgccgttttctcactatgctgggacattgctgctacttctggcaggtgtggcctgcctccgaggcattggccgctggaccaacccccagtaccggcagttcatcaccatcttggaagcaacacatcggaaccagtcttcagaaaacaagaggcagcttgccaactacaactttgacttccggagctggccagtcgacttccactgggaagaacccagcagccggaaggagtctcgagggggcccttccccgccggggtgtggccctgcttcgcccagagcccctgcaccgggggacagcagacaccctcctcaaccgggttaagaagctgccttgtcagatcaccagctacctggtggcgcacaccctaaggcgccggatgctgtatccaggctctgtgtacctgctgcagaaggccctcatgcctgtgctgctgcagggccaggcccgactgggtggaaaagtgtaatgggcgccgggcaaagctgctggcctgtgatggcaatgagattgacaccatgtttgtggaccgggcgggggacagctgagcccccaggaacaaaaacctggggatcctgctgtgaaggggaaatgctgggttttaataagggggggctg

SEQ ID NO: 71496 - DNA, 685 bp, Homo Sapiens
gcggccgcggcccgggcagcggctgcccgctgcgggcagcatggcgaacccttcaagctctactgccaggacgacggacgcgccatctgcgtggtgtgcgaccgcgcccgcgagcaccgcgagcacgccgtgctgccgctggacgaggcggtgcaggaggccaaggagctcttggagtccaggctgagggtcttgaagaaggaactggaggactgtgaggtgttccggtccacggaaaagaaggagagcaaggagctgctggtgagccaggcacccgcaggccccccgtgggacattacagaggcctgagaactcagcaccagggctcggtgtgtgtggtgttggagtgtgtgctatggaaccgcagaatcgatttcagaaagataatagagtccatattatatagggtgtccacataattgttgtacaaaccagagctttttaaagtgaaaagcagtgctaaaataattattgcaaaacaactggcttaaactggagctgtcccagcgaatcaggacgctcagtcactctgatattacgtaacataccagttagggcctgcggaagcatcttgtaatggaacacattactatttctgcagagaaacatggatattcaataagtgggaatattaatacaataaagagcctcatggcatgttttgtcaacaaaacagtagtgaaaa

SEQ ID NO: 71497 - DNA, 1125 bp, Homo Sapiens
  misc_feature (88)..(122): n is a, c, g, or t
  misc_feature (825)..(848): n is a, c, g, or t
ggaacttgtagtagactcactatagggcgccactcgttaaagccgaacgaccgagcgcagcgaagtcagtgagacgaggaagcggcgnnnnnnnnnnnnnnnnnnnnnnnnnnnnnnnnnnncagtcgacggtaccggacatatgcccgggaattcggccattacggccgggggggctttataagcaggctgggcaggcccagcttataagttaaagggcatcacagtgagggtgtagtagataaattcaaggaaataagagatttgtaagaaactaggaccagcttaacttataatgaatgggcattgtgttaagaaaagaacatttccagtcattcagctgtggttatttaaagcagacttacatgtaaaccggaatcctctctatacaagtttattaaagattcatttttattaccgtacatatttctcttgtcttatgtaagcggatgtatatcctcttgttttatacaagccagttcccacttatgagggtactttttaggtttagctggcttaatattgtgtattggtcaatgaggccatttttacatttattacgttacagagttcatggaggttcacctttgtgactgatgggtgataaaagatagccaagtgtcttacaaagcagcctctgagtcaagtgttctaatttggggaacaaagcaggttttactgcttttccagacacaaggctgctaaaccaattcaagaaaataattaatttctttcaaagcaactaacaaaatatatggtcaatctaaaggtgtctgcttatagggttgaacaatttaattgggaaagtttgtcatcatttgaacnnnnnnnnnnnnnnnnnnnnnnnncatatagccaacctgtggtctggcagaaacaacgtctctagcaatagtaccaaagtaagtaatggagtcttttttttggcaggtctgcagtaaaagataacattttcttttcttagtcctcctgctctcagaccccatattttgccttttgaatacgtggggttctggtatatatagccccaaatggtaactgtcttccagaacagcaaccacattgaattccttgtgacttaaggaaagcttcttatagttggctgacattaattggcagaaatac

SEQ ID NO: 71498 - DNA, 958 bp, Homo Sapiens
ggcttaatattgtgtattggtcaatgaggccatttttacatttattacgttacagagttcatggaggttcacctttgtgactgattggtgataaaagatagccaagtgtcttacaagcagcctctgagtcaagtgttctaattttggaacaaagcaggttttactgcttttccagacacaaggctgctaaaccaattaagaaaataattaatttctttcaagcaactaaaaaatatatggtaatttaaaggtgtctgcttatttggttgaacaatttaattgggaaagtttgtcatcatttgaaaaaggaaatataaaaggaacaaccatatagccaacctgtggtctggcagaaacaacgtctctagcaatagtaccaaagtaagtaatggagtcttttttttggcaggtctgcagtaaaagataacattttcttttcttagtcctcctgctctcaacccccatattttgcctttgaatacgtgggttttagtatatatagcccaaaatggtaactgtctccagaacagcaaccacattgaattcttgtgacttaggaaagcttcttatagttgctgacattaattgcaagaaataactatatactactttgagaagtaaacatgtcaaaaaaaacaaagttcagatatgggacaaaatttaaaaattcagtaacatttataaacagaattgaatgaaaagagttacagaccaacttaaacatcaattcgtgtcagtaaactgacttttgggggtaatgatcattgttttgtatctcaaaagtattgagtttagaaatcagttatatgatactacctttgtatgtctgtcttttcccgtgtatttttaaataactggtgatctataatttaataaaatttttcgttggtgtaatattatttcaaaagccctccaaatttagtcatcaaaattaaaatgacaattttcaagtttaaaa

SEQ ID NO: 71499 - DNA, 1983 bp, Homo Sapiens
tttttacggtaataaaaataatctttaataaacttgtatagagaggattccggtttacatgtaagtctgctttaaataaccacagctgaatgactggaaatgttcttttcttaacacaatgcccattcattataagttaagctggtcctagtttcttacaaatctcttatttccttgaatttatctactacaccctcactgtgatgccctttaacttataagctgggcctgcccagcctgcttataaagcccctcttcagaaatgtaccaggtgtattaaacagaggcatcatttaatggaaatctgcacttcaaaacagcacttgaaggaccagccattggccctccaatgtaaatacttctcatttcacattatcagagaaacagtgcagtttactaaccactccttccttataagaaattcagtagctgtaaaattttttttcagtttcaaaacatttcaatacttattaattccaaagatccgaacaccatgtagttgtggcattttgggaattagtacactcaggagagaagctgtgtttaggatgaagtgagttggatcatacttcgtatagaaacttgccagaaaatatagaattattggagaaattgtgaaaaacttccgtgaagatgtaaactgtactccatagtccagttgttcccaatgagttaggagccttgctttaccctggtcaggagtttcgaaaggtgttcctttcactgcatgcaaaaatacgtacatccccagattatgtataatatttgttaaagtccaagcaacaggaacactgaagaagggaatgctgagtaagacaatatgaagcaagccaactcccaatgcatatgtcagccacataccccggctgttcatgacacgggtatttggattcacttcactgtgggcaactccaacgttcatgtttgctcgagccagtgtgtcaagtagtcagactcttatatttgacttaatgtatccataaagaatggtcagagttcagatcacttctttctgaatactcaatgtggaaggtacatgctgttgacataatgtggtgtaaaatttacatggtcaagggataatgtttgtttctcaattttgtgattagactaggtgaaaataaggagtcttctgaatatttctctagtcaaatcaaaaacttcagttttctttcttctttttaaaaaaggttttcccttctcctttccattgaagatggactccaaaggaagaattgataatagttctcagttcttttaatgatggtgtttacttgagactaagaattgcttaaaataaaactgtcctgaagaacacctatcatccgacggagggggaaaacgaggctagattatatttggaacagctgtgattttaaaatacacaaacgcttgtattacggagttagcatacagagaggaatttctcataaccccttccagcaaatgtttccggagtataatgctccttccgctctagagacccatagaacaggcatcaagggttaaggggacgaaaagttagttacactaagaccgctaaagcctccaatttatatgtgtaaatctttcgtctaaacacccatgatttatcatacattaaactattatgtcatacttagaacatgccaacactcaagatagttttcccacgttccacaggatggaggcctgaaatttacatctcagctggaaggcaaagctggtgcggtactcatcctattccaaccagaaaaccttttcccagcaggtttgccgcgctgcccacgactggcaaacaatgaccttacagaccgtgaagaggctgttggctctgccctcgccggtgcctccgaagacggcgacccgcagcggcccctcaggggagtcccccctgctagaccgacagcccgagcgctctgggccagagaaaactcagcaaaagccgccgctgctaccacctcagcgcctcccccaacccgccccttccttctcgcggccgca

SEQ ID NO: 71500 - DNA, 1040 bp, Homo Sapiens
  misc_feature (73)..(81): n is a, c, g, or t
  misc_feature (583)..(621): n is a, c, g, or t
  misc_feature (785)..(819): n is a, c, g, or t
  misc_feature (954)..(982): n is a, c, g, or t
ctctgaggtctgagggatgacgttcggaaagggtcatgggctaaatgtcacctgaggggtatttttaaagggnnnnnnnnncccttcaagaggagggaaaatgcaaccagtagcatctctgtcatcattcagattttgtaataaagtacagagcccttccccctaggtccccaacatacagtctctcactctggtgtgtggagagtcagcctcccaggcaccataccatctgcatcctatgatgatgggcaattatgaaacacgcctcagctggcatcatccccaggaggccacactggagctgatgtctggcatctccagggcctgttctgctctcagaaaatctacgcttctggagcgagaaaggccaacagaaataaagatagttgaaaaaaatttgtttcttccagtaaattcagccggtgagctcagaggagcaaagagaattctccagtgtggcgctcacaaagtcctcagccctgcgttttagcattgaataccaccaggccatcagtgtggctggggtgaactctccatcaaacttgggaaatcactaaactctttgcatgctgaatagctattnnnnnnnnnnnnnnnnnnnnnnnnnnnnnnnnnnnnnnncgctctctctcacaaatgcaggccacatgtcaaattcagctttgctttctacaaatgaatgaacttaataaaaataaacgttggagggggtatttggaaagacatctatttaaatttttattacatgtttgatattaaaaactaagaatggtttagataaaacnnnnnnnnnnnnnnnnnnnnnnnnnnnnnnnnnnnaacacacacacactacagataaggcttttttagaaaacacattagctaacaggtgatatggaacttcaagtgttttgttatatagcatggatgttttattttgcatatcggaacataaagccattttacaactgnnnnnnnnnnnnnnnnnnnnnnnnnnnnngaccgcgtatgcggccgcaagcttattccctttagtgagggtaattttcgcttagcac

SEQ ID NO: 71501 - DNA, 682 bp, Homo Sapiens
gaccagttaagccgaaaccggggcaagacagaccgggtagcccggtattttgagtacaaacgggactggactcaatacgtttacctggtgaagatcatagaaaggaattacgctggggtgtccgagagcagatgctttgtcgagcagaaccccaatccaaacctcagcatatatatgtcccaaacaattatctagtaccaacagagaagaaaaggtctgcactccgttggggtgttcgttgtgaccttgcaaatggtgtcatacccaggaagcttcccttccctctttctccttcttaaatctttttaaacttctttcacaggattgtttgagataacctagctctttatatcttcccttttaaatagaaacaactgtcttgagaagctcttcgaaacattttatggtaaggacttcacctatcattggtctttcctagctatatatcacattggtatcagatgatacttccaaattgccactcaaatccagcaattgcaagataaatcatatcagagaaagaacaacagacctggtctttctattttgtcaaattagtaagggccctttgtgtcctgtaactttttttacctatcaatatgagttgctgtgcttcagtgtgtgttttttaagttgctgggcattacacttaccaattaaagaattttggaaattcaaaaaa

SEQ ID NO: 71502 - DNA, 1001 bp, Homo Sapiens
  misc_feature (75)..(75): n is a, c, g, or t
  misc_feature (173)..(173): n is a, c, g, or t
ttccctcagtgagcatccttatggaccagaacgattacgacacacacagcgtctaatgtatgactgcatctcgantctgtacctcagagtgcgagtccagagacagagtaccagctccctctctcaagaactggagaagctcaagggtcgcactcataggcagcatctcaccntccacggcctgagtggcgtcagatggaagctgtatgtcacttcaccaagtgagggaaaccagggaatatggaccggcaccataatgagatgttcaccaagttcggggatgatggttccttattcaccttgacaacgccagagggttcggacgacactcccatgatgaaatctccatcctctcgcctctctcccagtgctgcatgataaaaaagaaaacacttttgcacctgcagctgctggcccaagctgactacagactcagcgatgtgatgcgagaatcactgctggaagaccagctcagccctgtcctcactgaaccccacctccttgccctggatcgaaggctccaaaccatcctaaggacagtggaggggtgcatagtggcccatggacagcagagtgtcatagtcgacggcccagtggaacagttggccccagactctggccaggctaacttgacaagctaagggctggcagagtccagtttcagaaaatacgcctggagccagagcagtcgactcgagtgccgaccctgcgtcctcactcccacctgttactgctgggagtcaagtcagctaggaaggaagcaggacattttctcaaacagcaagtggggcccatggaactgaatctttactccttggtgcaccgcttctgtcgtgcgttgccttgctccgtttttcccaaaaagcactggcttcatcaaggccaccgacgatctcctgagtgcactgggaaatctgggtataggtcaggcttggcagccttgatcccaggagagtactaatggtaacaagtcaaataaaaggacatcaagtggatacctg

SEQ ID NO: 71503 - DNA, 485 bp, Homo Sapiens
  misc_feature (257)..(257): n is a, c, g, or t
tgaaaatgacccaaacgccaacttctagtagaacaaatgaattgtggcatattcatagatggaatactatagagcaatgagaacaaatgacctgaacctaacaaaaacaacatggatgcacagtacaaacgtaatactgaacgaaatacataattttaatatacacaatatgattccagctttataaaaacagtcaaaactacattggtttaggcatatacagacacacaaaagtggcagaggtatttggaaaaaanaaccaaggaagtgataaaagtcaggaaaataggagggaggggagaaggtggggaaggattaccaggggcaaagaaaacttttggcatgatgagtatgtcttgttagattgtggtgatgatttcacaggtgtatagtatatatcagaacttatcaaattgtgtgtatactttgaatatgtacagtttattatatgtcaaggatacatcaataaaacttttaaaatcaaa

SEQ ID NO: 71504 - DNA, 2125 bp, Homo Sapiens
  misc_feature (16)..(16): n is a, c, g, or t
  misc_feature (1211)..(1233): n is a, c, g, or t
  misc_feature (1513)..(1517): n is a, c, g, or t
  misc_feature (1520)..(1555): n is a, c, g, or t
  misc_feature (1580)..(1614): n is a, c, g, or t
  misc_feature (1660)..(1675): n is a, c, g, or t
  misc_feature (1701)..(1711): n is a, c, g, or t
  misc_feature (1716)..(1731): n is a, c, g, or t
  misc_feature (1751)..(1760): n is a, c, g, or t
  misc_feature (1790)..(1847): n is a, c, g, or t
  misc_feature (1853)..(1915): n is a, c, g, or t
  misc_feature (1931)..(1944): n is a, c, g, or t
gtgacctgaaagtatntgggaatttccccaagcttattatgacccaggtttccaagtcactgcaagtcactaggatcttccttcaggctctgaatcttggaattgaagtgatcaacacaactgatcacctgaagttcagtaaggactgtggccgaatgctcaccagaatgtggtactgctcttactgccagggactgatgatggttaaaccctgtggcggttactgcaatgtggtcatgcaaggctgtatggcaggtgtggtggagattgacaagtactggagagaatacattctgtcccttgaagaacttgtgaatggcatgtacagaatctatgacatggagaacgtactgcttggtctcttttcaacaatccatgattctatccagtatgtccagaagaatgcaggaaagctgaccaccactattggcaagttatgtgcccattctcaacaacgccaatatagatctgcttattatcctgaagatctctttattgacaagaaagtattaaaagttgctcatgtagaacatgaagaaaccttatccagccgaagaagggaactaattcagaagttgaagtctttcatcagcttctatagtgctttgcctggctacatctgcagccatagccctgtggcggaaaacgacaccctttgctggaatggacaagaactcgtggagagatacagccaaaaggcagcaaggaatggaatgaaaaaccagttcaatctccatgagctgaaaatgaagggccctgagccagtggtcagtcaaattattgacaaactgaagcacattaaccagctcctgagaaccatgtctatgcccaaaggtagagttctggataaaaacctggatgaggaagggtttgaaagtggagactgcggtgatgatgaagatgagtgcattggaggctctggtgatggaatgataaaagtgaagaatcagctccgcttccttgcagaactggcctatgatctggatgtggatgatgcgcctggaaacagtcagcaggcaactccgaaggacaacgagataagcacctttcacaacctcgggaacgttcattccccgctgaagcttctcaccagcatggccatctcggtggtgtgcttcttcttcctggtgcactgactgcctggtgcccagcacatgtgctgccctacagcaccctgtggtcttcctcgataaagggaaccactttcttannnnnnnnnnnnnnnnnnnnnnngttatcctgtatacctcctccagccatgaagtagaggactaaccatgtgttatgttttcgaaaatcaaatggtatcttttggaggaagatacattttagtggtagcatatagattgtccttttgcaaagaaagaaaaaaaaccatcaagttgtgccaaattattctcctatgtttggctgctagaacatggttaccatgtctttctctctcactccctccctttctatcgttctctctttgcatggatttctttgaaaaaaaataaattgctcaaataannnnncannnnnnnnnnnnnnnnnnnnnnnnnnnnnnnnnnnncccccaacacaaaccacacaaaccnnnnnnnnnnnnnnnnnnnnnnnnnnnnnnnnnnncacccctcctcaacaacacataaaaaacaatatccccttttttcgnnnnnnnnnnnnnnnnaaaaaattttttaaacaattttgttnnnnnnnnnnnccccnnnnnnnnnnnnnnnnggggacaaccgtttcttccnnnnnnnnnnccggggaccagacaaggggtgtgggtttcnnnnnnnnnnnnnnnnnnnnnnnnnnnnnnnnnnnnnnnnnnnnnnnnnnnnnnnnnngggggnnnnnnnnnnnnnnnnnnnnnnnnnnnnnnnnnnnnnnnnnnnnnnnnnnnnnnnnnnnnnnnaaaaatacaaaatatnnnnnnnnnnnnnntgtggtccccttttttcgaaaaaaagggcgggaaatttttttataagaaatttttccccccgcgccaggtgggcgaccctctctacaaaacgcgggcagagaagaaaaacactaaaatccccccgagggggacgatctaaaaaacctctgtgccgcgcctttagagaaaaaataaatctct

SEQ ID NO: 71505 - DNA, 1893 bp, Homo Sapiens
ttctccacaagaccacggcttgaagaggtaaaaggactctccagctctttgaaagaaaatggttctcagctccgttgtgtccaacagacaattgaaaccattgaagaaaacatcggttggatggctaagaattttgataaaatcagagtgtggctgcaaagtgaaaagcttgaacgtatgtaaaaattcctcccttgccaggttcctgttatctctaatcaccaacattttgttgagtgtattttcaaactagagatggctgttttggctccaactggagatacttttttcccttcaactcattttttgactatccctgtgaaaagaatacctgttagtttttcatgaatgggctactgctaccatgtgttgtgttcatcacaggtgttgccctgcaacgtaaacccaagtggtgggttccctgccacagaagaataaagtaccttattcttctcattttatagtttatgcttaagcacccgtgtccaaaaccctgtaccccatgtttatcattcataaactgtttcatcagtctcctcgaaagactctgaatagtcgactactgaacaatgaacacctggatctgagactaagccggacgatgactgggttaaagctctcccggctcacccctccagacccgctgcccatccctcttccttgctccatgcccaggggctgacttgtaaaggccaagtcatcaagctttcttgccctttggatgttggtcagtggggagccggagagctggagctggggtcggaggaggtagtaggtggaggtgttcttccctgattcccttgcgggatgcctcgggctggcctcccctgagggtcttagctccgagaggggaccctcttttccacacagccttctccacctctggattttggtaactgctccctcctcatcccttcaggattagtggcctcagtgggagtctggcttttactagtcctggcggacttgtggtttctacataatgtgctcgcacttttgcaaaaaatctttttatagaaccctcctcagataattctgagtgtcatctatttccctgactggtacagtatctcttctgaaaaagcagagtgcattcaagtctgtaggaaaacccttttcttagggaggtgattttttttctctctctgcttcttatttggcctactttacaatttctaacgtaactagcttattggcatttactgacagtaaattattgcagtcaccaataaagtgagtagtacatgtgaaacaaaatatttgctcatattagcaaataggacattctttggctttgaagtctttcttttgtgaagacttcacacacggttgcttcagcacacagttgctgctcaggttttatgtatagatgataataatagaaagcacagtttactaacatggtaaaccaacggagttcaagtcaagtcagttaataccctaagaattagattttatttcttattctgaaaacttgctacacagggacttatctaacccatagtgtgctctgttgctgacttgattcaagttgcagcgtgttttgcgctgactctaaggtgcggaaatcctcacacctggcaaaggagaattcaaactgaactttttgaatggtttaataaaaatagaaatcactggtaatttccaccccaaactaaactatttcccttcttttaaaaaaatacacaaccaagattttaatgtaaaatattttgctttaattgtattttatgccttgattaatgaaacatggaaatattgattttcagttttggtcacctgaggaacctatctttgtttgcttttggaaaagcccattttttaaacagatacaatattgccacaacaatgtgcagaaacctttttgataataaaaaattgttctttgcctct

SEQ ID NO: 71506 - DNA, 1282 bp, Homo Sapiens
  misc_feature (481)..(499): n is a, c, g, or t
tggaaccccatttgccagctgaatattcccatcgggattagggaatttttggataattttaaatcttcatcttttatttttcctgggtaggagaatgccagggaaaaagatgtcagggttacataccattaaaccaagattgggaatttaatgtttccaaaggggcatggccttcctaagcatcagtttgaagcttttgttatgacttagctgacttgtggcagcggagcaagcaaaaacaataacactgcttataaatggcaccacatcttgttaacctccccccccaaatactctctgaaagtcatgcacatacctatgggattttacacaccaccagcttaaaatgctatgtctctatccatcagaaatagtcattattctatttttaaggcagcaacaagaaaagaaaaaacacttttcctgagggatttctaaccatgtatctaatcctcccatttgggcagtataggtgtttgcnnnnnnnnnnnnnnnnnnnaagaaaaaccttgaaacctttgacactgacagatgtgtttgcaaggatacggctgcagtattactaatttccatgtgtatctggaagtatttttaaatggcataccaaaatccagaagtttaaagatgcctataaaagtaaacaacatttatttaaaaagaactctgaatatgccttcttttttaattagaaatatcttcgagacttgggtgtttgttaataactaataactggagtaagctacaggatctaaagcagccctttttacagtctagttaggagagagaaaataattgcaaatatccacttagaggcaaagaacaattttttattatcaaaaaggtttctgcacattgttgtggcaatattgtatctgtttagaaaatgggcttttccaaaagcaaacaaagataggttcctcaggtgaccaaaactgaaaatcaatatttccatgtttcattaatcaaggcataaaatacaattaaagcaaaatattttacattaaaatcttggttgcgtatttttttaaaagaagggaaatagtttagtttggggtggaaattaccagtgatttctatttttattaaaccattcactacaacaaataagtataaaaattccaattccacttttatacctatttatttgttgtagtgaatggtttaataaatggcagatttatgtccagaagtcactctattttgtcgtgtattaggggaacacattttgacatttttcgtaccaatcatcaatcatattcccttatcttgaagtttttgcctt

SEQ ID NO: 71507 - DNA, 1945 bp, Homo Sapiens
  misc_feature (1343)..(1389): n is a, c, g, or t
aggccggggttaatcggcacgaggctgggaggaggagttggaggccggagggagcccgcgctcggggcggcggctggaggtaaccccttgggccgagctggaaaggcgggccacctcggtcttcgctcctttgtggagctctggcagtaactcccctccctctctgtttctctgcaggcagcgcaccgagttcccgcgaggatccatgacctgacggggccccggagccgcgctgcctctcgggtgtcctgggtcggtggggagcccagtgctcgcaggccggcgggcgggccggagggctgcagtctccctcgcggtgagaggaaggcggaggagcgggaaccgcggcggcgctcgcgcggcgcctgcggggggaagggcagttccgggccgggccgcgcctcagcagggcggcggctcccagcgcagtctcagggcccgggtggcggcggcgactggagaaatcaagttgtgcggtcggtgatgcccgagtgagcggggggcctgggcctctgcccttaggaggcaactcccacgcaggccgcaaaggcgctctcgcggccgagaggcttcgtttcggtttcgcggcggcggcggcgttgttggctgaggggacccgggacacctgaatgcccccggccccggctcctccgacgcgatggggaaggtgctatccaaaatcttcgggaacaaggaaatgcggatcctcatgttgggcctggacgcggccggcaagacaacaatcctgtacaagttgaagctgggccagtcggtgaccaccattcccactgtgggtttcaacgtggagacggtgacttacaaaaatgtcaagttcaacgtatgggatgtgggcggccaggacaagatccggccgctctggcggcattactacactgggacccaaggtctcatcttcgtagtggactgcgccgaccgcgaccgcatcgatgaggctcgccaggagctgcaccgcattatcaatgaccgggagatgagggacgccataatcctcatcttcgccaacaagcaggacctgcccgatgccatgaaaccccacgagatccaggagaaactgggcctgacccggattcgggacaggaactggtatgtgcagccctcctgtgccacctcaggggacggactctatgaggggctcacatggttaacctctaactacaaatcttaatgagcattctccacccatcccctggaaggagagaaatcaaaaacccattcataggattatcgccaccatcacctctttcaattgccactttctcttcttttgaatttgaactctggagttactgttctacagtttggcggggacggggcttgggggnnnnnnnnnnnnnnnnnnnnnnnnnnnnnnnnnnnnnnnnnnnnnnnattctcatttcattggggtgggaattcgggttaaggaggcccggaccggcacctttggccctgtgaacaccaaggtctggtccacaaggcctccgtggtggcgactcttccccagacaatatggcccatcggggggcaaaccacgagcagtctctggggaagacagcccttgcggaatcaactagtgggaatctctcaattccccgaagaaaaactcttcctcgacaatgtcccccaagtgtgaaggtccattatgcaccatatcatgagggcccacggatcccctttattcaacgttgggcggaaaaaagcggcaaaaacagggacatttccagtgccaaaccctactgtgtgcaagctcgtgtcccccctcatagcacacaccgggaaccactggggcgcgcacaaggcagcccacacaacccgccaacgccgcgaacaaccgtgcgcgaccacgcacgaccaccgcaaaaaaacgtcataaaccacacacgcggacgggacacaagggcgccccaggggaaacgcaaaacgccgccaacacggcccccggaga

SEQ ID NO: 71508 - DNA, 904 bp, Homo Sapiens
  misc_feature (146)..(199): n is a, c, g, or t
tttttttgttggctttgcgttaggatgctctgatctgacatttgacatgaacacaaagttgctagatgctcttgttgacttccagcagatgggatgggggaaacacagcagttcttggtaaagtcctttgtaataatagtttgatnnnnnnnnnnnnnnnnnnnnnnnnnnnnnnnnnnnnnnnnnnnnnnnnnnnnnngcccagtttccttatcacttgctgtagatggcttattttgcattcatgcagactatgttgcaagtctgtttcatctagtaaactgaaaattattgcttaatcaaactgccgtttgtcttttatatttaaggccttccccccccttccttatgagttctaacttagtaatttcaaatgtgaccttttatatctaagaccagtatagtaaacttagcccacagtggcaaataatgagtaatattgtaatatgttccagttgcacctcagtatgttaaacaggtaatgtaagaagttctctgaaatgtcagcaagtaagttctgaaacacatcatgcatgagtaggaataaaacccaagttccccataacgtagataacttaatgctgcataaaaatatgaaagtgtaacccatgaaggacactttttctttccactgcaaagttagccactttgctgtttttcctcttttttaaactttgaaaatagactctttccagaaattggagcaataatggtgttaccacacacagattaaataatttgtagatattttaagtgactttttgggcaaaactggaatgtatacttttaccttgttttcaacacctaagaccagtaatttaaaaattactaaaaggtttactttgttcattaataaaacatttaacaatttcaattatatgcacccttttaccctagttgaaaa

SEQ ID NO: 71509 - DNA, 1888 bp, Homo Sapiens
  misc_feature (601)..(666): n is a, c, g, or t
cttgtctcctcttctgaccgggacagagtcaccatttgatttggaacagcagtggcaagatctcatgtccatcatggaaatgcaggccatggaagtgaacacatcagcaagtgaaatcctgtacagtgcccctcctggagacccactgagcaccaactacagccttgcccccaacactcccatcaatcagaatgtcagcctgcatcaggcgtccctggggggctgcagccaggacttcttactcttcagccccgaggtggaaagcctgcctgtggccagtagctccacgctgctcccgttggcccccagcaattctaccagcctcaactccaccttcggctccaccaacctgacagggctcttctttccaccccagctcaatggcacagccaatgacacagcaggcccagagctgcctgaccctttggggggtctgttagatgaagctatgttggatgagatcagccttatggacctggccattgaagaaggctttaaccctgtgcaggcctcccagctggaggaggaatttgactctgactcaggcctttccttagactcgagccatagcccttcttccctaagcagctctgaaggcagnnnnnnnnnnnnnnnnnnnnnnnnnnnnnnnnnnnnnnnnnnnnnnnnnnnnnnnnnnnnnnnnnnttctgaggaaggtgcggttggctacagctctgactctgagaccctggatctggaagaggccgagggtgctgtgggctaccagcctgagtattccaagttctgccgcatgagctaccaggatccagctcagctctcatgcctgccctacctggagcacgtgggccacaaccacacatacaacatggcacccagtgccctggactcagccgacctgccaccacccagtgccctcaagaaaggcagcaaggagaagcaggctgacttcctggacaagcagatgagccgggatgagcaccgagcccgagccatgaagatccctttcaccaatgacaaaatcatcaacctgcctgtggaggagttcaatgaactgctgtccaaataccagttgagtgaagcccagctgagcctcatccgagacatccggcgccggggcaagaacaagatggcggcgcagaactgccgcaagcgcaagctggacaccatcctgaatctggagcgtgatgtggaggacctgcagcgtgacaaagcccggctgctgcgggagaaagtggagttcctgcgctccctgcgacagatgaagcagaaggtccagagcctgtaccaggaggtgtttgggcggctgcgagatgagaacggacgaccctactcgcccagtcagtatgcgctccagtacgccggggacggcagtgtcctcctcatcccccgcacgatggccgaccagcaggcccggcggcaggagaggaagccaaaggaccggagaaagtgagcctggggaagaagggggtttgaagcccaccaagaccgaaactggagaagggctggacctggacctggacctggacctacagcggggacttaaatgccttcttatccaatatatcttctcagatgggatgactgcgggtcagtgtacaggaatgatggagaatctagtgtagcagcctccaggcaggattcagcacaacactggggagtcacccttccctcgggcctctgcctaccaacaactgggcttatcactgggaaaacacaaaaaattacacaacccagcaacaacaaaagaactagtcctcttagaatttcttgcgctttgatttttttagggcttgtgccctgtttcacttatagggtctagaatgcttgtgttgagtaaaaaggagatgcccaatattcaaagctgctaaatgttctctttgccataaagactccgtgtaactgtgtg

SEQ ID NO: 71510 - DNA, 1483 bp, Homo Sapiens
  misc_feature (119)..(162): n is a, c, g, or t
  misc_feature (1356)..(1376): n is a, c, g, or t
tcaaagcgggaagaaaatcagagggaaggttaaggttggctctggccaggattccaggcagcaggttggagtgactggtgggcctaaatcactggtgtgataaaccccatttcaccccnnnnnnnnnnnnnnnnnnnnnnnnnnnnnnnnnnnnnnnnnnnncggtgttaactctttctgctccttgcattttgacatccctgaaggggagctcttggatatcattggccatgtttcaatcgaatggagccactgggccccaacactggctttgagatttagagtcaaagggtagagtgaacaggaaagggtcacgtggtcccatgttgcaacagccccaacatcacgcatgtcattcactgccttgccactccatctccctccgtgctccagccacccctgagctgaggctcccattgtctccatcagagcctgcatgtgtatgccgtcctcccctggtccggtgtttgtgttccccacccctcacagactgcctgagctcttctgtaagctggggtagggtgatggcagtgctccgggaactgggcctgcagccttcctcttctgggactgctgtgaggcagaggaatgatggagaatctagtgtagcagcctccaggcaggattcagcacaacactggggagtcacccttccctcgggcctctgcctaccaacaactgggcttatcactgggaaaacacaaaaaattacacaacccagcaacaacaaaagaactagtcctcttagaatttcttgcgctttgatttttttagggcttgtgccctgtttcacttatagggtctagaatgcttgtgttgagtaaaaaggagatgcccaatattcaaagctgctaaatgttctctttgccataaagactccgtgtaactgtgtgaacacttgggatttttctcctctgtcccgaggtcgtcgtctgctttcttttttgggtttctttctagaagattgagaagtgcatatgacaggctgagagcacctccccaaacacacaagctctcagccacaggcagcttctccacagccccagcttcgcacaggctcctggagggctgcctgggggaggcagacatgggagtgccaaggtggccagatggttccaggactacaatgtctttatttttaactgtttgccactgctgccctcacccctgcccggctctggagtaccgtctgccccagacaagtgggagtgaaatgggggtggggggaagcactgattcccagttagggggtgcctaactgagcagtagggatagaaggtgtgaacctgggagtgcttttataaattattttccttgtagattttatttttaatttatctctgtgacctgccaggnnnnnnnnnnnnnnnnnnnnntgctgttgagcacatgacaaaataaaataaaatggatgattcattcttaagtgcactttttccccactttgaatttaaattgagaataaaggaaatggactcattgt

SEQ ID NO: 71511 - DNA, 597 bp, Homo Sapiens
  misc_feature (45)..(45): n is a, c, g, or t
gagatgcccaatattcaaagctgctaaatgttctctttgccatanagactccgtgtaactgtgtgaacacttgggatttttctcctctgtcccgaggtcgtcgtctgctttcttttttgggtttctttctagaagattgagaagtgcatatgacaggctgagagcacctccccaaacacacaagctctcagccacaggcagcttctccacagccccagcttcgcacaggctcctggagggctgcctgggggaggcagacatgggagtgccaaggtggccagatggttccaggactacaatgtctttatttttaactgtttgccactgctgccctcacccctgcccggctctggagtaccgtctgccccagacaagtgggagtgaaatgggggtggggggaagcactgattcccagttagggggtgcctaactgagcagtagggatagaaggtgtgaacctgggagtgcttttataaattattttccttgtagattttatttttaatttatctctgtgacctgccagggagaggggagagagagaaacatcctgttgagcacatgacaaaataaaataaaatggatgattcattcttg

SEQ ID NO: 71512 - DNA, 720 bp, Homo Sapiens
  misc_feature (47)..(47): n is a, c, g, or t
gggaccagctgctgccaaaactgagggctgtgtgggtggaataagcntggaaggccgtgatgccatcttcaagcagtttcatttcaaagacttcaacagggcctttgggttcatgacaagagtggccctgcaggctgagaaactggaccaccatcctgaatggtttaacgtgtacaacaaggtccacatcacgctgagcacccatgagtgtgccggcctttcagaacgggacataaacctggccagcttcatcgaacaagtagcagtgtccatgacatagaccctgcccttcctctttgaattcttccgggggaaagggtgactgaactgggagtccagggagggagctgaggagcccttaccctcccaccactcccctcccaagacccagccgccgccgttgagggctgagtccttgctgtgggatgtgccagtgtccccaccaacaccaggaatttagaccttttccctgcaccactctcttcatcctgggggctctgttacactaatttgaataaactctcccctttctttgcaacttcccagcaacaataatgattttcttgccaggccgtctcttgctccctaattcatttcccaggaagctgtgatacagggtgaaataaagtcttgtcttagaaaccaggaccctaaaccccacactatgtaatagaaacacatgtgtttttatgtctcaaataaaactattatatcacttgg

SEQ ID NO: 71513 - DNA, 701 bp, Homo Sapiens
ctcacaaagtaaatggtgggcatccatgtttacattgcaccttcccgtgctgtaattggcttgacaaagacaagcaggcttctctgttgagacttattgtgtttttagttttcatagacacttatttaatctttttaaattgtacagcaaggtgctctaagtaatattcgataaaatatatttaatagaaatttgcgtttgatattcatgaacatgaatacatgtatttttttaagaaataagtattgtgtaacactatggcattgcttctatagccaaagtataaaaatttctggaatactgacatgtaaagactacagttaattctgacactgtatcttattaaaataggatgatttgcattttgtaaaattatcctgcacatcaagctgcatgccttaaagcggaaactctaggactgtgttcatgggagagcagttcatctgttcagaacagtgaggcaaggtctgtagtgcttctttaactacctttggaaatactgtacaatgttagaataatttattttgctttacaggagtttgtcatgtattgactttaatattgtattttggtaataaattttttgttaaaaaaaacttggctccaagttctattaaccacaggttgtgttcattcttttcctggaaatgatgactttattgcttagaaagttgtaaataattaaaagcttcccaagagtt

SEQ ID NO: 71514 - DNA, 1559 bp, Homo Sapiens
  misc_feature (1186)..(1194): n is a, c, g, or t
  misc_feature (1248)..(1265): n is a, c, g, or t
agtaactataacggttacataaggtagcgaggcctgggtggcgaattcggcacgaggggaaggaggctgccggagggcgggaggcaggagcgggccaggagctgctgggctggagcggcggcgccgccatgtccgacagcgagaagctcaacctggactcgatcatcgggcgcctgctggaagtgcagggctcgcggcctggcaagaatgtacagctgacagagaacgagatccgcggtctgtgcctgaaatcccgggagatttttctgagccagcccattcttctggagctggaggcacccctcaagatctgcggtgacatacacggccagtactacgaccttctgcgactatttgagtatggcggtttccctcccgagagcaactacctctttctgggggactatgtggacaggggcaagcagtccttggagaccatctgcctgctgctggcctataagatcaagtaccccgagaacttcttcctgctccgtgggaaccacgagtgtgccagcatcaaccgcatctatggtttctacgatgagtgcaagagacgctacaacatcaaactgtggaaaaccttcactgactgcttcaactgcctgcccatcgcggccatagtggacgaaaagatcttctgctgccacggaggcctgtccccggacctgcagtctatggagcagattcggcggatcatgcggcccacagatgtgcctgaccagggcctgctgtgtgacctgctgtggtctgaccctgacaaggacgtgcagggctggggcgagaacgaccgtggcgtctcttttacctttggagccgaggtggtggccaagttcctccacaagcacgacttggacctcatctgccgagcacaccaggtggtagaagacggctacgagttctttgccaagcggcagctggtgacacttttctcagctcccaactactgtggcgagtttgacaatgctggcgccatgatgagtgtggacgagaccctcatgtgctctttccagatcctcaagcccgccgacaagaacaaggggaagtacgggcagttcagtggcctgaaccctggaggccgacccatcaccccaccccgcaattccgccaaagccaagaaatagcccccgcacaccaccctgtgccccagatgatggattgattgtacagaaatcatgctgccatgctnnnnnnnnntcaccccgacccctcaggcccacctgtcacggggaacatggagccttggtgtannnnnnnnnnnnnnnnnnaatgaatcaatagcagcgtccagtcccccagggctgcttcctgcctgcacctgcggtgactgtgagcaggatcctggggccgaggctgcagctcagggcaacggcaggccaggtcgtgggtctccagccgtgcttggcctcagggctggcagccggatcctggggcaacccatctggtctcttgaataaaggtcaaagctggattctcgccatggcctccgtctcacatctaagacactgcctggcagctcttctgcacagagccgcttgggagtctcggcaccgggccccagc

SEQ ID NO: 71515 - DNA, 1073 bp, Homo Sapiens
  misc_feature (950)..(960): n is a, c, g, or t
  misc_feature (1024)..(1024): n is a, c, g, or t
aactatacggtctaaggtagcgaggcctgggtgtgtgaattcggcacgaggggctgcggagggcgggaggcaggagcgggccaggagctgctgggctggagcggcggcgccgccatgtccgacagcgagaagctcaacctggactcgatcatcgggcgcctgctggaaggtgacatacacggccagtactacgaccttctgcgactatttgagtatggcggtttccctcccgagagcaactacctctttctgggggactatgtggacaggggcaagcagtccttggagaccatctgcctgctgctggcctataagatcaagtaccccgagaacttcttcctgctccgtgggaaccacgagtgtgccagcatcaaccgcatctatggtttctacgatgagtgcaagagacgctacaacatcaaactgtggaaaaccttcactgactgcttcaactgcctgcccatcgcggccatagtggacgaaaagatcttctgctgccacggaggcctgtccccggacctgcagtctatggagcagattcggcggatcatgcggcccacagatgtgcctgaccagggcctgctgtgtgacctgctgtggtctgaccctgacaaggacgtgcagggctggggcgagaacgaccgtggcgtctcttttacctttggagccgaggtggtggccaagttcctccacaagcacgacttggacctcatctgccgagcacaccaggtggtagaagacggctacgagttcttttgccaagcggcagctggtgacacttttctcagctcccaactacttgtggcgagtttgacaatgctggcgccatgatgagtgtggacgagacctcatgtgctctttccagatcctcaagcccgcccaacagaaacaaggggaaagtacgggcagtttcagtgggcctgaacccctggaaggccggacccattcannnnnnnnnnnggaaatttcggccaaaagccaaagaaattaggcccccccggaaaacaaccctggtgggccccanaatggagtggaattggaattggtaccagaaaatcatgctgcccccatct

SEQ ID NO: 71516 - DNA, 967 bp, Homo Sapiens
ccggaatttccgggatatcgtcgacccacgcgtccgtgtaggagcgggccaggagctgctgggctggagcggcggcgccgccatgtccgacagcgagaagctcaacctggactcgatcatcgggcgcctgctggaagtgcagggctcgcggcctggcaagaatgtacagctgacagagaacgagatccgcggtctgtgcctgaaatcccgggagatttttctgagccagcccattcttctggagctggaggcacccctcaagatctgcggtgacatacacggccagtactacgaccttctgcgactatttgagtatggcggtttccctcccgagagcaactacctctttctgggggactatgtggacaggggcaagcagtccttggagaccatctgcctgctgctggcctataagatcaagtaccccgagaacttcttcctgctccgggggaaccacgagtgggccagcatcaaccgcatctatgggttctacgatgagtgcaagagacgctacaacatcaaactgtgggaaaaccttcgctgactgcttcaactgcctgccccatcgggggcctagtggacgaaaagatcttctggctgcccacggaaggcctggtccccggaacatgcagtctatgggagcagaattcgggcgggatctgggggcccccaaaaggtgcccggaccaggggcctggctggggggaaccctgctggggggcctgacccctggacaacgggcggtgcaacgggcttgggcgcgaagaaacaaaccgtggggggtccccttttaaccctttggaacccccaggggtggtgggcctaagttctgcccaccagaggaccaacttgggacctttatctcggcggaacagaaccgcggctgggtacgcaaaaccgggctacgaaggttcctttggccaaacgcgggaggaacgggagagacctcttttctcacgcttccccga

SEQ ID NO: 71517 - DNA, 889 bp, Homo Sapiens
aaggtagcgaggcctgggtggcgaattccgcacgaggccgccatgtccgacagcgagaagctcaacctggactcgatcatcgggcgcctgctggaagtgcagggctcgcggcctggcaagaatgtacagctgacagagaacgagatccgcggtctgtgcctgaaatcccgggagatttttctgagccagcccattcttctggagctggaggcacccctcaagatctgcggtgacatacacggccagtactacgaccttctgcgactatttgagtatggcggtttccctcccgagagcaactacctctttctgggggactatgtggacaggggcaagcagtccttggagaccatctgcctgctgctggcctataagatcaagtaccccgagaacttcttcctgctccgtgggaaccacgagtgtgccagcatcaaccgcatctatggtttctacgatgagtgcaagagacgctacaacatcaaactgtggaaaaccttcactgactgcttcaactgcctgcccatcgcggccatagtggacgaaaagatcttctgctgccacggaggcctgtccccggacctgcagtctatggagcagattcggcggatcatgcggcccacagatgtgcctgaccagggcctgctgtgtgacctgctgtggtctgaccctgaccaggacgtgcagggctggggcgagaacgaccgtggcgtctcttttacctttggagccgaggtggtggccaagttcctccacaagcacgacttggacctcatctgccgagcacaccaagtgggtaaaagacgggctacgagttcctttgccaagccggcagctggtgaacactttttcctcaactcccaaactactgtgggcggagtttggaccaagg

SEQ ID NO: 71518 - DNA, 935 bp, Homo Sapiens
tgggtggcgaattcggcacgaggccgccatgtccgacagcgagaagctcaacctggactcgatcatcgggcgcctgctggaagtgcagggctcgcggcctggcaagaatgtacagctgacagagaacgagatccgcggtctgtgcctgaaatcccgggagatttttctgagccagcccattcttctggagctggaggcacccctcaagatctgcggtgacatacacggccagtactacgaccttctgcgactatttgagtatggcggtttccctcccgagagcaactacctctttctgggggactatgtggacaggggcaagcagtccttggagaccatctgcctgctgctggcctataagatcaagtaccccgagaacttcttcctgctccgtgggaaccacgagtgtgccagcatcaaccgcatctatggtttctacgatgagtgcaagagacgctacaacatcaaactgtggaaaaccttcactgactgcttcaactgcctgcccatcgcggccatagtggacgaaaagatcttctgctgccacggaggcctgtccccggacctgcagtctatggagcagattcggcggatcatgcggcccacagatgtgcctgaccagggcctgctgtgtgacctgctgtggtctgaccctgacaaggacgtgcagggctggggcgagaacgaccgtggcgtctcttttacctttggagccgaggtggtggccaagttcctcccacagcacgacttggacctcatctgccgagcacaccaggtgggtagaagacggctacgagttcttttgcaagcggcagctggtggacacttttctcagctcccaactactgtgggggaggttgacaatgcctggcgcccatgatggagtggtggaccaagacccctcatgtggctcctttcccaggatcctccaagcc

SEQ ID NO: 71519 - DNA, 1622 bp, Homo Sapiens
gcctaactcggtattaatccaaagcttattttgtaagagtgagctctggtggagacaaatgaggtctattacgtgggtgccctctccaaaggcggggtggcggtggaccaaaggaaggaagcaagcatctccgcatcgcatcctcttccattaaccagtggccggttgccactctcctcccctccctcagagacaccaaactgccaaaaacaagacgcgtagcagcacacacttcacaaagccaagcctaggccgccctgagcatcctggttcaaacgggtgcctggtcagaaggccagccgcccacttcccgtttcctctttaactgaggagaagctgatccagtttccggaaacaaaatccttttctcatttggggaggggggtaatagtgacatgcaggcacctcttttaaacaggcaaaacaggaagggggaaaaggtgggattcatgtcgaggctagaggcatttggaacaacaaatctacgtagttaacttgaagaaaccgatttttaaagttggtgcatctagaaagctttgaatgcagaagcaaacaagcttgatttttctagcatcctcttaatgtgcagcaaaagcaggcaacaaaatctcctggctttacagacaaaaatatttcagcaaacgttgggcatcatggtttttgaaggctttagttctgctttctgcctctcctccacagccccaacctcccacccctgatacatgagccagtgattattcttgttcagggagaagatcatttagatttgttttgcattccttagaatggagggcaacattccacagctgccctggctgtgatgagtgtccttgcaggggccggagtaggagcactggggtgggggcggaattggggttactcgatgtaagggattccttgttgttgtgttgagatccagtgcagttgtgatttctgtggatcccagcttggttccaggaattttgtgtgattggcttaaatccagttttcaatcttcgacagctgggctggaacgtgaactcagtagctgaacctgtctgacccggtcacgttcttggatcctcagaactctttgctcttgtcggggtgggggtgggaactcacgtggggagcggtggctgagaaaatgtaaggattctggaatacatattccatgggactttccttccctctcctgcttcctcttttcctgctccctaacctttcgccgaatggggcagcaccactgacgtttctgggcggccagtgcggctgccaggttcctgtactactgccttgtacttttcattttggctcaccgtggattttctcataggaagtttggtcagagtgaattgaatattgtaagtcagccactgggacccgaggatttctgggaccccgcagttgggaggaggaagtagtccagccttccaggtggcgtgagaggcaatgactcgttacctgccgcccatcaccttggaggccttccctggccttgagtagaaaagtcggggatcggggcaagagaggctgagtacggatgggaaactattgtgcacaagtctttccagaggagtttcttaatgagatatttgtatttatttccagaccaataaatttgtaactttggcaaaaatcct

SEQ ID NO: 71520 - DNA, 2328 bp, Homo Sapiens
  misc_feature (1082)..(1108): n is a, c, g, or t
cccccggaaggagggcctcctttcagagggggagggacaaattgttggggatggcctccttatcaaaccttccaggggatgccggagctcggtgaggaccggtccctcaggagggcagatgacccggaccggctccaggtacggccaagctggcccccaggcttagaccatgcttgtcaagatgccttgctacttgagaataaggcgagatcccagattcaagtgctagcagcattctgcccctcagatgcgccggcaggctccactggctccaaaggacgcccttggatgggtcagcaattccacgaacatccactaaaccaacacttagcactgctcagtggggtcaacagtgcccggtggtccgctgcaatgaatccaaacacatctgtgcccagagctacaaggccatgtgcccatcaactgtcccgactcgcaggcaatgcacgcagccctgcaccacttccctcctgcccaccacggagcaggggacagttctgtgagtgaacagaagcaggacatcggcagagccggctgacgatggaggatgagatgctgccgagatgctggagggcagatcactgaggatgaacacgcgttccttccgccaacagtcgtgcaccacctgctggggctctgcgtccccaccggccaagggctgcctcgctctaatgaaagcccgctcactcagcacagggccaagtggcctttccagctgcaggtaccagaaaaagccactgccgctatcacagggggaagaacgccccaaagacaaaaggtcatttgagatgattaacatcttttagaggccattttggtcattcttgaaatcaaagagaaacctttattttcaacaaaactgcccagaagagatggttcattgatccactaggaacaagtctcttaccacacacagcaccaaaatatatatttaaaaaattaaaaaacacatagccccctcacacgcatcccccaaaagccacacaacccagaccaaagggaaaacaaatcaaactcaatgccctcacacatgagccatctttgaattaggatttacaaatttatatattctttcctatggnnnnnnnnnnnnnnnnnnnnnnnnnnnccacaggggtaaggaaaaacttgtaggtgaaggcccaatgtctgcctaagctaacagaaagcagaatcatgattcgtgcttttcctgtattttgagtgggatgcagcctaacagcacagccctccgtggtagaccgaatccttcagcagccagaggcccccgaacactggaagagcaaaccgcaaccttccagattcttcagcgagtgccagagtgcaggctctgcatcagactgccaaagagacggcagctttccttgcaagttttccactgcctacaaaggccatttttccctataaaaagatgccaggtcaaaaaaaagtacaagggagaaaaagagttctctactgcagtaagaatcttgcagtcgcaggctgatctgaggcaagtcccacgacgcagggctggtgttgggatccaccacgcaagcgcaagcgctacttgggctcctcaatcacacccttgctgaggtctgtcattttgggatatttactttcttctggtccagctcgttctgagcccaaagtagtagtttcagtaattttgccagtttgggtgttgactcgcgattttcataatctagcacagcttggttaacttcactccacaccttctgcctctgcatggtgtggaggaggtctccgaagggcgactcctcgggactgtcaaaggccagcagtgccagggtacgctccatctctgtgaggcactctcggctctcctcgccctgctccgccagctgagtctgtgcaaactccagcgccgcctctgtctcccgctggcggatcagctcgatcaaatgctgttgctgcaaatggaagtaaagataccggtttgtgtccaagagctctgggtggaggctgttgatcaaggcgatggcctcctgaatctgacctttcagtatcatctcccggatcttgattcgttcatcaagtgtttccagatccacactaggttcgattccagattccattcgaaacttctccgctgcttccttaaagccctctgtgaccaggtagttcatgatgaggcggttcatgtctgctctctggacatgcaagttattgagcttttccatccactcatctttcgtgatttcatcgggtttttctgcataactcattctgatttatttcgtgcggaacctgcctcccgcgctgcgcggtctgggcggctgcggctccgcagcctctcctgggctggggagaggtggcggccgc

SEQ ID NO: 71521 - DNA, 888 bp, Homo Sapiens
  misc_feature (62)..(62): n is a, c, g, or t
  misc_feature (530)..(538): n is a, c, g, or t
  misc_feature (691)..(702): n is a, c, g, or t
agcagtaccgcttggaagttggacctgcgtgcttcctctgacctctgacctcgtggccactntaggcctcacggaggagggaagaggaagaggcaaggggagggtactgaggggcagatggctccaggagaggcagctcccctgcccaagggtccttgggcagaccccagctgttgtctgcccagtagaagtgggtgggggtaggaggggatagggtgtccttgggaacaatggatcccagcttagccccaaagaccaaccaaagagccagccagagtaagctggacctgcaacctgcctgagccccgtggcctctcagctctgcggccaccccgttccctccccagcttcctgcccaaagagccccacattcaagccaacttgagggaagggggcgtctcgtcagctggtccctgctagggagctattgatgtgcaatattagaaaggagacatgaaaaaaggagaaaaggaaagacagaagtgtatatatatattatttaaacaaacaaaaagaaggtgcgttactannnnnnnnncacccgggaaagaggtgagaggatgggaaggagcagccaggcgtgggaagcggcgagatcctcgggctgggggtgcccacgtttgctacctcccactgtgaaatcgctggtgctcacaattgtctctcacagtgtatgtgatttttttaaggnnnnnnnnnnnntccctatttaagattctgaaggtgctaccattattttgccacagactttgaagaaacttttggatgtggggcatcatccgcatctttctctctcctccaaatgacaaagtttggggaatttttgaattttcctagcatcgcccttgtgctcatcaggtaatctgctaaggaggaaaaaagaaaaga

SEQ ID NO: 71522 - DNA, 1043 bp, Homo Sapiens
  misc_feature (186)..(195): n is a, c, g, or t
ttacagtgatttcaaacagtttaatgtaattccaagacaaagtgtgattacatttctacacatatacaatatgcatatgtgagtttacaaattttaattaataagtcatttcacctcggagaccgaaaaaatgatcaaaaagaaactatgagtaacaagctataacatagttcaccacaatgggannnnnnnnnntttttctcaccctacagttagtaatattacaattaaaataactatattcttctatattttttctgttaaaatcatctcataaatttacaatgctattattagtttccaagactaatataaattcactccatttttctacaacgaaaatgattaatttagaagcacacgacgtcatgatgaaaaacacaagcattttagtagcaaggacttgatcagttaagaattagttttcttgtaaaacattctaaagccaagtaaaatatccattcttataacatacctataatatgagactaaggaataggttacatataggtctacaacacattggtttgtctttaaaaaaacaaaagtagacatttataaataaaaaagagggacaattcacataggaaaaagaggtacacgagaaaatactgttgcacgcaataattttcacacagattaacatggattaacactttttattacagaaaccgtacggtgaaggaacacaacagaccagggctttcatagggttattgagattgagctgagatgacctgggagagaaagatctaggtgagatgaccctggggagggagccacgttccttggacctggtgacttagtgtcgccgggtctcctcttccctgttctcattttggggagtgagtctttctatccagtgtcctgaattcatgagcagttgaaaggtaaacatttctgcagatccattctctttctatcctaatggataccatttttggaaacgtgacagagtatcagaggctgcagctcagtacacgtggtcaaagcacaacgggatggaaacttccagtcactctgatttgttgcgcccctcgtgc

SEQ ID NO: 71523 - DNA, 1278 bp, Homo Sapiens
ggcctgggtggcgaattcggcacgagggccgccagctctcttctggttgggcctttgaaaggctcagcctcccattgtgcagtgcttgggtttggagcttatttgaatggaagaggtcagtttgttcctggctctccatttctggcctcagttgtctacaggacagtggtcagggatgcctggaggcatatatccagctgccaccaaggggcactgtttgttcccacttatgtgagtgaccccatccatccatgaccagaggattattttcctgccttggcagaggaggaggagtcaagggagcagggcagctctaccaggcaaggtgtttccccagcataggcgcagacagttgggacgaaacttcagagcccaggcagtccctgaatgaccaggccagtgttgtcactgagtggtcccctgctggttgggagtgaagagaatccaggctggcagagctggagccagttggggagcacggttctgggagctctgcaaaatcagtagcaagtgctggaaaaggcacatgccgaagatactcaagagctcccaagatttgcttgaggctagcccagtgaagaaaaaccagagactcatgtttccaggggtcagtctgtcaggcaggaaggacccaggatttgaacccagcttcagtgtgcaggctctgaggctgcccaggacgggaaagtccaaggaaggggcctggtggtgctccacttgcagttctttaaagaatgctgctttttattctcctaaccctttcaagtgggtgcagacttctcgttagcagctggaagacattcctcccacacttttcccttcctggcccaagagagcatccagaaggcagtaggacctggtttttcaggtactgggagccgggggctcactgcttgcactgtgcttagggtagggatggtaaatatcctccctgcatggctttatcctccctctcatcccaaagcaggtatcttctggttgtcacagagtttcattgagtccagctgcagccacgtggccatctggagctggtgctataggtgaccatctggtacattgaggggacctgtttgcctcctccactctataagcagtcatcttgggagaccgggaggagaaggtggtgggctagtcctgtgtcctcctccacttcccatgcctctatgttacccatctgtgtctcctgtgcagaaggagaggaaggggcattaagagatgaagggtgattatgtattacttatccatttctgaataaacatttgttataactaaaaaaaa

SEQ ID NO: 71524 - DNA, 1491 bp, Homo Sapiens
  misc_feature (1021)..(1073): n is a, c, g, or t
cagaagagatgggcagagcaacttattttccacattaaattgtgcatttgggaagcaagtagccatagtacacacacaacacgctatcagcttgggtaaggacagtgggatttatgtgaacatcaggcaaagccatgagatcaaaccatcccaagcctttcaccaatgaggtacaaccacctgggggctagctaatcttgaatgttttcctgagacaggagcgtatgtgaaaacatcaaacactgcacatgacaggatgggtcctctcatacagatgggatggggttagaaagccagagccagtttttccatctggcgtttcctgtgtcctccaggtttatatgggaatcgaaacagtttgttaatctgattgggagagttccatgggcagatttcccttcctgaaggccaaaacggagaactgctctctttaattatttcaagagtcaagaccaaaagtttgctcagcatcacactacatctcaaaattaatgttgccaacttaattttgtgcatttgtgtcagaatgtttagtttacaaggttgggggctctctttgcttcgagaagtaaacctaataccatttttttattgtttaaagctgcattcaacgtcaaaattaccttgggtaacttttgataacttacatgtgtggacaaagctaatagtggttttttaaacagcaccttgcctgaacatgactttaaagaaattaatatattgaaaacatgtttgaacccttattttaattgcaccattaaaacatttgacttaaattgtttgaccattccagttggtgtactgttctgatttttcgttgtgtaggccgatctgcctgtcagagtccacgtgtcctggtcactggtctttataattgttgtgcaataactaaaggctaaggactagatgcactatcgtgtaaagagattacacatgactgtaccatgttgcacttaatcaaatagtatgtggggatttaaaatcgcttgcattgtttcacaaaataaatatctcaatgtcnnnnnnnnnnnnnnnnnnnnnnnnnnnnnnnnnnnnnnnnnnnnnnnnnnnnnccccaaaatcccccggggggccccttcggcgagcacccgggttttcctgtgaacaagggggcgcccctaataagggaggcgcctgtatataaacaagacagggagccctgggcgccgcgccgagtatcacaaacggggctcgtagatggtgtgggaaaaactctgtgtgtgacgctgggagggaatctttgtgggagaagagggaaccccttaatcttgtggggggggtgggacaatattgtgggggcacaaccttttcatcctacgaaagtattataacagggtctgtaggggggacaatctttctactctttttcaagtgttgtttatgtggttggttcacctagaggtgatataattgtatgggggcctgaaaaaattttggctcagggagtagtgtttgtgggacaaattattc

SEQ ID NO: 71525 - DNA, 706 bp, Homo Sapiens
aaagatcaaagaagtctttacaacctgaatccaggtgtaaaacacactagagtagctggtgactataaataatattttaaaatgctgtgtctacaccatcaagactgtgtctacactatcttggctgaacgagaagagatgtaaatgctgggtggtcccgttgacccacggcgttgggtacaacaaaaccagccatcggagttacaccccaaagcaccatttgctgtccagctgcctgtcgtttggcccagaccaccctcagaaaaaaaccagctgcctctcccattctcccctcccgttctgccacagcggcctgggctggtccagtgctatgcctggaggctcaacacaaaacttcccatccaaacattcagatgaactgagcgtcttacacacgcagtacagaggagcacacattaggatagaaacagtagaataaccacgggcaattaaactttaaattttctgagcagcattttggtatttaaacatttcttgtaaaaagctgagacagtttgtaagaaaagaatccttaaaatctagatttataccattttttaaagtcccacctttcaatgtttaataaaacaaaaagagaaatccttaatctaaaagctaaattatttttgaatggaaatactactgagaccattgacactggataacagtaatgatcccattaccagataagattgacaaacaggga

SEQ ID NO: 71526 - DNA, 1068 bp, Homo Sapiens
  misc_feature (1017)..(1018): n is a, c, g, or t
gaaggctgggctgggggaagaggcgtggcggcgctgtgcggcgtgcacaaaagagagctgaggggcgggggcgctgcggcacagctggtttgagcaactgaactggaaacaagatgcaggaccccaacgcagacactgaatggaatgacatcttacgcaaaaagggtatcttaccccccaaggaaagtctgaaagaattggaagaggaggcagaagaggagcagcgcatcctccagcagtcagtggtgaaaacatatgaagatatgactttggaagagctggaggatcatgaagacgagtttaatgaggaggatgaacgtgctattgaaatgtacagacggcggagactggctgagtggaaagcaactaaactgaagaataaatttggagaagttttggagatctcagggaaggattatgttcaagaagttaccaaagctggcgagggcttgtgggtcatcttgcacctttacaaacaaggaattcccctctgtgccctgataaatcagcacctcagtggacttgccaggaagtttcctgatgtcaaatttatcaaagccatttcaacaacctgcatacccaattatcctgataggaatctgcccacgatatttgtttacctggaaggagatatcaaggctcagtttattggtcctctggtgtttggcggcatgaacctgacaagagatgagttggaatggaaactgtctgaatctggagcaattatgacagacctggaggaaaaccctaagaagccgattgaagacgtgttgctgtcctcagtgcggcgctctgtcctcatgaagagggacagcgattccgagggtgactgaggctacagcttctatcacatgccgaactttcttgtgacaaattgtctggattttttaaaaaaggaaaaagcaagaatgaatccttgtggtttttagttttgtataaattatgtttcaaatctttacattttggaaataatcattgctggagattctgttaaatattttggaactcttttttttnnaaattatagtatttcctctaaaaaaaattaaaaccagccatttgtatggc

SEQ ID NO: 71527 - DNA, 736 bp, Homo Sapiens
  misc_feature (89)..(89): n is a, c, g, or t
  misc_feature (95)..(128): n is a, c, g, or t
  misc_feature (675)..(689): n is a, c, g, or t
ctcagctcctgctgctcttagggaaaggaggcctgggtcaagccagcatccccttagtaaagacccccgcagaccaccaggcattctgnacacgnnnnnnnnnnnnnnnnnnnnnnnnnnnnnnnnnnaaacttcacagcaggccagctgcagtgacttgtcatcaagagtcacctcagctgcgcccccctcccatcctttcctatgagaagccactgctttgggggcgccggctagaaaaagtagggtgcggtggccaggagggcccctgccgcgcggggggctgggtctggttgagtcgctgctttcccgagggcagcgcagggatccggggaagctgcggcagggagcgggcgccggcttcgtggctctgaggtgtaacgggggtgggctccctccctcggaggacatcgtctgtgtccaggtcagaaagtggcccaggaagggggcagtttctgtcgcgggtccggtgggggcgcggccgcggtgcggtcggtgcagcgtggccaatgcgcggcgcgcgcgggggacagagcaggaggcggtctgtcacctcggccactgctgacctgggctggcctcccccagccctcccgtggcggagccggcagcgatgctacaggcctaagttattgtttgcataaaaagaatcatgttccctgtgtacatttaagnnnnnnnnnnnnnnncggaaatgtcagaattgtatggaaataaaacttgtttgaaaatttgg

SEQ ID NO: 71528 - DNA, 752 bp, Homo Sapiens
ggcacgagggtccaacggcagcgggaatggttctgacagtgaaatggacaccagctctctagagcgagggcgcaaggtttccatcgtgagcaagccagtgctgtacaggacgagatgcacccggctggggcggtttgctagttaccggaccagcttcagcgtggggagtgatgatgagctggggcccatccggaagaaagaggaggatcaggcatcccagggttataaaggggacaatgctgtcattccatacgaaacagacgaagacccgcggaggaggaatattcttcgcagcctaaggaggaacactaagaaaccaaagcccaaaccccggccatccatcaaaaaggcaacctgggagagtaactattttggggtgcccttaacaactgtcgtgactccagagaagccgatccccatttttattgaaagatgtattgagtacattgaagccacaggactgagcacggaaggcatctaccgggtcagcgggaacaagtctgagatggagagtctgcagagacagtttgatcaagaccacaacctggacctggcagagaaagactttacggtgaataccgtggctggtgccatgaagagctttttctcagaactgcctgaccccctggtcccgtataacatgcagatcgacttggtggaagcacacaaaatcaacgaccgggagcagaagttgcatgcccgccatgcgtggattgccagctggcaatccacgcatggctggctggaggagt

SEQ ID NO: 71529 - DNA, 247 bp, Homo Sapiens
ccatctgcttctggcccaccttgatgagacctgatttcagcactatggacgccctcacagccacgcgcacctaccagacaatcattgaactctttatccagcagtgccccttcttcttctacaatcggcccatcaccgagccccccggcgccaggcccagctccccctctgccgtggcttccaccgtccccttcctcacttccacgcctgtcacaagtcagccgtcgcccccacagtcgcctccacc

SEQ ID NO: 71530 - DNA, 594 bp, Homo Sapiens
caggggcctgcagggtctgggtgggtctcccaggagaggaatactgagtgggagatcggctgtctggagtgttctgatgcaagtctctctctcctgagcctcctcttgatgcaagctctaaagggagaagtcaggccctgcctctccagggtatagacggcctgctaggccccagttcttcctccttccccctttcccaggaaaggccagccccagtccatggccttcttgggcctctgggcacagagccaatgttcgtcattgcagctctcagcaaactgggtcatagctttccccacagctcagcctggggcctgggcagggctcccagcctgcaccgcctcccactgccagtggggcatgattctctcaggcttctgccccgaggccttcgtcgtcctcagggtctggacttggtcagtggcctttcaccagtggagctgccttcccagggagaaggagccgtgcgccagggcagggcccgtgccttagacttctcccgacccccagagcgctggtacacaggtctaggcaccacacagtgctttggaaattctcagtgaatgatgtttaataaagcaaaaaatgtcaaaa

SEQ ID NO: 71531 - DNA, 611 bp, Homo Sapiens
  misc_feature (35)..(35): n is a, c, g, or t
attaatttaaaagactgaattctaaactaattatnggtactagagggccagttttatctttcattaagaattgcttgctgaattttaaagtttttttcatacaatttatcatagcatttaagtatctttctataacatagatactaacagttttgggagaatgccactggtaactggaaaggggagaaacagatctctcaggatgataaaaattagcactttacagactttcaagtagacctaaacttttaaacaaaagtactcaaggcttttaaggaagcagctctgtgattagctactgaccaagaccctcctatcactggtgtctaatccctatgttacagatgaagacacaggtttagtactttgcccatatagttaaattagtgacagagataggccataagcccacatttgtcttcagtcaaagctttcactcctgtccctgttccactcctgtatacctgaggtccccaacataaactttagatcaggcttagtggtcagcattcctagtacttggaaagttggtattttttacaacagatatatgtaaacatataaaaatttcaaaatgaatgaaaaacagtgactaaatgttccacttcaaa

SEQ ID NO: 71532 - DNA, 934 bp, Homo Sapiens
  misc_feature (42)..(42): n is a, c, g, or t
  misc_feature (692)..(751): n is a, c, g, or t
gagccagccaactgcaccaacgaactgtacatgatgatgagngactgttggcatgcagtgccctcccagagaccaacgttcaagcagttggtagaagacttggatcgaattctcactctcacaaccaatgaggaatacttggacctcagccaacctctcgaacagtattcacctagttaccctgacacaagaagttcttgttcttcaggagatgattctgttttttctccagaccccatgccttacgaaccatgccttcctcagtatccacacataaacggcagtgttaaaacatgaatgactgtgtctgcctgtccccaaacaggacagcactgggaacctagctacactgagcagggagaccatgcctcccagagcttgttgtctccacttgtatatatggatcagaggagtaaataattggaaaagtaatcagcatatgtgtaaagatttatacagttgaaaacttgtaatcttccccaggaggagaagaaggtttctggagcagtggactgccacaagccaccatgtaacccctctcacctgccgtgcgtactggctgtggaccagtaggactcaaggtggacgtgcgttctgccttccttgttaattttgtaataattggagaagatttatgtcagcacacacttacagagcacaaatgcagtatataggtgctggatgtatgtaannnnnnnnnnnnnnnnnnnnnnnnnnnnnnnnnnnnnnnnnnnnnnnnnnnnnnnnnnnngattttaaatggatgtcccaatgcacctagaaaattggtctctctttttttaatagctatttgctaaatgctgttcttacacataatttcttaattttcaccgagcagaggtggaaaaatacttttgctttcagggaaaatggtataacgttaatttattaataaattggtaatatacaaaac

SEQ ID NO: 71533 - DNA, 1277 bp, Homo Sapiens
  misc_feature (483)..(483): n is a, c, g, or t
cagtcgacggtaccggacatatgcccgggaattcggccattacggccgggggcccgcggcggccatctttactcatggcactctactccctcctgccacacaaggagctacgcttcatcatctatgccttccccatgctcaacatcacggctgccagaggctgctcctacctgctgaataactataaaaagtcttggctgtacaaagcggggtctctgcttgtgatcggacacctcgtggtgaatgccgcctactcagccacggccctgtatgtgtcccatttcaactacccaggtggcgtcgcaatgcagaggctgcaccagctggtgcccccccagacagacgtccttctgcacattgacgtggcagccgcccagacaggtgtgtctcggtttctccaagtcaacagcgcctgggaggtacgacaagagggaggatgtgcagccggggacaggcatgctggcatacacacacatcctcatnggaggcggcaccctgggctcctggccctctacagggacacacaccgggtcctggccagcgtcgtggggaccacaggtgtgagtctgaacctgacccaactgccccccttcaacgtccacctgcagacaaagctggtgcttctggagaggctcccccggccgtcctgagggggaccaggcagccctcagcagccacaggccttccaggagctgttatcactaccagtttctggcacaattccagcacaattatgacaattcagagaagcaagtcaaaggactgggcacctgcctctgacagacaccagaccaggtccagggcctcctccacagcctcagctggggctctcagcaccaaagaacgaggggcccaggtcttgttggcaccccgggagccactgcccagggtgatggtggccagctcagggcttcctgcgggtgactgtcgcccagaccaggtgccattcatgactaatcaggagcagcgggctcacccaggcacctgtctgccaggaggccacgtgtgtcctgcccacccagggggagctgtattttggcagcaccccacgcttgctgcccgagggcctcttggggcacctaagacagcaccccctctcaggggagaccatggtggccccggccgcacccccccaccctggtgccaccactgcaacttttgtattcacaggcatcccatctccatcacagataaaatcttaggagataaacacattcaaaaaggaatgagataaaaagaataaggcaataaatgttgattggaacctctcaagactc

SEQ ID NO: 71534 - DNA, 1942 bp, Homo Sapiens
ggaattcccgggatcagcgatgcctgcccggctgttggggtggcggtgacgacaggcagcaaaagaccagctggtcccagattcgctgctggagtgctggatggagcctttctctgccctctgtgacatttccaattttagataatgcctcacatctctgtccccccgggaccccctggagcccccatgatccctaagaagacagcttgaacctagaattcccctctccctccctagatctcacccccaggatgttgcggaggctgctggagcggccttgcacgctggccctgcttgtgggctcccagctggctgtcatgatgtacctgtcactggggggcttccgaagtctcagtgccctatttggccgagatcagggaccgacatttgactattctcaccctcgtgatgtctacagtaacctcagtcacctgcctggggccccagggggtcctccagctcctcaaggtctgccctactgtccagaacgatctcctctcttagtgggtcctgtgtcggtgtcctttagcccagtgccatcactggcagagattgtggagcggaatccccgggtagaaccagggggccggtaccgccctgcaggttgtgagccccgctcccgaacagccatcattgtgcctcatcgtgcccgggagcaccacctgcgcctgctgctctaccacctgcaccccttcttgcagcgccagcagcttgcttatggcatctatgtcatccaccaggctggaaatggaacatttaacagggcaaaactgttgaacgttggggtgcgagaggccctgcgtgatgaagagtgggactgcctgttcttgcacgatgtggacctcttgccagaaaatgaccacaatctgtatgtgtgtgacccccgggggaccccgccatgttgccgttgctatgaacaagtttggatacagcctcccgtacccccagtacttcggaggagtctcagcacttactcctgaccagtacctgaagatgaatggcttccccaatgaatactggggctggggtggtgaggatgacgacattgctaccagggtgcgcctggctgggatgaagatctctcggccccccacatctgtaggacactataagatggtgaagcaccgaggagataagggcaatgaggaaaatccccacagatttgacctcctggtccgtacccagaattcctggacgcaagatgggatgaactcactgacataccagttgctggctcgagagctggggcctctttataccaacatcacagcagacattgggactgaccctcggggtcctcgggctccttctgggccacgttacccacctggttcctcccaagccttccgtcaagagatgctgcaacgccggcccccagccaggcctgggcctctatctactgccaaccacacagccctccgaggttcacactgactcctccttcctgtctaccttaatcatgaaaccgaattcatggggttgtattctccccaccctcagctcctcactgttctcagagggatgtgagggaactgaactctggtgccgtgctagggggtaggggcctctccctcactgctggactggagctgggctcctgtagacctgaggggtccctctctctagggtctcctgtagggcttatgactgtgaatccttgatgtcatgattttatgtgacgattcctaggagtccctgcccctagagtaggagcagggctggaccccaagcccctccctcttccatggagagaagagtgatctggcttctcctcggacctctgtgaatatttattctatttatggttcccgggaagttgtttggtgaaggaagcccctccctgggcattttctgcctatgctggaatagctccctcttctggtcctggctcagggggctgggattttgatatattttctaataaaggactttgtctcgcaaa

SEQ ID NO: 71535 - DNA, 1365 bp, Homo Sapiens
atgcgctagagcggtccgcaacgctgtagcctgcgtaaggaacaattgatactaagtggcactaggctgcagggggtgccactgacacactgggagagggctcagccaaccacaaggtgataacgaggtcagcggagcaccagaaaccggctcactagcctcctgatcagtctcggcccagaggaaaatgaagggcttgagcttctgcttttacaaatctgaggggcaggaaatgaaatcccactagcagtctgcgtagtggagttgaaccctagcacccgctccccagggggtcgcctacaacgcgttccaggtgggcaggctcaggcgctgctccctcacaagcccccggccacgcggtgtctgggaccgggtgcctagtcagcccgggtggctccgccccgaggccccgccccatgacgcgagaccccgcccccgcagcgcccgcttccaagatggcggcagcgatgcctgcccggctgttggggtggcggtgacgacaggcagcaaaagaccagctggtcccagattcgctgctggagtgctggatggagcctttctctgccctctgtgacatttccaattttagataatgcctcacatctctgtccccccgggaccccctggagcccccatgatccctaagaagacagcttgaacctagatctcacccccaggatgttgcggaggctgctggagcggccttgcacgctggccctgcttgtgggctcccagctggctgtcatgatgtacctgtcactggggggcttccgaagtctcagtgccctatttggccgagatcagggaccgacatttgactattctcaccctcgtgatgtctacagtaacctcagtcacctgcctggggccccagggggtcctccagctcctcaaggtctgccctactgtccagaacgatctcctctcttagtgggtcctgtgtcggtgtcctttagcccagtgccatcactggcagagattgtggagcggaatccccgggtagaaccagggggccggtaccgccctgcaggttgtgagccccgctcccgaacagccatcattgtgcctcatcgtgcccgggagcaccacctgcgcctgctgctctaccacctgcaccccttcttgcagcgccagcagcttgcttatggcatctatgtcatccaccaggctggaaatggaacatttaacagggcaaaactgttgaaacttggggtgcgagaggccctgcgtgatgaaaaagtgggactgcctgttccttgcacgatgtgggacctcttggccagaaaaatgaccacaaaccgggatgtggggggaacccccgggggaccccgccatggtttgccggttcctaataaacaaggttgg

SEQ ID NO: 71536 - DNA, 858 bp, Homo Sapiens
  misc_feature (694)..(694): n is a, c, g, or t
gaatctgacaaaaatgtctcatttagttctgatatttctttttgatgttgttccttaagactctgtacttctctgttatgctgttctacagtatagcaaaactgtttatttaaacctgctagctcagattttaatttttcaattacacagccctgttcttctttagctagtaataattcattaattttaaactctaagtcttcccgttcatgaaaaaactcatcctttatatgttgagcatccatttcaagttttaacttaagattattcatataagttacctcatcttttaagatactgtgttgagattcaagttcttttaaggtatcttctaagtgtttgactttttcatttactacttgttctacaaatgtattttcttgcaagagaatagaacatatctgattgtcttggtttgcatttgaggtggctttccttaaattttctaactcacattcatatttcttctggatgttcttttcacttgcctcacattgttttactaaagttctcttttagctcgttcaacctaattatctctgcctcatgttccttagctgatgcctcaatccggcaccatcaactctttcaactcctcttggtggatagccttcaactgtaaaagtcctcctggcaaccaataatattttttggtaatggctgagattagcctccatgataatttggaggtgangtaactgttttcttcttttcatcagtggtagcgtctaaatgccttttgcgatataaaatttggctccccaaggccgggccaattttctcaaaccccctcctggtagtttttaaaaataactcagagttgttctggaattaaagttgttctgaagaatccaattg

SEQ ID NO: 71537 - DNA, 598 bp, Homo Sapiens
aggctttctatgcctggggtgaggcaaattgattaataactgtgggaggagggtggagggtgcataagccatctgtcattgctaaccgcctcctgtggacaataggaccatgatttccaagtgtccttcactaacttaagctgggggggaaaaaaactataaaggctacagatataaatctgaatggcatattgtacatgtagaaatttgtggtgttcactttttatcagaactaaatccggattctggggctggaggacagataaagcagaagttgttaatggttacgaagcaaaggtaaaaggaaactcttaaaataagatttaatatagctatttagcttctatgcaaatgaggaatctgttcccatttttttcatgcatctgtgccatggagatgctctggggaatgagaactgtctaatgtgtctctcacttggatgtttgattttgtcttatttgactttcagaaaatgggatagcatgccctgaggaggtctgtagctatgctaaagagaaacaatatggtagagaaatgagtacaggtaccagttgttctggtaggaatgacaagctagtcattcccttaattatttaaa

SEQ ID NO: 71538 - DNA, 1075 bp, Homo Sapiens
  misc_feature (65)..(65): n is a, c, g, or t
  misc_feature (108)..(108): n is a, c, g, or t
  misc_feature (121)..(121): n is a, c, g, or t
  misc_feature (1014)..(1033): n is a, c, g, or t
cgctatcgcggaaggtacagcctacctgctgctaccggctcagccagcagcggcgcggagacctnccgggccgagactgggcggcgacgagaccagtacgccctcctnacatgtcctcgcntgcgtcgcggggacaaataccccgtgcacctcctagtgtggaaaaacgactaccgcagtctcgagaaggagctgcaggaccagaatgtcgagcttgtgaccacacggagatcgactagtattgcatcttgctgttcccttgggacatttggaatctgctcgagtcgtactccgacataaagcagatgtgacaaaagaaaatcgccagggatggacagttttacatgaggctgtgagcactggcgatcctgagatggtgtacacagttctccaacatcgagactaccacaacacatccatggcccttgagagagttcctgagctgctccaaaaaattctcgaggctccggatttctatgtgcagatgaaatgggaattcaccagctgggtgcccttggtttctagaatatgcccaaatgatgtctgtcgcatctggaaaagtggtgccaaactgcgcgtcgatatcacattgctgggatttgaaaacatgagctggataagagggaggcgtagttttatatttaagggagaagacaactgggcggagttaatggaagtcaaccatgatgacaaagtggtcaccaccgaacgcttcgacctttcccaagaaatggagcgcctcactctggacttgatgaagccaaaaagcagggaagttgagcggcggctcacaagccctgtcattaacaccagcctcgatactaaaaatattgcttttgaaagaactaaatccggattctggggctggaggacagataaagcagaagttgttaatggttacgaagcaaaggtttacacagtaaacaatgtgaatgtgatcaccaaaatacgcacagaacatctgactcaaggagtgttctttaaaaagagaaataaatatacaattacttgctnnnnnnnnnnnnnnnnnnnncctgagcaggcggccgcaagcttattccctttagtgagggta

SEQ ID NO: 71539 - DNA, 1216 bp, Homo Sapiens
  misc_feature (1014)..(1055): n is a, c, g, or t
  misc_feature (1111)..(1162): n is a, c, g, or t
tcttctctgtgtccttagcatttgagagaagaggccaggggccttgttcatggatccctggacccaaggcagatgtccaggctttatcctcctgaggatgaggagtctgaccagcccaaatctgccctggccggcctgaccggggcaaggcagtccaagagagttcagtgaggaccagctaggctctcccaggtgcaatgtgggtgcagggccctcatgtccccctacccctgcctgtgatggagtgttctgaggggctttggcatttgctggaagcacagggagttccaaatgagagggagcttctgtggcttgagagcctctggggccttggctgccagagcacgaggcaggccaggacctggagagcccagaccctgtctccaggaggccaggaggccagatgggggccttgcctgaaagactggtccccttgatcgctggaggcatgtgggtggcaaccagggctgggcagggcttagggtgtgtgggccaaacccccctggggttggcaaagccgcctgtcaggcctcctggtgggggcccctggacacagggagcagaccctctgcctcatggggtaggagtggctgcctcctgtgttctctggatttcttctcccaacaactacaaccctggacttgcctccccaggcctcttgcctgtaaatagaagcccgcaaactgtacagatttacagaggcatcgagactgggccctgggagttgccatctgagagccgatggccccagcatcccccaggtgcctgcctggcaccacagtgaccctggcctcagcgtggcaaatgcatgtaaatatttttcgtaggcagcgtggctccagagagccccctgaagacagtgtccctccctcctgtgagtcctttctcctgtacagaacctgcctggggtgggtgggggtctgccattccctcccccaggccttccctgccccttctctcccctgtaacctgtttattaaccatacctgtcctgagttcatggccaaaaccttnnnnnnnnnnnnnnnnnnnnnnnnnnnnnnnnnnnnnnnnnncaaggcgcctgccccactgcgggtactctcctgttccagccttgtgaaggaactgnnnnnnnnnnnnnnnnnnnnnnnnnnnnnnnnnnnnnnnnnnnnnnnnnnnnaacacttcctgtgctgtgcccatttataagaggaaataaaattaagctgaaatg

SEQ ID NO: 71540 - DNA, 1948 bp, Homo Sapiens
ggggacgctcgggggaacatggcggctgcggagccggcggtccttgcgctccccaacagcggcgccgggggcgcgggggcgccgtcgggcacagtcccggtgctcttctgtttctcagtcttcgcgcgaccctcgtcggtgccacacggggcgggctacgagctgctcatccagaagttcctcagcctgtacggcgaccagatcgacatgcaccgcaaattcgtggtgcagctgttcgccgaggagtggggccagtacgtggacttgcccaagggcttcgcggtgagcgagcgctgcaaggtgcgcctcgtgccgttgcagatccagctcactaccctgggaaatcttacaccttcaagcactgtgtttttctgctgtgatatgcaggaaaggttcagaccagccatcaagtattttggggatattattagcgtgggacagagattgttgcaaggggcccggattttaggaattcctgttattgtaacagaacaataccctaaaggtcttgggagcacggttcaagaaattgatttaacaggtgtaaaactggtacttccaaagaccaagttttcaatggtattaccagaagtagaagcggcattagcagagattcccggagtcaggagtgttgtattatttggagtagaaactcatgtgtgcatccaacaaactgccctggagctagttggccgaggagtcgaggttccacattgttgctgatgccacctcatcaagaagcatgatggacaaggatgtttgccctcgagcgtctcgctcgaaccgggatcatagtgaccacgagtgaggctgttctgcttcagctggtagctgataaggaccatccaaaattcaaggaacattcagaatctaattaaggcgagtgctccagagtcgggtctgctttccaaagtataggacatttgaagaactggtatgctactcactggtgaaggacagtcaggtgaaggactgtaagcccacacaagctcttcttatctctactagaattaaaatgttaagtcaaaaacggctccttttttgcgcctcctagtgaaacttaaccagctagaccatttgagtaccagcatttagttacaaacgtcaaaggcttccggtgctgcttaccttccttttttgttaatgtgcttttatttattaaaaaaaattacaatgaagatgcctgttttgtctctactgtgtactctgatcgtatctttccaaagtgcagactcttgtgaagttttcttaaattgttcactttaaagaaaatgacgtaccaacaatgatttggcttttatattactgtaagatgttataatgttaatgtggatgtagtgcttttactttacagattgattggaataagattattgcatatgaatttacccacaggactctgaatcatgttacccactcccctcacaatgttgtccacttagtgagttgcattgatctatccgtaccaaatgatgttgaataattacatatctttcttgactatactgatttcttattttggtcactattactaaatctctgttaatattctctcttttaactgaaaagggatgggatagaagggtttgcaatgccatattattggtggagggctgttttaacatctttgaagtatggcttgctgaatatctttaccaacatcttgaatatatattctagtgtccacaagatttagcaaaaagataaagcttgggtggaatatcattttaaaatgttcatgttctgttctatattttcttcacctactctccaaatattgtaatgcaaaaagtctcagtaatgatttggtagtattaattttgtggtcattgtttctcttcgataaatttattttcattaaatacttattagagggttttgaaatgtttttcaaatatgtgaaatgtgaaactgctgtcttttatattaaagtaattaaagaaaatgt

SEQ ID NO: 71541 - DNA, 1003 bp, Homo Sapiens
  misc_feature (964)..(964): n is a, c, g, or t
ggccttttaggtcagcaaattggatcttggaaaattgttttctcttcaggaacaccagaaccccagttgggaggtttacaaatacctgccaccactccttcatgccattttattttccaattaaagcaaagcactgtgctgtgctcagataataatagtttgtaagtaaaagtttttagttttcagtgttcaggttatagaatataactgaccataaaaattacctgcaggtattttctttttatgaacttgtttttaaattaccaagtaattactggtgtcattttgttttatgacagacacacgtatctaacaaacaaacaaacagtgaccttctccatgggtcaaggacttccttacaatttctcctgagttaacttttgtgaaaataatacctaaggttttctggcttattgaggaaatttcctaacaaacaaacaaacaaacaaacagaagagaagatcattaaccactgtatactttgtgtatataataggtcagtgtaaagaaatatgatttgaggtggtgcatgcaagtaactagggtttattctatataatgaatatttatagatctgtaacatttgtttcaaaatgctgtttcatttttataaagtaccagtgtttagctgctttttatacattaaattagcaatttgaaaaactcaaatatctgaaggtattttattttcgtggtcctcatgaactcactagagattaaaagtagactcaaacaacttgaaaatttgactcttttagcataagattttaagtcttttgagggaattaattttcctttaccctatttgttcttcctaaatactaattaattttcaaagtcaggaaaataatagaaatcaaatggcttcctgcctgggtgatttatagaaggattgtataagggccttcaaacttaatttgttcactgaacaaggctatctatctatctatctccatcctgattnttttcccttgtgtataacaggttctataccgattcagca

SEQ ID NO: 71542 - DNA, 879 bp, Homo Sapiens
  misc_feature (201)..(210): n is a, c, g, or t
cagcaagcagcatatgacataagttcagccaattagatcttctcttccaaaactgtgaccacatgtaagtctggcccctgttcttctaaatgcctgggacagggcgtgcacctggcttgtaatcagtgaaatgatccttgatctgccctgaccacatttgtccatccattttgcaaatgtgacaccccaatttttcatccnnnnnnnnnnaatgcttaaaggcaaatgtattcagttcctttccatgcagcacacaataaggttatctatgtgcttatttcttttccaaatcaacagtttgggacaacctttcaggatccactcatcctccacggtcagccatcttgtaatgtgttctcataagtgtcttgcatgggggtaaaggaaccttcttgttggcctacagactggccaagtagggggtgtactgggaggagagctaaggactattgtctcttctgccaccatgaagctcatggtgccacattgacttgtaccagcagatgcttagagaagccactcagatttgccatggcagggaagaaggcatgggagaagaggaggagggactcgatgtcctatgatggagtgtagaggctgctggctggaaaaaaccaggaacaatgaacatgaggtcatcttccttaggatgccatgccaagcagaaagcctccgaaaaatcccccagttactagaacattcttcttcacaaatgacaccacctcctcagctttgctcctgacctcagtaggtatctgattgctcttacggatcttcagctgctctttggctttcttcatgtccttctccactcgttgccagtcaactttgatgtacccagtatggtttgcaagctacagtatcaccaataatgacaac

SEQ ID NO: 71543 - DNA, 1146 bp, Homo Sapiens
  misc_feature (47)..(85): n is a, c, g, or t
  misc_feature (89)..(123): n is a, c, g, or t
cagccaagctctatacatcactatagggcgctagggcggcgatagtnnnnnnnnnnnnnnnnnnnnnnnnnnnnnnnnnnnnnnnccgnnnnnnnnnnnnnnnnnnnnnnnnnnnnnnnnnnncagtcgacggtaccggacatatgcccgggaattcggccattacggccgggcgacaactgcgcgccactccgcggcctaccgcgcagatcctctacgtgtgtcctcgcgagacaagctcaccgaaatggccgcgtccagtcaaggaaactttgagggaaattttgagtcactggaccttgcggaatttgctaagaagcagccatggtggcgtaagctgttcgggcaggaatctggaccttcagcagaaaagtatagcgtggcaacccagctgttcattggaggtgtcactggatggtgcacaggtttcatattccagaaggttggaaagttggctgcaacagctgtgggaggtggattttttctccttcagcttgcaaaccatactgggtacatcaaagttgactggcaacgagtggagaaggacatgaagaaagccaaagagcagctgaagatccgtaagagcaatcagatacctactgaggtcaggagcaaagctgaggaggtggtgtcatttgtgaagaagaatgttctagtaactgggggatttttcggaggctttctgcttggcatggcatcctaaggaagatgacctcatgttcattgttcctggttttttccagccagcagcctctacactccatcataggacatcgagtccctcctcctcttctcccatgccttcttccctgccatggcaaatctgagtggcttctctaagcatctgctggtacaagtcaatgtggcaccatgagcttcatggtggcagaagagacaatagtccttagctctcctcccagtacacccccctactttggccagtctgtaagcccaacaagaaaggttccttttaccccccatgcaagaacactttatgagaaacacaattacaagaatgggctgaaccgtgaaaggattgaattgaatcccggaaagggttgtccccaaactgttggattttgggaaaagaaattaagccccttagattaacccttattggggggcctgccatgggaaaaggaactt

SEQ ID NO: 71544 - DNA, 497 bp, Homo Sapiens
  misc_feature (24)..(24): n is a, c, g, or t
  misc_feature (75)..(75): n is a, c, g, or t
  misc_feature (399)..(399): n is a, c, g, or t
gctaagctgggcaggctgggcgtngaccggggtctcctcactcacctccaagctgatccgttcgcacccaaccantgccccaacagaaaccaacattccccaaagacccacgcctgaaggagttcctgccccagcccccacccctgttcctgccacccctacaacctcaggccactgggagacgcaggaggaggacaaggacacagcagaggacagcagcactgctgacagatgggacgacgaagactggggcagcctggagcaggaggccgagtctgtgctggcccagcaggacgactggagcaccgggggccaagtgagccgtgctagtcaggtcagcaactccgaccacaaatcctccaaatccccagagtccgactggaagcagctgggaaactngagggctccttgggaacaggggcttggcaaggagccaaagcttcccaaggaagcaaccttcttgaccggtacaccggcttggccaagcgaagtataaa

SEQ ID NO: 71545 - DNA, 2693 bp, Homo Sapiens
ggcctgggtggcgaattcggcacgagggccccggctcgggcggccggaggacccggagctaaggcgcccgaacccgcggcggcggtggggacgatgtggttctttgcccgggacccggtccgggactttccgttcgagctcatcccggagcccccagagggcggcctgcccgggccctgggccctgcaccgcggccgcaagaaggccacaggcagccccgtgtccatcttcgtctatgatgtgaagcctggcgcggaagagcagacccaggtggccaaagctgccttcaagcgcttcaaaactctacggcaccccaacatcctggcttacatcgatggactggagacagaaaaatgcctccacgtcgtgacagaggctgtgaccccgttgggaatatacctcaaggcgagagtggaggctggtggcctgaaggagctggagatctcctgggggctacaccagatcgtgaaagccctcagcttcctggtcaacgactgcagcctcatccacaacaatgtctgcatggccgccgtgttcgtggaccgagctggcgagtggaagcttgggggcctggactacatgtattcggcccagggcaacggtgggggacctccccgcaaggggatccccgagcttgagcagtatgaccccccggagttggctgacagcagtggcagagtggtcagagagaagtggtcagcagacatgtggcgcttgggctgcctcatttgggaagtcttcaatgggcccctacctcgggcagcagccctacgcaaccctgggaagatccccaaaacgctggtgccccattactgtgagctggtgggagcaaaccccaaggtgcgtcccaacccagcccgcttcctgcagaactgccgggcacctggtggcttcatgagcaaccgctttgtagaaaccaacctcttcctggaggagattcagatcaaagagccagccgagaagcaaaaattcttccaggagctgagcaagagcctggacgcattccctgaggatttctgtcggcacaaggtgctgccccagctgctgaccgccttcgagttcggcaatgctggggccgttgtcctcacgcccctcttcaaggtgggcaagttcctgagcgctgaggagtatcagcagaagatcatccctgtggtggtcaagatgttctcatccactgaccgggccatgcgcatccgcctcctgcagcagatggagcagttcatccagtaccttgacgagccaacagtcaacacccagatcttcccccacgtcgtacatggcttcctggacaccaaccctgccatccgggagcagacggtcaagtccatgctgctcctggccccaaagctgaacgaggccaacctcaatgtggagctgatgaagcactttgcacggctacaggccaaggatgaacagggccccatccgctgcaacaccacagtctgcctgggcaaaatcggctcctacctcagtgctagcaccagacacagggtccttacctctgccttcagccgagccactagggacccgtttgcaccgtcccgggttgcgggtgtcctgggctttgctgccacccacaacctctactcaatgaacgactgtgcccagaagatcctgcctgtgctctgcggtctcactgtagatcctgagaaatccgtgcgagaccaggccttcaaggccattcggagcttcctgtccaaattggagtctgtgtcggaggacccgacccagctggaggaagtggagaaggatgtccatgcagcctccagccctggcatgggaggagccgcagctagctgggcaggctgggccgttgaccggggtctcctcactcacctccaagctgatccgttcgcacccaaccactgccccaacagaaaccaacattccccaaagacccacgcctgaaggagttccgccccagcccccacccctgttcctgccacccctacaacctcaggccactgggagacgcaggaggaggacaaggacacagcagaggacagcagcactgctgacagatgggacgacgaagactggggcagcctggagcaggaggccgagtctgtgctggcccagcaggacgactggagcaccgggggccaagtgagccgtgctagtcaggtcagcaactccgaccacaaatcctccaaatccccagagtccgactggagcagctgggaagctgagggctcctgggaacagggctggcaggagccaagctcccaggagccacctcctgacggtacacggctggccagcgagtataactggggtggcccagagtccagcgacaagggcgaccccttcgctaccctgtctgcacgtcccagcacccagccgaggccagactcttggggtgaggacaactgggagggcctcgagactgacagtcgacaggtcaaggctgagctggcccggaagaagcgcgaggagcggcggcgggagatggaggccaaacgcgccgagaggaaggtggccaagggccccatgaagctgggagcccggaagctggactgaaccgtggcggtggcccttcccggctgcggagagcccgccccacagatgtatttattgtacaaaccatgtgagcccggccggcccagccaggccatctcacgtgtacataatcagagccaccaataaattctatttcacaccccttgtgccgggctcagtctagcccctgggag

SEQ ID NO: 71546 - DNA, 1023 bp, Homo Sapiens
gatgtgcaaagatgtttataagaagaaaaaactaaaagcaagtcaaatgtcccagtaacatggcaggtgtgagtcgcagcacggcgccgccgaggagaccaaacccacccacggcatgagcgtgagtcgctgcaaagggcaaaggtgtgcgccacaaagcaccagagacccccaggcccctgcggcctggcctggcacagccttgctttgcagccccggagaggcagggcctggacctcaccctggcctccacctgccaccacgctgttcccgccaccctgaatgcccccttccaggcatccctgaccagcacagcctcaccccaggggagcccgacaccctccgccatctgctgcctggcacacgacgtgagccacgggcactgaggttaccacagggtccacagctccagagcttcccagagccaaccccaggcccgccccgcgcttgcccggtgatcaggtgagtctgcgagcctgcggggagaatccttgggcgcccatgtcagggttcaaggggtgggcgtcatgagagcaggaccaggcacccaggggccccagccgcaccagctctcattcctgccccgccacaggcaggcagcccagctggcgtccaaacctccttcacgggctccagggaaagtggctacctcggagcccaggcccaggggaccttggaaagatagaccgccattgtacagctccagggaaaatcagaatcgtccctaaggagtctcaagaaagcacccctcagcaagatggagccccaggtcctggaagagccacgagctgttctgcaagatggagccccaggtcctggaagagccacgagctgttctgcaagatggagccccaggtcctggaagagccacgagctgttctgcaagacggagccccaggtcctggaagagccacgagctgttctgcccgaaagggcagagggccggagaagccagtcctgggggaggaggtcggggccactcaccagggccttcctaacgttccgtccgggcgcgtctgtgag

SEQ ID NO: 71547 - DNA, 689 bp, Homo Sapiens
  misc_feature (519)..(519): n is a, c, g, or t
ctgctaatatccaaagtttatcatagctatgacaatatcagtcccaaccaggttacaagtttgttacaaattacaaactacttaaaaacagttttgaaaaaaaatatatcccaaatattaacactaaacactaccctggagttagaaaaactgtaaatgggatgaggaaactgaggtaccagtggtgacataaggcctttttgtctgacagactgttttctgaagtcagtgtaggatgtagtctaacagacctccagaagaataattcttccaactaccaaatcagcacactgagacattaaaatactcaaatcagaataaggaccgaccctaagtttaaatgtgtatttggattaacatttttcagcaggagtgtatgaagaggggagaggatacaagtcaaagactgggtagtcaggccccctgtcccttgcagaatcccttacactcaccaaacagaatattaaagcaagagctacccaataagaagagactaaagaccccaactcactccttttngtgttgggcagaagaacctgggctgtgagtcaagaaaagcttcccagggaaactaagaaaaatgttttaattatgtagcttgcacataatggtactcaaggcacctcccaggaaacatctaatccatgctcaaggattctggaaatgcaaatcatcctcacaggatcatc

SEQ ID NO: 71548 - DNA, 685 bp, Homo Sapiens
gatgcagcaatagatgaatggctatctctgaatttgtaagagataattcacatgaggattaagataaaatgggaagtaaaatctaacaaacacaaagatagctcccaggcactgctttgtgtagtttgacagcattgtggttgtagcagcaaaggacttaaagtgatagtttttaaaccatattctgtccctaagtaataaaaaatctaggaagttactaaaataccagatttgttctgctctgcctcatctagaatcaacgtctaactaacttaaatgaagtataataaatgagttcatatgaaaaggcttcctctatggacacttagatatattgtaactattgaagttacatgggatgtgggggtggtgggagagaggacctgcctcccaaggacatctatgactaaggcctggctttagttatggagagagacgtagaagttgaattttacacccaaaattgatgtgactgaagaggaactgattgttgctaaccagctcacaagaatccagtattgagaccagttcactagaagaaacaaacatttctgccatgcagaccaaaaagttattagttggtgaatatgtattttctctttggaaggtctttaaggggagcaaaccagttttaatcaatcagattgcttggtaagtttggaatctgcaatcagttggtcttaaa

SEQ ID NO: 71549 - DNA, 877 bp, Homo Sapiens
ttacgggcatatcgtcgaccacgcgtcggattctcgcctggcgcggctggggaaggtgaacagtgtggcccgccatgttcttctccgcggcgctccgggcccgggcggctggcctcaccgcccactggggaagacatgtaaggaatttgcataagacagctatgcaaaatggagctggaggagctttatttgtgcacagagatactcctgagaataaccctgatactccatttgatttcacaccagaaaactataagaggatagaggcaattgtaaaaaactatccagaaggccataaagcagcagctgttcttccagtcctggatttagcccaaaggcagaatgggtggttgcccatctctgctatgaacaaggttgcagaagttttacaagtacctccaatgagagtatatgaagtagcaactttttatacaatgtataatcgaaagccagttggaaagtatcacattcaggtctgcactactacaccctgcatgcttcgaaactctgacagcatactggaggccattcagaaaaagcttggaataaaggttggggagactacacctgacaaacttttcactcttatagaagtggaatgtttagggggcctgtgtgaacgcaccaatggttcaaataaatgacaattactatgaggatttgacagctaaggatattgaagaaattattgatgagctcaaggctgggcaaaatcccaaaaacaggggccagggagtggacgctttctcttgtgagccaacctggaggtcttaccctcctttgactgaacccccccaagggaacctggaatttggggtacaaacagggcctttaattttaatatggaaactggaataattgtccctaaagaaaaaaa

SEQ ID NO: 71550 - DNA, 1042 bp, Homo Sapiens
  misc_feature (854)..(854): n is a, c, g, or t
  misc_feature (856)..(861): n is a, c, g, or t
tggaccggtccggaattcccgggatgtgaacagtgtggcccgccatgttcttctccgcggcgctccgggcccgggcggctggcctcaccgcccactgggggaagacatgtaaggaatttgcataagacagctatgcaaaatggagctggaggagctttatttgtgcacagagatactcctgagaataaccctgatactccatttgatttcacaccagaaaactataagaggatagaggcaattgtaaaaaactatccagaaggccataaagcagcagctgttcttccagtcctggatttagcccaaaggcagaatgggtggttgcccatctctgctatgaacaaggttgcagaagttttacaagtacctccaatgagagtatatgaagtagcaactttttatacaatgtataatcgaaagccagttggaaagtatcacattcaggtctgcactactacaccctgcatgcttcgaaactctgacagcatactggaggccattcagaaaaagcttggaataaaggttggggagactacacctgacaaacttttcactcttatagaagtggaatgtttaggggcctgtgtgaacgcaccaatggttcaaataaatgacaattactatgaggatttgacagctaaggatattgaagaaattattgatgagctcaaggctggcaaaatcccaaaaccagggccaaggagtggacgcttctcttgtgagccagctggaggtcttacctctttgactgaaccacccaagggacctggatttggtgtacaagcaggcctttaatttatattgaactgtaaatatgtcactagagaaataaaatatggacttccaatcttccnannnnnncacgcccccccacaaaccacccttgtgggcccgcctccgcccctccaaaaagtttctaaaaccattcctttgggcccccgggcccccgaaagggaaaagggaaaatggccctaacctggttccctaaggaaaacccggggccaggacataagggttgggaatccccccccataaaaaaacg

SEQ ID NO: 71551 - DNA, 690 bp, Homo Sapiens
ctgagcgcggtgctgactggcaccgggcacgaggaaagtggaggccgtgctgtcccgctccaacccagggcgtggcccgcgtagactccggtggctacgagcctgagggcctggagaataagccggtggccgagagccagcccagcccgggcaccctgggcgtcttcagcctcatcctgccgctgcaggccggggacacggtctgcgtcgacctggtcatggggcagctggcgcactcggaggagccgctcaccatcttcagcggggccctgctctatggggacccagagcttgaacacgcgtagactggggtcccgcccgacgtgtctacgtcggctgaagagacagcgggggcggcgggctcctggggtctcgcctgagacggggcacctagccctgggcgagcgccgcacccgggcccgcagcggcaccgcgcccagagcggcctctccccacgcccggggcgcgccggctcagggaggctcggggccgcccatgcagacttttggcctggcgcgatcccccaagaacccctccagggccggcctgcggaggagccgatcctcgcaccctccgctccctccactggccctccaggtcgattccctgggctccaggctcccccgcgcgggcgccgcccaccgccatactaaacgatcgaggaataaagacacttggtttttctaaaaa

SEQ ID NO: 71552 - DNA, 1708 bp, Homo Sapiens
  misc_feature (106)..(106): n is a, c, g, or t
  misc_feature (231)..(231): n is a, c, g, or t
  misc_feature (533)..(551): n is a, c, g, or t
  misc_feature (967)..(1028): n is a, c, g, or t
  misc_feature (1046)..(1060): n is a, c, g, or t
  misc_feature (1063)..(1127): n is a, c, g, or t
  misc_feature (1178)..(1187): n is a, c, g, or t
  misc_feature (1276)..(1276): n is a, c, g, or t
  misc_feature (1461)..(1461): n is a, c, g, or t
  misc_feature (1513)..(1513): n is a, c, g, or t
  misc_feature (1605)..(1605): n is a, c, g, or t
  misc_feature (1613)..(1613): n is a, c, g, or t
  misc_feature (1657)..(1657): n is a, c, g, or t
  misc_feature (1673)..(1673): n is a, c, g, or t
  misc_feature (1679)..(1679): n is a, c, g, or t
gagcgctgcatcactgcctctatggtgacaagtattcacagacctggagacttcagtggatgcccgtacacatcattactccgtgttgcagaaagattgtctcaantcatggattcttcttccatcctcagtagcggtgtatatcacatcccaccaggcgtcttcagatattaagcctgcgtcattgaacggaaagaggccaagcgatggccgctctctcctctcccctcntcaagaggaggcagatagaaactgggacggattcaagtcacatgcacgcggatagcagtaagccacacacctgccacttagccagaatgcccaggatcgcgttggtcactgttatttgcctactgctggaagaaggacaaccgctggcaaggtagcgttccccaatctgaatacctgcaggctcccacatgagggagagggcagactcaggtgggaagatgtgccatgcgtaaggcatcaacgtgtatctgtgggatcttcgttgccttcagtaatcagggtgtgaaaaaagcagacaagtnnnnnnnnnnnnnnnnnnnctaagaaaacttgtgtgcttttcaaaaaggcagtgctaagcacaagatttcaagaaagcctcttcttgttgcctagctgagtgggagagtcattttccccagacactacatttggatacaggtgccaaagaacattattaaggaattatttagaaacaatgtgtctagtttaagaaagtggttttcagtattgtgacaatacaacgtttttacaaggttgttttctaccaccatattttaaagatatttttatgaccgtgtatactcacactttgcttgtattttaaaaggaggatatatttgcacttatgtatacttttacagtttgccaaaatattttgttgtaaaatttttttcaataaaatgtatataaccccccccacccaatcctccactacccattccccctccgcttnnnnnnnnnnnnnnnnnnnnnnnnnnnnnnnnnnnnnnnnnnnnnnnnnnnnnnnnnnnnnngtttcccctccttctttnnnnnnnnnnnnnnnttnnnnnnnnnnnnnnnnnnnnnnnnnnnnnnnnnnnnnnnnnnnnnnnnnnnnnnnnnnnnnnnnnttctccagatcttccctctattcaccttccccgttgcgggcgccgcgccgnnnnnnnnnngtttatatcccctaccattcgcgcccctttctgtcctgttcccctcaccacactttccccgttctctcccctgtcttccgcttgcgctncctctccccctcaaccaacaccaatactccccccgtgggggcacaccccgtcccgttttgttttagcaaaccttctttcccactttgttgtacccccttgccctaacatccctacccgcgttgtctactccacatataccacctgcgccctcattcccgctccgccgatctcgctatccgcactntctattattatctcgcacgcgtcttcactccggtttggcctatcacctcgantcgcccctatatcgcgcctgtatgccctaatatctccgcattcacctcgtctctccctcgcgccttctgacgattgacgaggcagccgcgcntctctctnatatcaccacgcctctgtagtcgagcataacctagcccacatcnccgtttgtaggtcggnatgctngtctcgattcgcgcgctcgctgcttctcg

SEQ ID NO: 71553 - DNA, 944 bp, Homo Sapiens
  misc_feature (800)..(800): n is a, c, g, or t
  misc_feature (812)..(812): n is a, c, g, or t
gtgtcggtggcctacatcgcgggcttcgtgctccaggagcgcgtggtgtgcaacgagcgcttctccgaggacggttaccgcacggtggtgcagggcaccaagaaggagggctgcaccatcctcttcatgatgctctacttcttcagcatggccagctccatctggtgggtcatcctgtcgctcacctggttcctggcagccggcatgaagtggggccacgaggccatcgaggccaactctcagtacttccacctggccgcctgggccgtgccggccgtcaagaccatcaccatcctggccatgggccagatcgacggcgacctgctgagcggcgtgtgcttcgtaggcctcaacagcctggacccgctgcggggcttcgtgctagcgccgctcttcgtgtacctgttcatcggcacgtccttcctcctggccggcttcgtgtcgctcttccgcatccgcaccatcatgaagcacgacggcaccaagaccgaaaagctggagcggctcatggtgcgcatcggcgtcttctccgtgctctacacagtgcccgccaccatcgtcatcgcttgctacttctacgagcaggccttccgcgagcactgggagcgctcgtgggtgagccagcactgcaagagcctggccatcccgtgcccggcgcactacacgccgcgcatgtcgcccgacttcacggtctacatgatcaaatacctcatgacgctcatcgtgggcatcacgtcgggcttctggatctggtcgggcaagacgctgcactcgtggaggaagttctacactcgcctcanccaacagccgancacggtgagacctaccgtgtgagggacgcctcccaggccggaaccggcgcggcgctttcctccgccccgagggtggggcccctacaggactccgtattttatttttttaaataaaaaacgatcgaaaccatt

SEQ ID NO: 71554 - DNA, 1141 bp, Homo Sapiens
  misc_feature (121)..(121): n is a, c, g, or t
  misc_feature (131)..(131): n is a, c, g, or t
  misc_feature (150)..(150): n is a, c, g, or t
  misc_feature (244)..(244): n is a, c, g, or t
  misc_feature (259)..(259): n is a, c, g, or t
  misc_feature (678)..(727): n is a, c, g, or t
aatgtataattgagtacattacattagtttgtaatttgtatgataataagaatgcatcattgagagcctgcatgattcctcagttcatttttacgttgttctgtaggaagcaactcactcntacaagcttncagtgcctcacattccatntacgaccgtaaatctagcgcagctgttcatctcaaagcaggtgccagcatccgttgcaatagaataacatttataacccattcttcagttctcncaacccacacaaagntcatgttcttcccaaatctcagtaaccacatctttccatgacgctggccaaacccataccaggtttagacactagagaatgaaatgagctcacccctcaaaaattagacttcaaaaagtttggcattggttatctcactcaccctgtaaccaactaaggtgggagaagggagtgtctgggcgttgaaggtgaccgtggagggaggctgagactgccagcgcccacacccgtgggcccccatgaagttggaggaaagttctggacagttaaaaatccagcttcaggaagtcgaagggacgggccttcgcaatccaccgccgagcaagggaggaattgtaatgtatgggggccctcctccagatttggaaggtttgtggagttctgtaccttaagagcccctacctcaagccaggaaagannnnnnnnnnnnnnnnnnnnnnnnnnnnnnnnnnnnnnnnnnnnnnnnnntgaccctggcagcgcagccctagtcgcaccccgcagtgctgaactcgccccggagctggcgcccagccgtcccgagcacccgtggtagggagaggcgcgcgaggacgaccaggagcgctgtgcggttgcacaccagttttagctcctttgcaatactccgaaaagggcaagaaggaaaagcctcaaatggttaaaccgccctaaataattaaaaacttttgaaaaagaaaaacgcgtgatcggtcgtcatttaaatacaaatatacttacaaaaatcttacacaggctatttacaatcataaaagcgaacagtcctggtaccagagtgtgagggcaagaggtctgtccatcctccctctggcagtcgggccctcgtgtccttttgcctcagggacggaagcttttgcaggagct

SEQ ID NO: 71555 - DNA, 1800 bp, Homo Sapiens
tgcggccgcagggccatgctagccttgcgcgtggcgcgcggctcgtggggggccctgcgcggcgccgcttgggctccgggaacgcggccgagtaagcgacgcgcctgctgggccctgctgccgcccgtgccctgctgcttgggctgcctggccgaacgctggaggctgcgtccggccgctcttggcttgcggctgcccgggatcggccagcggaaccactgttcgggcgcggggaaggcggctcccaggccagcggccggagcgggcgccgctgccgaagccccgggcggccagtggggcccggcgagcacccccagcctgtatgaaaacccatggacaatcccgaatatgttgtcaatgacgagaattggcttggccccagttctgggctatttgattattgaagaagattttaatattgcactaggagtttttgctttagctggactaacagatttgttggatggatttattgctcgaaactgggccaatcaaagatcagctttgggaagtgctcttgatccacttgctgataaaatacttatcagtatcttatatgttagcttgacctatgcagatcttattccagttccacttacttacatgatcatttcgagagatgtaatgttgattgctgctgttttttatgtcagataccgaactcttccaacaccacgaacacttgccaagtatttcaatccttgctatgccactgctaggttaaaaccaacattcatcagcaaggtgaatacagcagtccagttaatcttggtggcagcttctttggcagctccagttttcaactatgctgacagcatttatcttcagatactatggtgttttacagctttcaccacagctgcatcagcttatagttactatcattatggccggaagactgttcaggtgataaaagactgatgaaagtcatccctcactgttagtaaggaagcagtatacatcaatgggaacagggcccatggaaatgtacaggagtttccctattttggtgttcagcttgaaaaaggacttgtcagaatcaactgtgtcatcaaaatttaagtaatgtgcattgaaaataaggttgatcatgggaatatgcagaatttccaatgtatttttaaatacaaataaaattgtaatttagaatttttaatcttaggtttcttgattaatttataagagatcaattattgtcagtcttttttgtatgttttttaaaaacatagtccacagcatgggcagaattgacacctctcttttaagtgaaatttggattgctcacaaagcactaggaaatgtcatggggttcaaatatatatcctacacaactgggcaatacatttttgtttgatttttaggtctgtgtatacattaacagttcatgtaattaatacctgatcatttgggataatgaaagtgaagttagttgtagatgaagtaaagttataaaagagattaaaaatgcggtaactttttaagataataatcatacagaaggtatgaagttcattttcggtagtcttccaacctctcaggtgcctaataatttatgtttgaggataacaggtaacaaagatagtcgagataggagaacgtgtctattagtctttgcatctaaaaggcagtgagttacgttcctgccttccactgtgtttctgacatagcaatgtttgtttgatattggaacctggattcatattttatgtaaataatatcaagctgtatatttttcaaaggttttttaaactttggagactctttcttttgttaagcagttaaaggaataaaagagctgga

SEQ ID NO: 71556 - DNA, 1004 bp, Homo Sapiens
  misc_feature (87)..(87): n is a, c, g, or t
  misc_feature (191)..(191): n is a, c, g, or t
  misc_feature (219)..(219): n is a, c, g, or t
  misc_feature (231)..(231): n is a, c, g, or t
  misc_feature (247)..(247): n is a, c, g, or t
  misc_feature (252)..(252): n is a, c, g, or t
ttagaatgaccagtactagatccagcttccactctataacagccgtgatattatgtaccccaattgtgtgacatccatgaccatacntgtcagctgcgtgataccacaccactcttgacccatctggagtggactgatgggacatgagagaggatggactgtgctaggaaggtgtctctcctgcatatacncagactccagtccaaatatgggtacagncaccacccccanccgccacccatctacntcctntgtgcaggacccaagtagatgatgaaaaatgccaaacaaaggagcaaggacagagaagtacctgcaggacccacaaggcccataatggcccccatctttaaacccaactcttcccacccagatcaacatccccccaacccctgtgcccccatcatctggaccccagagccagccctcccattaccaccaccaccaccccggggctccttggctcacctttctagaacatgggtacctcctctttttgggggctcatttagactgctgcctttgctgctgacttgcagtgtgactcgggcccattgttcaatctctgtggccctgagacaccagggaaaatctccccccccacaccagacatactagttccctggcaggcaagggcttccaactgaggcagtgcatgtgtggcagagagaggcaggaagctggcagtggcagcttctgtgtctagggaggggtgtggctccctccttccctgtctgggaggttggagggaagaatctaggccttagcttgccctcctgccacccttccccttgtagatactgccttaacactccctcctctctcagctgtggctgccacccagccaggtttctccgtgctcactaatttatttccaggaaggtgtgtggaagacatgagccgtgtataatattttttttaacattttcattgcagtattgaccatcatccttggttgtgtatcgtgtaacacaaataatgatattaaaagcatcaaacaagcc

SEQ ID NO: 71557 - DNA, 1701 bp, Homo Sapiens
  misc_feature (25)..(25): n is a, c, g, or t
  misc_feature (1335)..(1477): n is a, c, g, or t
  misc_feature (1494)..(1529): n is a, c, g, or t
  misc_feature (1541)..(1553): n is a, c, g, or t
ttgttcagagagcatccacaggacntgggatgccattaatcgactctcaaatactggcagtggtttgcagtggcttactggagcccttcacttatgcagcccattaacttctcaggacatccaacatttgaaagactggatctctgaaacctgggtgaatctggcaatggtggactatccttatgcctctaactttttacagcctttgcctgcttggcctatcaaggtagtgtgccagtatttgaaaaatcccaatgtatctgattcactgctgctgcagaatattttccaagctctgaatgtatattacaattattcgggccaggtgaaatgcctgaatatttcagagacagcaactagcagtctgggaacactgggttggagctatcaggcctgcacagaagtagtcatgcccttttgtactaatggtgtcgatgacatgtttgaacctcactcatggaacttaaaggaactttctgatgactgttttcaacagtggggtgtgagaccaaggccctcctggatcactactatgtatggaggcaaaaacattagttcacacacaaacattgttttcagcaatggtgaactagacccctggtcaggaggtggagtaactaaggatatcacagacactctggttgcagtcaccatctcagagggggcccaccacttagatctccgcaccaagaatgccttggatcctatgtctgtgctgttagcccgctccttggaagttagacatatgaagaattggatcagagatttctatgacagtgcgggaaagcagcactgagaaacttttgattgttttcaatttcttcttttatgttcacaccaccacattcccattcactttgattttctacatgtaattaccttcttttgtttatcattagatttgatggggccaaagttgagatagaatagagggtgatgacggtaagagcaagtgtcccatgaatgtgatttcctgggttctcactgtctttgcaccacgtctaggaagaatcttcttgatagctctcccacaccatcagtggccctcataactggagtagagttcctggttgcttttcataagagggagagttactttctttgtatctctgcaagcagagatttctctttggttttgaggttgaagtgtctttggcccatttgtaagtccccatccctaccctacacaaagtaaaagcagaagatagataaaaaatgatgtaattgcagctggtaggatgtctggtgccaatccaggaagtgagagccatttcttttgtaccggatttaatgactttgaactgtgctgtaaataaataatacagctggaccttnnnnnnnnnnnnnnnnnnnnnnnnnnnnnnnnnnnnnnnnnnnnnnnnnnnnnnnnnnnnnnnnnnnnnnnnnnnnnnnnnnnnnnnnnnnnnnnnnnnnnnnnnnnnnnnnnnnnnnnnnnnnnnnnnnnnnnnnnnnnnnncacacgaaccctaaacnnnnnnnnnnnnnnnnnnnnnnnnnnnnnnnnnnnntttttgttgggnnnnnnnnnnnnnacaaaaaaaactttttaaacaaccttctcgtgggggcgggcgggggcccaataaaaggaaaaagagaaagtgggcgctcctttcgtgttccccccaagaaaaacacgtcgcaaaaagaaaaaacagggttgtgtaatctccacacaac

SEQ ID NO: 71558 - DNA, 1269 bp, Homo Sapiens
  misc_feature (127)..(434): n is a, c, g, or t
caacctgagaaagctgatttaaaaaataataatttttaaaaactgtaaagccttgtttctgggtctagaggtactttacatccccccaccaagtagaagcatagtggacccttcattgctcacttcnnnnnnnnnnnnnnnnnnnnnnnnnnnnnnnnnnnnnnnnnnnnnnnnnnnnnnnnnnnnnnnnnnnnnnnnnnnnnnnnnnnnnnnnnnnnnnnnnnnnnnnnnnnnnnnnnnnnnnnnnnnnnnnnnnnnnnnnnnnnnnnnnnnnnnnnnnnnnnnnnnnnnnnnnnnnnnnnnnnnnnnnnnnnnnnnnnnnnnnnnnnnnnnnnnnnnnnnnnnnnnnnnnnnnnnnnnnnnnnnnnnnnnnnnnnnnnnnnnnnnnnnnnnnnnnnnnnnnnnnnnnnnnnnnnnnnnnnnnnnnnnnnnnncaacaagaatacagttaatgcttccatgacaggccagggagatgggctggcagggactacctacgtcttcctccctgtaggtggggcagttgctcacctgggcctgagagtcttaccgtcatccttcgggcaaccccttccagatacgatgcctccagccgcatcctctgggcgatccgtagtggggcccctccttcagaaaggggcagggaccgatggcccaggacgttgttgccagagacgaagtggagctgcacagcagctgtgtcattcttgagggccagcaggccctgccacacgatggggtacttcttcagaagttgaaccatatccacgggtctctgggaagtcaggtgtggagaggaatcttgtttgggggctggctggaattcagtgtgtggcagaaccagtcctggtggggtgctggggccagaggttgttgggacaaacaacggctgttttggggcagtttgagtgggaagagagactggaaggtcaggcttcatggagacagacacaggggaggggaaggaagtcgggcctgtttctgcttgtgccctcagaacctgggtgtgaggctcaggtggcctgtttgcaggtccagctgggaggcgaggctgctctactcccgtctgggtcccctttgcctcctgggacacttgaggcatcttgctgcttggtggctggccgggctgaccgagctgggagggcgggcagggtggtgcaggctgggcaggctgtgtggactgcacaggctgaggaggctgcaggggctcaccttcaggaggagggccctgagcagctgtctggtccgggaaggcaggccaacagagga

SEQ ID NO: 71559 - DNA, 925 bp, Homo Sapiens
cggctggaccggtccggatttccgggatctggcacaacgtcctggcccatcggtccctgcccctttctgaaggagggcccccactaaggatcgcccagaggatgcggctggaggcaacgcagctggaaggggttgcccgaaggatgacggtggagacagattactgtccgctgctggctctgccctgtggccgtgaccaagaggatgttgtgagccagaccgagtccctcaaggctgccttcatcacttacctgcaggccaagcaggcggcagggatcatcaacgttcccaaccctggctccaatcagcctgcctacgtgctgcagatcttcccgccctgtgagttctctgagagtcacctgtcccgcctggcccctgacctccttgccagcatctccaacatctctccccacctcatgattgtcattgcctccgtgtgagccactgagtggttatcacctcagtgaatcttcccagggctctgcagtaaaaacaaaggacaacccagccaagcagaggaagaagctgccgaaggggacagactccactgccagacggccagccgtttgctgtcctgccgcccggctcagtcggccagacttcctctaggagtggtgctgctaccttgtatgtttacataatgctttagccccaggacacatcccccacccatggactcgcagacaccgggggctgggtttccctttcctctttttggagaaaaggaacgggccgtggaatgaacattttttgtttggtttgtctttacgaaaacagaaacccgaacttgccttttgccctaaattcagtgacttgggacttttgccccagggaaaaaacagcctggggacactctgggatttccttggcggtgtgttaaaaacccctttggcaaaactcccttaaccgcacggaagggactttc

SEQ ID NO: 71560 - DNA, 778 bp, Homo Sapiens
acagtgtaaaaatcagaccacgacaagtatggtgtcatgaggaaaaaaaatcaggcatttttccaaaggaagtgctaatgggcctatgtgacttctgagtgaagcaaaaactacccagatccattccctacaattcacatccccaaaggtcaaaaacaaactaggaggacctgggaatttcagctggagatactgattattgagttctgaagtagagtgttggaaataggcaattagagaaagtccattgatgtcattttgtttataatattgcagttcatactgaatgaccacttgatatgactaattcagggaatatatatttttctatgaaagctatgaatgttactatcacggcttttccttatttttacttgtatgtagcagcatttacagaaatgccaaaaatgtgcctcattaagaggcaggtcttaatcagttagataaaaataaaatgtatagcttaagatcaaaacagtcatatttttagatacagtgaaatcttttatgtttctctacagcaccttaaaaattagaacttgaatactttgagtaaacttactacaatctcatcccaacaaactttaatggtagcatgtttggcctatttcattgtggcctgtactaggattagaaaatttggtcgtggtataacaaagaagtgtatttacaataggatttaatttgttgttaatatgtatttgttgaaattaaaattgccagattaaatgaatatactgtcgcatctttttaacatagtaacgtgttactggaaaaa

SEQ ID NO: 71561 - DNA, 1239 bp, Homo Sapiens
cagtcgacggtaccggacatatgcccgggaattcggccattacggccgggtaatgtacaggaccatagaaaagatttatccatattatgtgaaagcacctagtgattctaactcaaaacctataaagcaacttttatctgaaaataatttcatggatattaccatcattttgtccagagacaatacaactaaatataacagtgagtggtgggttctcaacctgactggaaacagaatatacaatccgaactctcaggccctggaactggtggtcttcaatgacaaagtcagtcccccaagtctggggttcctggctggctatggtattatgggattatatgcttcagttgtccttgtgattgggaaatttgtccgtgaattcttcagtgggatttctcactccatcatgtttgaagagcttccaaatgtggatcgaattttgaagttgtgcacagatatttttttagttcgagagacaggagaactggagctagaagaagatctctatgccaaattaatattcctatatcgctcaccagagacaatgatcaaatggactagagaaaaaacaaattgaaaccttagaacacagactgcaaataatgttaacatttgaattttttttaaaagcacaatattctcataagagctaagcatttctagttcgacggaaatggtttgtttctcttctgataggtagacaaaaaggagctgatatccttctgcagtaaaagctaccttgcaagttaaggcactgttgaaaatgttatttgtaactccatttctctgaaatcagggctacttgctttatgttttagtcaacagtgtctcgcattctgattgatcatgtgaaggaatcatttatgggccccgtccctaagagaaacagaagaggagtcagaaagaaagatgcctgtgttttcctctgtggggcccgtgcacttcctggagagatgctacaatgcaatatacagcgctccatccccactggggaagctgctgtgatgagactagatgagccttcaacacactcagaaaatgcaacagcaatagggggcagacagctcctacctgtgtttctaggagcaaaagagagggaactaattgcccgtgaagacgccagtggaaggatcagcctcattctaagcaaaaacatagtattagtgatactcttactgccttatcttaaccaaggactaataggatacctttccattaaacaccagtgacttctcagga

SEQ ID NO: 71562 - DNA, 670 bp, Homo Sapiens
gggagcgacgggcgcggaggtccggccgggcgcgcgcgcccccgccacacgcacgccgggcgtgccagtttataaagggagagagcaagcagcgagtcttgaagctctgtttggtgctttggatccatttccatcggtccttacagccgctcgtcagactccagcagccaagatggtgaagcagatcgagagcaagactgcttttcaggaagccttggacgctgcaggtgataaacttgtagtagttgacttctcagccacgtggtgtgggccttgcaaaatgatcaagcctttctttcattccctctctgaaaagtattccaacgtgatattccttgaagtagatgtggatgactgtcaggatgttgcttcagagtgtgaagtcaaatgcatgccaacattccagttttttaagaagggacaaaaggtgggtgaattttctggagccaataaggaaaagcttgaagccaccattaatgaattagtctaatcatgttttctgaaaatataaccagccattggctatttaaaacttgtaatttttttaatttacaaaaatataaaatatgaagacataaacccagttgccatctgcgtgacaataaaacattaatgctaacactttttaaaaccgtctcatgtctgaatagctttcaaaataaatgtgaaa

SEQ ID NO: 71563 - DNA, 921 bp, Homo Sapiens
  misc_feature (51)..(89): n is a, c, g, or t
  misc_feature (93)..(127): n is a, c, g, or t
  misc_feature (643)..(652): n is a, c, g, or t
  misc_feature (763)..(816): n is a, c, g, or t
aaaggggcggaaaatgatagactcactatagggcgcctagctcgtcgcagnnnnnnnnnnnnnnnnnnnnnnnnnnnnnnnnnnnnnnnccgnnnnnnnnnnnnnnnnnnnnnnnnnnnnnnnnnnncagtcgacggtaccggacatatgcccgggaattcggccattacggccgggggggcgcgcgcgcccccgccacacgcacgccgggcgtgccagtttataaagggagagagcaagcagcgagtcttgaagctctgtttggtgctttggatccatttccatcggtccttacagccgctcgtcagactccagcagccaagatggtgaagcagatcgagagcaagactgcttttcaggaagccttggacgctgcaggtgaataaacttgttagtagttagacttctcagccacgtgggtgttgggccttgcaaaatgatccaagccttttcttttcattccctctctggaaaagtattccaacgtgatattccttgaagtagatgtggatgactgtcaggatgttgcttcagagtgtgaagtcaaatgcatgccaacattccagtttttttaagaaagggaccaaaaggtggggtgaattttttcctggagccccaataaagggaaaaaagcttttgaaannnnnnnnnnatttaaattggaatttaaaagtcccaaaaacccaggtttttttcccgggaaaaaaattattaaaccccaggcccccatttgggccttaattttttaaaaaccctttggcgnnnnnnnnnnnnnnnnnnnnnnnnnnnnnnnnnnnnnnnnnnnnnnnnnnnnnngaaagagaacttttaaaacccccccggtttggccccatcttcgggcgggggggcacaaataaaaaaccacctttaaatgtgccttaaacccccctttttttaaac

SEQ ID NO: 71564 - DNA, 1108 bp, Homo Sapiens
  misc_feature (629)..(637): n is a, c, g, or t
ctggaccggtccggaattcccgggatatcgtcgacccacgcgtccggtttggtgctttggatccatttccatcggtccttacagccgctcgtcagactccagcagccaagatggtgaagcagatcgagagcaagactgcttttcaggaagccttggacgctgcaggtgataaacttgtagtagttgacttctcagccacgtggtgtgggccttgcaaaatgatcaagcctttctttcattccctctctgaaaagtattccaacgtgatattccttgaagtacatgtggatgactgtcaggatgttgcttcagagtgtgaagtcaaatgcatgccaacattccagttttttaagaagggacaaaaagtgggtgaattttctggagccaataaggaacaagcttgaagccaccattaatgaattagtctaatcatgttttctgaaaacataaccagccattggctatttaaaacttgtaatttttttaatttacaaaaatatacaaatatgaagacataaacccagttgccatctgcgtgacaataaaacattaatgctaacactttttaggaagttcctgaacttcctttggtagttgaagataaagttgaaggctacaagaagaccaannnnnnnnnccgcgctcaaaaaaacccttaaggggcccaaagttacccaaaccgccttttcttgtccaaggaggcccctttaggaaggcctattttaaaataggcactggcccgccgtttaacaacccctggcattggaaaaaatggctgatttggggattcttggggaggaacctaatcttccggggggaggaactcatttggacgaactcccttactgaaaattttaaggcccctagggtcaataatagaaatttttagaagcgtaaaacggcgtttaaaactcactggcatattttctggcagattttaaaaaaatttgcccctcccgcgcttggggttttagtcgaaaatatcttttcccaggggacccccgggggctttcccatgtcgcttgggaggattttttaaaatataacccttcccccaggggttcttttttaagggcccccctcaagtcccctcaaaaaaccccgttgt

SEQ ID NO: 71565 - DNA, 791 bp, Homo Sapiens
  misc_feature (566)..(570): n is a, c, g, or t
  misc_feature (573)..(575): n is a, c, g, or t
  misc_feature (577)..(581): n is a, c, g, or t
  misc_feature (584)..(584): n is a, c, g, or t
  misc_feature (586)..(586): n is a, c, g, or t
  misc_feature (739)..(748): n is a, c, g, or t
gctggtaccggtccggaattcccgggatatcgtcgacccacgcgtccggctttggatccatttccatcggtccttacagcgcgctcgtcagactccagcagccaagatggtgaagcagatcgagagcaagactgcttttcaggaagccttggacgctgcaggtgataaacttgtagtagttgacttctcagccacgtggtgtgggccttgcaaaatgatcaagcctttctttcattccctctctgaaaagtattccaacgtgatattccttgaagtagatgtggatgactgtcaggatgttgcttcagagtgtgaagtcaaatgcatgccaacattccagttttttaagaagggacaaaaggtgggtgaattttctggagccaataaggaaaagcttgaagccaccattaatgaattagtctaatcatgttttctgaaaatataaccagccattggctatttaaaacttgtaatttttttaatttacaaaaatataaaatatgaagacataaacccagttgccatctgcgtgacaataaaacattaatgctaacactttttaaaannnnnaannnannnnnaananaaaaaacttggcggcccgccttcgcccctcgaaaaatttcctaaaccatttcctttggggccccggggcccctaagggaaagggaaaatgggccaaaactttttcccaaggaaaaccccgggcaaagaaaaaggggttggaattccccccacnnnnnnnnnnccccccggggggaacccgaagggtttttaaaaaaaatccccaa

SEQ ID NO: 71566 - DNA, 917 bp, Homo Sapiens
  misc_feature (456)..(464): n is a, c, g, or t
  misc_feature (682)..(691): n is a, c, g, or t
ggggaagctctgtttggtgctttggatccatttccatcggtccttacagccgctcgtcagactccagcagccaagatggtgaagcagatcgagagcaagactgcttttcaggaagccttggacgctgcaggtgataaacttgtagtagttgacttctcagccacgtggtgtgggccttgcaaaatgatcaagcctttctttcattccctctctgaaaagtattccaacgtgatattccttgaagtagatgtggatgactgtcaggatgttgcttcagagtgtgaagtcaaatgcatgccaacattcccagttttttaaaaaagggacaaaaggtgggtgaattttctggagccaattaaggaaaagcttgaagccaccattaatgaattagcctaatcatgtttttctggaaaatataacccagcccattgggcttattttaaaaacttggctaannnnnnnnnaattttacctaaaatataaatattattggaaaaaccttaaaccccagttggcccatctggcggcaacaattaaaacatttaatggtaacacaacacgcctcgcccccaatatacacccctgaactccgcgaggggcccctgtctacccacattcctaaaacagtagctaactcccctaaacctggtcccccagacatgacgcggcgcaccaaatacannnnnnnnnnactggttcaataccgactaaccgaacacatgctctacacttttgccccccggctaaacataccacctagttccatttctatcatcgtctgttccgtctcatttccgcctactaataccgcacttcagaacgtgtacctcttaacaccccgtccctctcctattgctgatactcgcgcgttccgaactacacattaaggttgcacgacctagcctccgcccacctac

SEQ ID NO: 71567 - DNA, 802 bp, Homo Sapiens
  misc_feature (565)..(668): n is a, c, g, or t
  misc_feature (670)..(696): n is a, c, g, or t
  misc_feature (699)..(699): n is a, c, g, or t
  misc_feature (701)..(708): n is a, c, g, or t
  misc_feature (710)..(733): n is a, c, g, or t
  misc_feature (735)..(735): n is a, c, g, or t
  misc_feature (744)..(762): n is a, c, g, or t
gggataaagggagagagcaagcagcgagtcttgaagctctgtttggtgctttggatccatttccatcggtccttacagccgctcgtcagactccagcagccaagatggtgaagcagatcgagagcaagactgcttttcaggaagccttggacgctgcaggtgataaacttgtagtagttgacttctcagccacgtggtgtgggccttgcaaaatgatcaagcctttctttcattccctctctgaaaagtattccaacgtgatattccttgaagtagatgtggatgactgtcaggatgttgcttcagagtgtgaagtcaaatgcatgccaacattccagttttttaagaagggacaaaaggtgggtgaattttctggagccaataaggaaaagcttgaagccaccattgatgaattagtctaatcatgttttctgaaaatataaccagccattggctatttaaaacttgtaatttttttaatttacaaaaatataaaatatgaagacataaacccagttgccatctgcgtgacaataaaacattaatgctaacactttttaaaaannnnnnnnnnnnnnnnnnnnnnnnnnnnnnnnnnnnnnnnnnnnnnnnnnnnnnnnnnnnnnnnnnnnnnnnnnnnnnnnnnnnnnnnnnnnnnnnnnnnnnnnannnnnnnnnnnnnnnnnnnnnnnnnnnccncnnnnnnnnannnnnnnnnnnnnnnnnnnnnnnntntttgtgcgnnnnnnnnnnnnnnnnnnnaaaaaaatatttttttaaaaacacctttggtgtggggggg

SEQ ID NO: 71568 - DNA, 799 bp, Homo Sapiens
  misc_feature (726)..(745): n is a, c, g, or t
catgttaggatataggagacttaatttataataatgagagcattttttattttactaaagccatttttatagtcaactatcttttcttatttgtgtgattagaacttagaaaaatatttactagttgaagttattatcagtttttaatttagttcttaaactcatttcacttctaataatttctgttataaattgccagcattttaatgaaaatctaatgatgtaataggcattttctttatttgaacctacctcttttattttctgaaccaaagagaaagatggactggtgtttgtgaaacatttttaaaaatgtagtttcatttatattagttatgtttgataaatgtctcagtatttttataatatgataagcctgggattctacttttagggttatttgtacttttgagtaatatataaagtgacaatattaaggtacatgatcagctctttctatttttactcgtaaaaattatggaaatgaataattttgctaacaactttgaaatttcaaacttctggaaaatatgaaaatattcattgttcattatgaatttaaattgtaaggtatgaatgtgatttgtctgtacatcttgtatcttttccaaaaaatgattctgtatcttttggaaaaaagccgagagttgaagatagtatatttctggtagtactgaatatttacttacagtttctatcaaaaatatatatttgtttctaaaattnnnnnnnnnnnnnnnnnnnngcctacagccgcggccgcaagcttattccctttagttgagggttaattttagct

SEQ ID NO: 71569 - DNA, 1629 bp, Homo Sapiens
  misc_feature (825)..(833): n is a, c, g, or t
gggaatcccggcggccggcggcccgggaggcagtcgcgcgctcgcatccccaagatggcggccgttaaggacagttgtggcaaaggagaaatggccacagggaatgggcggcggctccacctggggattcctgaggccgtgtttgtggaagatgtagattccttcatgaaacagcctgggaatgagactgcagatacagtattaaagaagctggatgaacagtaccagaagtataagtttatggaactcaaccttgctcaaaagaaaagaaggctaaaaggtcagattcctgaaattaaacagactttggaaattctaaaatacatgcagaagaaaaaagagtccaccaactcaatggagaccagattcttgctggcagataacctgtattgcaaagcttcagttcctcctaccgataaagtgtgtctgtggttgggggctaatgtaatgcttgaatatgatattgatgaagctcaggcattgttggaaaagaatttatcgactgccacaaagaatcttgattccctggaggaagaccttgactttcttcgagatcaatttactaccacagaagtcaatatggccagggtttataattgggatgtaaaaagaagaaacaaggatgactctaccaagaacaaagcataatgctggcaattaaaaatgtggtttagttttccaaacatgttatcttaaatacccctttatccttacaggttgacataactttgaatgttttaacagcaagaattttaagaaaagataaacaccattttatttatttataaaaacaaaattagtttcaaatatttttgacattgtgannnnnnnnnccacatttctcagcaaagctaatggtattttaatcattatttttgcctgtcataagaaaactcttagctgaaatggccgaaaactgtgagacatgctatggaagctgaatgccggacgctagcacagtttactttttccctttctaatcggctgatgttactctcacttgatgtggttaaaccattttagaggtagagaagacagacagtttgaatatttgtaaacttgtttttctttggtatatttaggacttagtggtcctctgttgctattgtcttctataagtggagtttcatgacttactgcttaacgaataactaactactatgatattctggacattttaggaaatggtaatttgccttgctacacattaagagggctattaagactacattttttctaacctcagataagtgcagtgtctttgcaatgccaacataagggagatcttggccaacgtgaaataaaattactcattcaaaactctgcctaaggtgattttgtagttcttaacagttctccagagcatcttgaacaggaatattaagataaatgtgaatctgcaatggctgaaaagagttgtgagcttttttattcatgataaaaccttataggaatagtataaaaaatccctgtggaaagctactagtacattgaccagcgctgggtgatacagattctgataaaaacataaatgtattagttcatctccatgtagtaaaaagtatacttatacaatgttttgtacttgtatttcatgaaattaaaacagtgatgctaaaacctcgtgcc

SEQ ID NO: 71570 - DNA, 2844 bp, Homo Sapiens
  misc_feature (2130)..(2147): n is a, c, g, or t
ggtggttgcacttggagaaacattagaggaggcttttcattatatttttaatgtgcaactagcctgtgagattcaggtgcaggccctagcaggtgcaggtggagtagacaatctccatgtactggactttcagaagtataaagctttcacttacactgtagcagcgtctggtggaggaggtgtgaatatgggttcccatcaaaaatggaaggttggcgaaattgagtttgaagggcttatgaggactctggacaacttggggtatagaacaggctatgcttacaggcatcctctcattcgagagaagcctaggcacaagagtgatgtggaaatcccagcaactgtgactgctttttcctttgaagacgatacagtgccactctctcctctcaaatacatggcacagaggcaacagcgtgaaaaaacaagatggctgaactcaccaaatacttacatgaaagtgaatgtgcctgaggagtctcggaacggagaaaccagtccccgaaccaaaatcacgtggatgaaagcagaagactcatctaaagttagtggtggaacacctatcaaaattgaagatccaaatcagtttgttcctttaaacacaaacccgaatgaggtactagaaaagagaaataagattcgggaacaaaatcgatatgacttgaaaacagcaggaccacaatctcagttgcttgctggaattgttgtggataagccaccttctactatgcaatttgaagatgatgatcatggcccaccagctcctcctaacccatttagtcatctcacagaaggagaacttgaagagtataagaggacaatcgaacgtaaacaacaaggcctagaagaaaaccatgagctgttttccaagagcttcatctccatggaagtgcctgtcatggtagtaaatggcaaggatgatatgcatgatgttgaagatgagcttgctaagcgagtgagtaggttaagcacaagtacaaccatagaaaacatcgacattactattaagtctgaagagaagatcgaagcagtcctgtcacctgaaggcttcccttcaatatcaccataggagaaaatgaagagattacgaagtcaatctaacctgaaaaacaacgcctagaagaaaaccatgagctgttttccaagagcttcatctccatggaagtgcctgtcatggtagtaaatggcaaggatgatatgcatgatgttgaagatgagcttgctaagcgagtgagtaggttaagcacaagtacaaccatagaaaacatcgagattactattaagtctccagagaaaatcgaagaagtcctgtcacctgaaggctccccttcaaaatcgccatccaagaaaaagaagaaattccgcactccttcttttctgaaaaagaacaaaagaaaaggagaaagttgaggcctaaataaagtctttttataattattattataacaatgtgacattgcacatctaaataccacatttaagttgatcattaatatgcaatggtagatcagattgggggatgtagcaaactggactttaagaactggaaagaggttttacaaaagaaaaactttcagattcatctctcattttatatgtccagaaatggctttgaattttaagcaattactagttttaattagctctgccctcatgaagtattattataattcaccataaacagctatctgtctgaattacttcaggccttctccataatatctgttagaaagaaattgccagtgagcaagtgagaatttttatttctcaatacctgcttcacttgataatcatattataattttttatcatgattattgactatatttttggagtcccattgtttcagtgggcattaacagaatgctttaaaaacttctaagacaagaatctatagcattagtatacactggcacataattttttaaaaagttttaagaaaagattcatttggaattttattcacagtataaaatttcctcacctgaagtaactttgtttgccaaaaaagttgttttaataaactataatttttgaaaacttccttttttattagtttagaaagccccttatttttcaacaaaggggattttgtacacataacatgggttatttagtttaactctggcnnnnnnnnnnnnnnnnnntttggtatgtggatgttggtataccggttcagtataaaagtgtcctaagcatattagccaatcttttcacagtagagcatacttaaggctgtgggtactggagtatacttaaatataactccagaatccaggactgggtgttaaaacaggattagagcatgtaaagggtacattctagattcatatttgaatcttaaacggtattttctcttagtatggtaaggagtaaagaaaagtctcataaggtagccaattgaaaaagaatgaagggaacgtgaaaaattagggggacaaacgatgggatgtgaaaagaagaatcctagtcgatggtgactcatattcagataggatacacacgtgtgattctgttgcaaacatgtcccaaatttctaaaattctggttctctgcaaaagcaatgtcttccctggtgatatggcgttctcaaggctcaatctttctaattcggatcttaagagcgcgacctagaagaatcaggaggtctatcccaccagtaagaaactaccctttcttgttctaccgttccacaaactctttcgggctctctcttagtattcacttcacactagctgaattaggtccccttcccatgtgtccgtctgcaaccgtccagacgggcacacccaggctcgggggggcgccactcacgggggggcccgggaaaaaacgcggacaccg

SEQ ID NO: 71571 - DNA, 1225 bp, Homo Sapiens
  misc_feature (726)..(726): n is a, c, g, or t
taggctaggtagcgaggctgggtggtgaattcggcacgaggggagccgaagcagcagcgcaggttgtccccgtttcccctcccccttcccttctccggttgccttcccgggccccttacactccacagtcccggtcccgccatgtcccagaaacaagaagaagagaaccctgcggaggagaccggcgaggagaagcaggacacgcaggagaaagaaggtattctgcctgagagagctgaagaggcaaagctaaaggccaaatacccaagcctaggacaaaagcctggaggctccgacttcctcatgaagagactccagaaagggcaaaagtactttgactcaggagactacaacatggccaaagccaagatgaagaataagcagctgccaagtgcaggaccagacaagaacctggtgactggtgatcacatccccaccccacaggatctgccccagagaaagtcctcgctcgtcaccagcaagcttgcgggtggccaagttgaatgatgctgcccggggctctgccagatcctgagacgcttcccctccctgccccacccgggtcctgtgctggctcctgccccttcctgcttttgcagccaggggtcaggaggtggctcgggtgtgggctggagaggcagaagccctttcctgttggtgtcccagcacatggagccccttgggctgagcaccaagaccttgaacctttgtgttttaccttttttnccaaataacagttgggagaaatatcaatgaaattctagggggtgggggtgcggttgaaagggtgcagggtgggagatatggaggagtatgaattagggcttggagttggtaaaaacattcctgactatccttcttaaccacgtggctgatgtggggtaggtatgaggggaaggaagtggagtagcctaatgaaaaggggttctagttgagctctgtagataaatgccttgtttcagtgtggttggagacctggtgtcagataaaagaaactccatccgcacagacagatgcaaacagctcctctagttctgcagagctagttgagaactcaacattaatcattttaaaaagtactgtccttgaaatagatttgctgtgggaagaagggcagtgagtgtgggagaaaggagccgtgagcgtggggaaccccacagagcccaaaggatttttcagtattcgaaataaacaaaacaaaaacccatgaaaaaacccaacccag

SEQ ID NO: 71572 - DNA, 1141 bp, Homo Sapiens
  misc_feature (43)..(43): n is a, c, g, or t
  misc_feature (55)..(55): n is a, c, g, or t
  misc_feature (156)..(175): n is a, c, g, or t
  misc_feature (211)..(245): n is a, c, g, or t
  misc_feature (673)..(707): n is a, c, g, or t
gccccacccgggtcctgtgctggctcctgccccttcctgcttntgcagccagggntcaggaggtggctcgggtgtgggctggagaggcagaagccctttcctgttggtgtcccagcacatggagccccttgggctgagcaccaagaccttgaaccnnnnnnnnnnnnnnnnnnnnccaaataacagttgggagaaatatcaatgaaattcnnnnnnnnnnnnnnnnnnnnnnnnnnnnnnnnnnnagatatggaggagtatgaattagggcttggagttggtaaaaacattcctgactatccttcttaaccacgtggctgatgtggggtaggtatgaggggaaggaagtggagtagcctaatgaaaaggggttctagttgagctctgtagataaatgccttgtttcagtgtggttggagacctggtgtcagataaaagaaactccatccgcacagacagatgcaaacagctcctctagttctgcagagctagttgagaactcaacattaatcattttaaaaagtactgtccttgaaatagatttgctgtgggaagaagggcagtgagtgtgggagaaaggagccgtgagcgtggggaaccccacagagcccaaaggactttttcagtattcgaaataaacaaaacaaaaacccatgaaaaaacccaacccagnnnnnnnnnnnnnnnnnnnnnnnnnnnnnnnnnnnggggcggccgcctcagaagaatttgcccctgacgagggggccaagcttaaggcgtcaaccacggctatgttcttgtgtacagagggggtccccagtacaggtagggagccagctataataacctaggcacctgggccgtcgcgtcttaaacaacaggacccaggtgaccggacgaaaacacgggccgacgccgtcggcaaatcatggtgcagagcggcacaccattacatgtcggggcgcggcaccaattggggcgacaacaccccccagggagcatttaaagcgcctcacgggcagacacctcacacaccttcaccggctgccaacacggggctcaccccacacgcgcgcaaaatgctgcgcggcgggaacacagcccgcgctaacggggcacatgaccttagagcaaacattttactaccggaggagtaggt

SEQ ID NO: 71573 - DNA, 637 bp, Homo Sapiens
  misc_feature (118)..(137): n is a, c, g, or t
  misc_feature (173)..(206): n is a, c, g, or t
gcttttgcagccaggggtcaggaggtggctcgggtgtgggctggagaggcagaagccctttcctgttggtgtcccagcacatggagccccttgggctgagcaccaagaccttgaaccnnnnnnnnnnnnnnnnnnnnccaaataacagttgggagaaatatcaatgaaattcnnnnnnnnnnnnnnnnnnnnnnnnnnnnnnnnnngagatttggaggagtatgaattagggcttggagttggtaaaaacattcctgactatccttcttaaccacgtggctgatgtggggtaggtatgaggggaaggaagtggagtagcctaatgaaaaggggttctagttgagctctgtagataaatgccttgtttcagtgtggttggagacctggtgtcagataaaagaaactccatccgcacagacagatgcaaacagctcctctagttctgcagagctagttgagaactcaacattaatcattttaaaaagtactgtccttgaaatagatttgctgtgggaagaagggcagtgagtgtgggaaaaaggagccgtgagcgtggggaaccccacagagcccaaaggactttttcagtattcgaaataaacaaaacaaaaacccatgaaaaaacccaacccagaaa

SEQ ID NO: 71574 - DNA, 875 bp, Homo Sapiens
ttcgatctagaggacccctatgtctcgatcagttaccagcaactggcggggtaacctgagcccccctctcctccccttcctcaaccactggacgtttatatattataggcagggatgaaatgggcacctagtcagatcttctcagcttgctagccagaaatgactgtgattctgctgggggctgctgagaaggtaatgtaggttgaaaaggggctctaagtttatttatttcgttagattgacacttccacacactccctgtagtccaggtagggcccagaaataggaaaggctaggattggataatgctgcaaatgctttttttgtgtgagaaactggagagatgtgatttctccttttgggagagaatgtcccaaaattgattaggctgagccttgggaatagtttggcaggtttaacatcccaaggctaacctaacgtagttgggaaaggtagattgaatgagacatgttttctgtgcttctaagtgttctgtcccttaggctgctattgcttcatgtttccattatggcaggtttagagaatccttaaaaagaaaaattgacttgcttgcctaaaactacagtgcccccttagcctccattacttagtatctcttacagtttgctctggctctcaaataatataaagattgatgaacattattcacagaaaatgggcaccttctctctctcttccagcatgttgcttttgaaagtatcatgggatagtgggacgagcactggtttaggagtcaagatatctgggttctcactctactcagtcccagcagagctgttgtataaccttgattaagtcatttagcctctctggatttctatttcctcatctgtaaaatagagttaaatgtatgt

SEQ ID NO: 71575 - DNA, 566 bp, Homo Sapiens
gaaaccggcaaggagaagcaggacacgcaggagaaagaaggtattctgcctgagagagctaaggaggcaaagctaaaggccaaatacccaagcctaggacaaaagcctggaggctccgacttcctcatgaagagactccagaaaggggtatggggcatagtctcttaccctctttctttggagctaaaggaggttcttcgaatgaagtctgtagaggttctactggatccttttctggaggttttgttgttgaacagaaggagaggcgaatttgaaatttgaaaagagcaagtcaaattaatgtaaatccctgatgtggtatcaattccctcctgatttcccatgtaggaaattaaggcctaaattggagcatttgggtgtgtggggaaatgagggaaagatgttagaaactgaaatgcagactgcccccaggcatttgcctgtttgaatgttggaggttttaggattgtgcactttttaagcattagagataaattttgggatgcatcatttcagaagaagatcaaaccatctctcctacagaaataaatcctcaacttgaaaaa

SEQ ID NO: 71576 - DNA, 787 bp, Homo Sapiens
tgtgtcacgcggtgaaggcatgtgcagcattatcccatcgctagccgtgtcgtatttctaggccctacctggatctacagggagtgtgttggaagtgtcaatctaacgagaatgaatgaactgtagagcccctgtgtcaacctacatgaccttctcagcagcccccagcagaatcacagtcatttctggctagcaagctgagaagatctgactaggtgcccatgtcatccctgcctataatatataaacgtccagtggttgaggaaggggaggagaggggggctcaggttaccccgcaagcttgctcgtgacgagcgaggactttctctggagcagatcctgtggggtggggatgtgatcaccagtcaccaggttcttgtctggtcctgcacttgccagctgcttattcttcatcttggctttggccatgttgtagtctcctgagtcaaagtacttttgccctttctggagtctcttcatgaggaagtcggagcctccaggcttttgtcctaggcttgggtatttggcctttagctttgcctcttcagctctctcaggcagaataccttctttctcctgcgtgtcctgcttctcctcgccggtctcctccgcagggttctcttcttcttgtttctgggacatggcgggaccgggactgtggagtgtaaggggcccgggaaggcaaccggagaagggaagggggaggggaaacggggacaacctgcgctgctgcttcggctcctgtcactagggttgctcagtcaaaatggcggcccttgcccgtccc

SEQ ID NO: 71577 - DNA, 999 bp, Homo Sapiens
  misc_feature (685)..(685): n is a, c, g, or t
  misc_feature (864)..(864): n is a, c, g, or t
cctgggtggcgaattcggcacgagggttgtccccgtttcccctcccccttcccttctccggttgccttcccgggccccttacactccacagtcccggtcccgccatgtcccagaaacaagaagaagagaaccctgcggaggagaccggcgaggagaagcaggacacgcaggagaaagaaggtattctgcctgagagagctgaagaggcaaagctaaaggccaaatacccaagcctaggacaaaagcctggaggctccgacttcctcatgaagagactccagaaagggcaaaagtactttgactcaggagactacaacatggccaaagccaagatgaagaataagcagctgccaagtgcaggaccagacaagaacctggtgactggtgatcacatccccaccccacaggatctgccccagagaaagtcctcgctcgtcaccagcaagcttgcggggtaacctgagcccccctctcctccccttcctcaaccactggacgtttatatattataggcagggatgaaatgggcacctagtcagatcttctcagcttgctagccagaaatgactgtgattctgctgggggctgctgagaaggtaatgtaggttgaaaagggctctaagtttatttatttcgttagattgacacttccacacactccctgtagtccaggtagggcctaganataggaaaggctaggattggataatgctgcaaatgctttttttgtgtgagaaactggagagatgtgatttctccttttgggagagaatgtcccaaaattgattaggctgagccttggggaatagttttggcagggttaacatcccaagggctaaccctacgtagtttgggaaaaggganaattgaaatggggacctgggttttctgttggcttcctaaatgggttctggtcccccttaagggctggccaattggcttccatgggttccccatttaatggggccagggttttaaagagaaatttccctttaaaaa

SEQ ID NO: 71578 - DNA, 766 bp, Homo Sapiens
tatatagaacagtggttctaaaaagcaggctggtacggtccggaattcccgggatatcgtcgacccacgcgtccggcagactgtggctgcagagaccttgcgaccatgtgtagattgcatggaccccgacaaagggaaggctgctgtgtagctctgtccactctgaataccaagtgtgttgggaattgcatgccatctccaccctgagcctgacctttctgagtgacatgggtgtgccaggctagactaggaggttccggtgtctggaaaagcactttacagatgagattccctctcctcccccaccttcaagcaccctgttccctctttctttcttttgtgttggatttgtttaaaaaccaaataagcatctgtgtaacctccacagtagcatttcttatttgtttggtcactgctacaccttagcagctcttcccctttcctgggggatgtgcacggcagcttgagcctgtcacgtggtcaaggcccggccccatcagaggctgggggaggcggcacattggcagtgtgtcacactgagctgggcaccacaggctgcctcatgaccctcctctccagcaggtagtgggtgaatgtgtgaaggtcttgcctgaatccatcaggacttgggaaacagagaaccctgtgggggtggctgtgggggaggtccctgccagtgtttagaagagcctgactgtgttcagtgccttggagcagaaagccagggtcctgagtggctgaaataaaagcctctggtggaaaccac

SEQ ID NO: 71579 - DNA, 723 bp, Homo Sapiens
  misc_feature (75)..(75): n is a, c, g, or t
caactgacaaatgagggatgttagctttgtggcagaattccctgcatgtgtgataactgatcttgttttattttntggcattgcaactgtggcatagttacaatttctgtttgttcatcacatttaaaattggaagagaacgcgcttgatggatagagcgccttcagtgtactgtttcttattaactttactttttttaaatcaacttgctatagactttatatacattttgttaaatatagttcctagtgacatagaaacgatgcgtagttttcatttactaattacaaatgttgaggcctaattctgaaagtcctcatatttaaaggctagacaacgtaatgaaatttttaactatttgtatgtcattttgaaagtgtactgctttatggtaaaagtgtttttcatttgttcattgttttcattatttgtgatcatgttgtctttcaatacaggcataaaccttccactcttgaacaaagcagctgctttttaaaagcggtaattgcttctttaccttttatttcttttgtaaatgaagcttttctttaagaatgtgactttaaagtgttgtctattgcataaaacagttgacactcacttattgtaaagtgaagattgttctactgcatgtgaagtggaccatgcagatttctgtatgttctcagtatgcatcactagataataaagtcttttgtgaacaaacctcgtgccgaattcttg

SEQ ID NO: 71580 - DNA, 705 bp, Homo Sapiens
  misc_feature (251)..(367): n is a, c, g, or t
aaaaaatggaatctgtcttggaggacatcagaaggtgaattttccaagttcttggacaacctagctgttgaaaagctttctgggtttggggggtatttcagatgtaccttaaagtgttagcagacacagattaagacactgggagccaatgaaacagcagttgagggtttgctgtgtatcacatttctgtattttatcacccccttcctgcaacattatttatctggaatctacctgcccttttgtttttnnnnnnnnnnnnnnnnnnnnnnnnnnnnnnnnnnnnnnnnnnnnnnnnnnnnnnnnnnnnnnnnnnnnnnnnnnnnnnnnnnnnnnnnnnnnnnnnnnnnnnnnnnnnnnnnnnnnnactttgctgcctttcttacatgatccaggcccagaacccaaactcaggcactgtatagatgaccactttcgtaaactactgacctagcttgttgccaattgttgattgaacttcccataactccacttcgtgtctgttcctctgtatacagccaccttctgttcccgtcatgagcctttaggtctccatttgcatattgcaaatactatgttccatgtaggtagctcattcagggccttgctcttcacttcaaaaaaggttcccttgaggactggctgtcaatttgtgttgctgtgttggttgttgatgaaaataataaaatgattgattacataaaa

SEQ ID NO: 71581 - DNA, 729 bp, Homo Sapiens
  misc_feature (274)..(390): n is a, c, g, or t
aggtctgagcaaataaggtgtataaaaaatggaatctgtcttggaggacatcagaaggtgaattttccaagttcttggacaacctagctgttgaaaagctttctgggtttggggggtatttcagatgtaccttaaagtgttagcagacacagattaagacactgggagccaatgaaacagcagttgagggtttgctgtgtatcacatttctgtattttatcacccccttcctgcaacattatttatctggaatctacctgcccttttgtttttnnnnnnnnnnnnnnnnnnnnnnnnnnnnnnnnnnnnnnnnnnnnnnnnnnnnnnnnnnnnnnnnnnnnnnnnnnnnnnnnnnnnnnnnnnnnnnnnnnnnnnnnnnnnnnnnnnnnnactttgctgcctttcttacatgatccaggcccagaacccaaactcaggcactgtatagatgaccactttcgtaaactactgacctagcttgttgccaattgttgattgaacttcccataactccacttcgtgtctgttcctctgtatacagccaccttctgttcctgtcatgagcctttaggtctccatttgcatattgcaaatactatgttccatgtaggtagctcattcagggccttgctcttcacttcaaaaaaggttcccttgaggactggctgtcaatttgtgttgctgtgttggttgttgatgaaaataataaaatgattgattacatagaaa

SEQ ID NO: 71582 - DNA, 517 bp, Homo Sapiens
cctcattccactggcacttgttccacatctgcaaagttacagctgagaggggagaggcacggaaaggagaagaggagggaaactgcggaaaggcctggtgcaggtccagggagtcctgtctggctgagtcgggacaagctgcttaaactcgcctgcctggtgacacacccgtgggcggcaagtgaaccaacctgccctccagcgacctttcccgtgattatcgtcaggggccccgccaccactcggcctactgcgttgagcttcaggaaaccattcctcagtttactgataagaaaactgaggccgcagccttcgcggggcaggtcctgggagctgggagatcccggcgccatcctagcgggggccgcacttactctccgagtcgctgaagccgctgctgtcgctgacactggcgctgctgcgccgcttcatgcgctccaggtgctcctcgtagtggaagtggcgctcgtggaagggcgacgcgaagtcggccagcaccgcgtcaaactcgcacagc

SEQ ID NO: 71583 - DNA, 1000 bp, Homo Sapiens
aaggctataagatctaggaacacgagccggtggtagggcgggcgcggaccgtgctgggagcggcgcggctggagcgcagcgccgaagggactggcagggctgaagtgtgcgggacagcaagcccccgaatagccccggctgccacctcgcaggacccaaggccacgcgcgccgggcccagctgagccgcctcatgaagccgcccgcggcgcagggcagccccgcggccgccgcggccgcagccccggccctggactcggcggccgcggaggacctgtcggacgcgctgtgcgagtttgacgcggtgctggccgacttcgcgtcgcccttccacgagcgccacttccactacgaggagcacctggagcgcatgaagcggcgcagcagcgccagtgtcagcgacagcagcggcttcagcgactcggagagtgcagattcactttataggaacagcttcagcttcagtgatgaaaaactgaattctccaacagactctaccccagctcttctctctgccactgtcactcctcagaaagctaaattaggagacacaaaagagctagaagccttcattgctgatcttgacaaaactttagcaagtatgtgaaacaagaagttctgggtcctttcatcataagggagaagcttcagaaagttccgaggacctgctaaaatcagctactagaatctgctgccagaggggacaaagacgtgcactcaaccttctaccaggccactctcaggctcaccttaaaatcagcccttgatcccatttctgggcaatttagacagtgaaactgactttgtttacctgcttgcagcatattagaacagacgatccatgctaatattgtattttctcttaaaacatagctttcctgtaatttaaagtgcttttatgaaaatatttgtaattaattatatatagttggaaatagcagtaagctttcccattataatatatttttgtatacaaataaaatttgaactgaagtctgaaa

SEQ ID NO: 71584 - DNA, 972 bp, Homo Sapiens
  misc_feature (665)..(665): n is a, c, g, or t
  misc_feature (687)..(687): n is a, c, g, or t
  misc_feature (714)..(714): n is a, c, g, or t
  misc_feature (720)..(720): n is a, c, g, or t
  misc_feature (767)..(767): n is a, c, g, or t
  misc_feature (777)..(777): n is a, c, g, or t
  misc_feature (779)..(779): n is a, c, g, or t
  misc_feature (796)..(796): n is a, c, g, or t
  misc_feature (807)..(807): n is a, c, g, or t
  misc_feature (819)..(819): n is a, c, g, or t
  misc_feature (833)..(834): n is a, c, g, or t
  misc_feature (845)..(845): n is a, c, g, or t
  misc_feature (857)..(857): n is a, c, g, or t
  misc_feature (859)..(859): n is a, c, g, or t
  misc_feature (861)..(861): n is a, c, g, or t
ttcaggtttgcagagtggaagtttaatgggaccatcaccgtgataccccatcacagcagtcccaggctggaggccccaggctctggccgcctctcccagcatggtgggcctggagagagcaccagcaccacctcccactttccctggggtattgctttgcccctgtgcctcccaccccaggaagctacaagagacaggctgtcctgtccccacactctccctgggtcctgggactccctgttctgaggggctaaggttgcctggggccagagggccctccccagggacaaccatcctctccctgtgtcccctgccccccacactgagggaatgtctgtgtccttgttcctctgccaggggccaactgaggctgccaaccctaggggcggggtgcagggctgtgcggggagggtggctcaaatccctgcaaggaggcgtgctgcagggacagcacagcctgggcccccggcagacattaaggcacagtgtggcggtcaccatagggctgctggggcccttgccccggggcggcacctggcaggtgctggcatccggggctaggcacagctgtcagtgttgagacaggaggcatggtgtgtgcgggctggccccaaggcctgcagtgcaagacactgggagtgggggaggcaggtcacaggtctctngcagacacaaggaggtcctctncccattctccctgcctgggaaagccangggagnggcttgtgggctgggcaagctcatggcagagcgaacgcatcatggangctggcacanangacatttggtgtcggangtccaggtcanccgcacaggtangaaaattactcctnnaaaatgatgtngggctctcccananangctgtggtcatcgtgttgtcaacttgcactctgtggtctaggggtcttttggcaaccggaaaatttgttgtctccgtggggaccctctcgtaaaaccccgaagtagacgta

SEQ ID NO: 71585 - DNA, 1952 bp, Homo Sapiens
  misc_feature (1078)..(1365): n is a, c, g, or t
tgcagtgtgtcaagggtgccaacgcaaaatcctactatcagagcagtgtccagtacctgtaccgagagttgctggttcaccttgacgatccagagagggccatccaggatgcaattttagaggtcctcaaagagggcagcgggctgttcccagatctcctggtgagggagacggaggccgtcatccacaagcaccgctcggccacctactgcgagcagctcctgcagcatgtgcaggccgtgccagccacacagtgaccacgctggtttcagccacggcacacccttgtccccacctgagccagagtttgtggcctttaaatctcataaacaaggcacctctgtgccagcagtgagactgtgacagcaagaatgtactcctcaggacacctgcccgctctttccctggaataacagcctctgagtggattctgcatgttatgtgatttgttctgttcatcaagagggctcccaaacatctgcagctgatttgaaattaaaagtaagtcgcagccgctcctcccgcagccacttcagcagcatcttagattttaagcctcacgtgcgcagctggttcatgaactattggctgcatcctgcttaggtgcccaccaagaaggtttttacctacttaacaaaaaagaaagaagccaaagtgattagaaagaaatgaaatctctttttgggttctgtctactgaaatttaatatctcagtgaacagactaaaaggaatttagaatcctaacaacttaccagatttctcctgttttaaatatactgggactttaaaggttatatgtccggtcaccgtatgttttaagtcggtgttaatgctaacagtgttgaaaacaatatttcatgagatctaattgtggttgcccctataggtagcaggaaagtaaagttgcatttccctctcgcacattctacacccaagtgcctaaaagatctcattgtaagtgggtagtgttaccggaagccattgtgttcacacgggggaaatgccgtatatatttttcaacaaatattaacgtttatactttcatgtttgaaaatttaattaaaaatatttgttttnnnnnnnnnnnnnnnnnnnnnnnnnnnnnnnnnnnnnnnnnnnnnnnnnnnnnnnnnnnnnnnnnnnnnnnnnnnnnnnnnnnnnnnnnnnnnnnnnnnnnnnnnnnnnnnnnnnnnnnnnnnnnnnnnnnnnnnnnnnnnnnnnnnnnnnnnnnnnnnnnnnnnnnnnnnnnnnnnnnnnnnnnnnnnnnnnnnnnnnnnnnnnnnnnnnnnnnnnnnnnnnnnnnnnnnnnnnnnnnnnnnnnnnnnnnnnnnnnnnnnnnnnnnnnnnnnnnnnnnnnnnnnnnncatgaggcggttagccgggcaccctctccgcgagggacttcccccggggggggtttttctaccaatttaatagcccggccccctggccaagaaaagtcgccaatcccggcctcacactctatataaaggtttttctcgcccgccctcatttacacacccctctccaccagaaggcggggggtgaagtcaaactctagagaattccctccccacgcggaaattccaccccaccccccctggcacaaaactgttgcggtgatataaaaaactgtgtaccactacgcgccgggaaaaaaatcgggcgctgtaagaaaacaccccgcccgcgatataacgcatccaccgccccgataagtaaaaaacccgtggggaaaacgaaacacacccagagggcatttgtgtgtgcccaccctaatataccataataattcctctgagtgaaagaaaccatcacgcgagggcaacatactgacatcaacatctactcaaccccctgtctccccgccccgatattactcccgcgcaagagacaggccgcgcccaccaccgctgttggcgagcgagaacgagccacgcgctagaatatt

SEQ ID NO: 71586 - DNA, 853 bp, Homo Sapiens
gataagcttgcggccgccgcttcagccgcaagtcgcacctgggccgccaccaggcggtgcacactggcagccgcccccacgcctgcgccgtctgcgcccgcagcttcagctccaaaaccaacctagtccgccaccaggcgatccacacaggctcccgccccttctcctgcccgcagtgcggaaagagcttcagccgcaagacccacctggtgcggcaccagctcattcacggcgaagccgcccacgcggccccggacgccgcccttgcggccccagcctggtccgctccccccgaggtggcgccgcccccgctcttcttctgagcctagttctcacgaggaccctttcttgcccacagtttcgagaggcccgtgccatgagaccgcctggggtgagcaaggcgacctgggctgctgcccgaaggtttggccgccgcgggacacctgtttccttcccgcagtgtctgcgtccgcacagcatacccagctcggacctcctaggacagagactcagcgaacccttgctgggaaccgctgagctgaagttcttggaaggctcccacccaggtgccccgttggaaagcagatatttcccggacccagcgcggcctcaaccagggcaggaaagagtggttatttatgtacttaaagtttcattaaagttaaaatcggaaagttctggggctgctaaatgaattgggggagggaacacctgactctccttagccactgtcccacctccatccacacacagaccacccccctccacttccccttctgtcctgggtgagttacatttagccagctgctgttaattggttctcccaaataaaaatgtaatatatttattcact

SEQ ID NO: 71587 - DNA, 1439 bp, Homo Sapiens
  misc_feature (229)..(229): n is a, c, g, or t
gcggccgcactgagcgcaggcgaaaggcctggcgccgctgtgggccctggagtgggcgatcagattaggccgcgagccgaagcggcggtcacactgcgtgcaggcgaagggccgttcgcccgtgtgcacgcgcgggtgccgcgccaggtgctgcccatgggagaagccgcgcccgcagtccgggcagaagaaggaccgctcgcccgagggggcgcgctgggggcaccancgggatcgggatcctgggccgcagccccggtccgccaggcgcgctggccaggggcttggcggcgggggcatccacggtggcgcccagtgcgcactcatcgcacccaaagggggcgaccctcgctgcggtgcagacactggtgcgtggcgaggttctttttccagccgaagctcaagccgcagtcggagcacgcgaaaggctttggcccgggaaaggatggggtcggggacggggcagtggaatgaggagaagcggacgagtcgggagagggcctggccgggccggccgtctggtagcaccctttggtgccgcaccaaaatgctgcttgtgcgtgaagctgcgtgcgcactgtgcgcactggtagggcctctcgcccgtatggatgcgctggtgccgaatcaagtgcgtcttcttgcgaaagcgcttctcgcattccgtgcaggggaagggccgctcgccggtgtgggtcttttggtgcgagcccaggtggatcttctggctgaagcgcttgccgcactccgcgcacgggtagggccgctcgcccgtgtgcgtgcgcaggtggcgggtcagatgggccttcttgctgaagcgcttgtcgcactcggagcacgggaaaggccgctcgccgcggtggctgcgctgatgcagtagcatgtgggcgcgctgcgtgaagctgcggccgcagtccgggcaggcgcaggggccctcgccccggtgcagccgctggtgcagtcgcaacgtcagctggtcccggaagcgccgctcacactccccgcagccgtagggcttctccggcatcggaccccacccagacagcgcgagcccactcagtgcccccggggcccctggctccagtttgtacgcggcagccagatgccccaggtcaggcgcgggaaaggggctgggaagtaacgatagatgctggggccattcgacctcctcttctgcctcctgatcttcgtcctccaccttcaccttccgaatcatccactcctctcctgggcaggtacccacaggctgagccttctgtgctgagcacgcctggcctctgcagggagcctcggcttgttctgtgtgggcaccttcctccggtgtaggggcctcgtgccctgagcacacccccagtgctctctcttccctagaagaggacatctgctcctgggcattatgggatccttccatgggctcactttggggggccatctctggc

SEQ ID NO: 71588 - DNA, 2410 bp, Homo Sapiens
gggagagagtatgaagtcgacggcgcgccgagcaaaccaggtgcttgcgctgagggctctgcagtggctgggaggaccccggcgctctccccgtgtcctctccacgactcgctcggcccctctggaataaaacacccgcgagccccgagggcccagaggaggccgacgtgcccgagctcctccgggggtcccgcccgcgagctttcttctcgccttcgcatctcctcctcgcgcgtcttggacatgccaggaataaaaaggatactcactgttaccattctggctctctgtcttccaagccctgggaatgcacaggcacagtgcacgaatggctttgacctggatcgccagtcaggacagtgtttagatattgatgaatgccgaaccatccccgaggcctgccgaggagacatgatgtgtgttaaccaaaatggcgggtatttatgcattccccggacaaaccctgtgtatcgagggccctactcgaacccctactcgaccccctactcaggtccgtacccagcagctgccccaccactctcagctccaaactatcccacgatctccaggcctcttatatgccgctttggataccagatggatgaaagcaaccaatgtgtggatgtggacgagtgtgcaacagattcccaccagtgcaaccccacccagatctgcatcaatactgaaggcgggtacacctgctcctgcaccgacggatattggcttctggaaggccagtgcttagacattgatgaatgtcgctatggttactgccagcagctctgtgcgaatgttcctggatcctattcttgtacatgcaaccctggttttaccctcaatgaggatggaaggtcttgccaagatgtgaacgagtgtgccaccgagaacccctgcgtgcaaacctgcgtcaacacctacggctctttcatctgccgctgtgacccaggatatgaacttgaggaagatggcgttcattgcagtgatatggacgagtgcagcttctctgagttcctctgccaacatgagtgtgtgaaccagcccggcacatacttctgctcctgccctccaggctacatcctgctggatgacaaccgaagctgccaagacatcaacgaatgtgagcacaggaaccacacgtgcaacctgcagcagacgtgctacaatttacaagggggcttcaaatgcatcgaccccatccgctgtgaggagccttatctgaggatcagtgataaccgctgtatgtgtcctgctgagaaccctggctgcagagaccagccctttaccatcttgtaccgggacatggacgtggtgtcaggacgctccgttcccgctgacatcttccaaatgcaagccacgacccgctaccctggggcctattacattttccagatcaaatctgggaatgagggcagagaattttacatgcggcaaacgggccccatcagtgccaccctggtgatgacacgccccatcaaagggccccgggaaatccagctggacttggaaatgatcactgtcaacactgtcatcaacttcagaggcagctccgtgatccgactgcggatatatgtgtcgcagtacccattctgagcctcgggctggagcctccgacgctgcctctcattggcaccaagggacaggagaagagaggaaataacagagagaatgagagcgacacagacgttaggcatttcctgctgaacgtttccccgaagagtcagccccgacttcctgactctcacctgtactattgcagacctgtcaccctgcaggacttgccacccccagttcctatgacacagttatcaaaaagtattatcattgctcccctgatagaagattgttggtgaattttcaaggccttcagtttatttccactattttcaaagaaaatagattaggtttgcgggggtctgagtctatgttcaaagactgtgaacagcttgctgtcacttcttcacctcttccactccttctctcactgtgttactgctttgcaaagacccgggagctggcggggaaccctgggagtagctagtttgctttttgcgtacacagagaaggctatgtaaacaaaccacagcaggatcgaagggtttttagagaatgtgtttcaaaaccatgcctggtattttcaaccataaaagaagtttcagttgtccttaaatttgtataacggtttaattctgtcttgttcattttgagtatttttaaaaaatatgtcgtagaattccttcgaaaggccttcagacacatgctatgttctgtcttcccaaacccagtctcctctccattttagcccagtgttttctttgaggaccccttaatcttgctttctttagaatttttacccaattggattggaatgcagaggtctccaaactgattaaatatttgaagagaaaaaaaa

SEQ ID NO: 71589 - DNA, 704 bp, Homo Sapiens
aagtccaaaaagatcataaagtctgtagagaagttctaagagtgcagtcagctataaaaacctagcaatttaatttcttagaaaaatgtagctggagttcaaactgtagtaacaaaggcaagtaaattaagttgtgggcaggtgtaattaagttaataggaatggcagggatgaatataaatcagaacaggactaacagtttgaaacattagatattcaaatgctcagagctgatgagccgagccactacgctaacaactctgcaaaccaaaggtttcacaaattgcacaagaacctggcctcgatcccattgtgttgctggcataagattagaagggcctgttggttcaattgttgctttggacagaggaggacaaacttgccacagtgaagaaatcatttttaaaaaccaccactgtcctttagtgcactaatttctctaataactaggtgtatattagaaataatgatatataagtgcagtatactccagtttcaacagaatggtgtcacttctgtaaaatgttgattttcagattgtcatactttctaaatacaaaaatttgtcacagcttccacatttacaagatattaaacattccataaaatatttgtagaaatatgaaaaaccaatttttgtagttgccttttgaaatgtatacaaaatatcccacatgggcaacatggtaaaacctcgtctctac

SEQ ID NO: 71590 - DNA, 1848 bp, Homo Sapiens
  misc_feature (275)..(275): n is a, c, g, or t
  misc_feature (378)..(386): n is a, c, g, or t
  misc_feature (478)..(488): n is a, c, g, or t
  misc_feature (505)..(563): n is a, c, g, or t
  misc_feature (617)..(637): n is a, c, g, or t
  misc_feature (652)..(652): n is a, c, g, or t
  misc_feature (658)..(674): n is a, c, g, or t
  misc_feature (690)..(691): n is a, c, g, or t
  misc_feature (693)..(693): n is a, c, g, or t
  misc_feature (696)..(814): n is a, c, g, or t
  misc_feature (1579)..(1579): n is a, c, g, or t
  misc_feature (1604)..(1604): n is a, c, g, or t
  misc_feature (1637)..(1637): n is a, c, g, or t
  misc_feature (1676)..(1676): n is a, c, g, or t
  misc_feature (1684)..(1684): n is a, c, g, or t
  misc_feature (1744)..(1744): n is a, c, g, or t
  misc_feature (1748)..(1748): n is a, c, g, or t
ttgtgcctctttcacacgagcgttttataatgtagaaaaaaagatggtggttgttagaaaatgagagaagcagatattttcttgttggggcgctgtttttttccccagccgtttggggagaaaataataaaatgtctcccacaaaaaggagcccacaggtgtgttttttctccgcccccctgtgggggttctctccactgggtggcaaaaataattcttttttgtggtggaggaaggggtgtcctcccgcggggtgggcgcgaggagaggttggntaaatataaaatgttccaccccccccttctccggataaaaaaaaggcgccgccgcccgcggctgtgaaaataatatatataaaagaagattttccccccaccnnnnnnnnngtaaaaaaatatcaccaaaaagggggcccccaaaaattaccatttttggggtttgttttgggaaaaccctcttggtgaccagccccgcgtannnnnnnnnnngaggggaaactcagaannnnnnnnnnnnnnnnnnnnnnnnnnnnnnnnnnnnnnnnnnnnnnnnnnnnnnnnnnncaggctcctggggcgccgcccccccaatgcccaaagaaataaataatttttccnnnnnnnnnnnnnnnnnnnnncccggttgcgtaaangaaagnnnnnnnnnnnnnnnnnggtgggtttggggggnncncannnnnnnnnnnnnnnnnnnnnnnnnnnnnnnnnnnnnnnnnnnnnnnnnnnnnnnnnnnnnnnnnnnnnnnnnnnnnnnnnnnnnnnnnnnnnnnnnnnnnnnnnnnnnnnnnnnnnnnctccaagccctttaatattcacttaaacagttgaggcacaagcaataataaaactgcattttttacgttacaaaaagattttgtatgttatctgcatgatataccaattttctcaatctcttctgcaataacatctcattaacactctggtccacatgttgatttaataaagtcagaatggcaggtgggaggatggtaaaataaacttaccaaggggcaaaaggaaccaaacatttactgagtgccgactatgcaagctctactaggttttacacactttacataaacgtgaacctaagttctagttatcagttaacaggccagcattgctacagccagtaagtctatgttttcaatgttctttcgcttttaagtacaaattgtggaacaaaactatatctttgcccaaagaagcacatcaactgttgcactaatacattattttccatttccaaagttttttagtaagtgtgcaacattagcacatggaaacgctcaagctgtgtattagttcactgaaatctggggtttttttgttctcacctgctgagcaccatttggccagcatcactacaacaagctgattacatcaccttgtaaaacttaagatggggatgaatagtgtttggcaattacatttctgggagaaaaaactgctgattttttctttaactcgacacagctagctttaaaaagtggtactcatttttaagcacaaagttgtcatttaaaatagaaacgtacttgggttaatgaaactgtaanatgaagataccaacgctttttcaangcattacagcaaagccagtatgttaagagcaangtgacacccagctcatactgcactccagttcccaggaancggcgttnctaccctccccaactaagctgccctcactccccagcagcctccttttctgagccatcttncttntgagtattgccctggtccttcaccctgtttctcccatgccccttaaattgggggggccaaatctaatctggtggctgtcacaacaacgctggttggacaa

SEQ ID NO: 71591 - DNA, 918 bp, Homo Sapiens
gcggccgctcagcaaggaaagaatgggctcagaaaaaggagggctggctggaggagtgaggggcagcttaagtttggggagggtagaaacgccgtttccttgggaactggagtgcagtatgagctgggtgtcacttggctctgaacatactggctttgctgtaatgcttgaaaaggcgttggtatcttcattttacagttcattaacccaagtacgttttcttatttaaatgacaactttggtgctttaaaatgaggtaccactttttaaagctagctgtgtcgagttaaagaaaaaatcagcagttttttctcccagaaatgtaattgccaaacactattcatccccatcttaagttttacaaggtgatgtaatcagcttgttgtagtgatgctggccaaatggtgctcagcaggtgagaacaaaaaaaccccagatttcagtgaactaatacacagcttgagcgtttccatgtgctaatgttgcacacttactaaaaaactttggaaatggaaaataatgtattagtgcaacagttgatgtgcttctttgggcaaagatatagttttgttccacaatttgtacttaaaagcgaaagaacattgaaaacatagacttactggctgtagcaatgctggcctgttaactgataactagaacttaggttcacgtttatgtaaagtgtgtaaaacctagtagagcttgcatagtcggcactcagtaaatgtttggttccttttgccccttggtaagtttatttttacatccttcccacctgccatttctgactttattaaatcaacatgtggaaccaaaagtgttaaatgaaaatggttattgccagaaggagatttgaagaaaatttgggtattatccttgccgaataaccttacccaaaattcttttttggttaaccgt

SEQ ID NO: 71592 - DNA, 834 bp, Homo Sapiens
gtagtgccgccgggactcttggcgggtgaaggtgtgtgtcagcttttgcgtcactcgagccctgggcgctgcttgctaaagagccgagcacgcgggtctgtcatcatgtcgcgttacgggcggtacggaggagaaaccaaggtgtatgttggtaacctgggaactggcgctggcaaaggagagttagaaagggctttcagttattatggtcctttaagaactgtatggattgcgagaaatcctccaggatttgcctttgtggaattcgaagatcctagagatgcagaagatgcagtacgaggactggatggaaaggtgatttgtggctcccgagtgagggttgaactatcgacaggcatgcctcggagatcacgttttgatagaccacctgcccgacgtccctttgatccaaatgatagatgctatgagtgtggcgaaaagggacattatgcttatgattgtcatcgttacagccggcgaagaagaagcaggtatttattttaataaaggaatggttggtattctagttaatcaagtaattcttttattagcaaggcagaaactagtgtttttctataaacttgaatgttaattgtacaggtgtattttacaattttgtttaattaaaaaaatgttactatattcaataatcaacctggtcaaaacctttcaggtttcttcgtttgagtcagtcgcctgattcagaatgtcacgagccttatgatatcatgctgaggcgccttgcaaatccgacaattaaaatcctcctagaacttgagggtgatcagcataagaggccaagatcccttcgagtcatctaaacctagcttcacc

SEQ ID NO: 71593 - DNA, 1230 bp, Homo Sapiens
  misc_feature (81)..(115): n is a, c, g, or t
ccagtactgtaagatcactataggcgcccctctcatagcgaacgacgagcgcagcgagtcattgagcgaggaagcggccgnnnnnnnnnnnnnnnnnnnnnnnnnnnnnnnnnnncagtcgacggtaccggacatatgcccgggaattcggccattacggccggggagtgccgccgggactcttggcgggtgaaggtgtgtgtcagcttttgcgtcactcgagccctgggcgctgcttgctaaagagccgagcacgcgggtctgtcatcatgtcgcgttacgggcggtacggaggagaaaccaaggtgtatgttggtaacctgggaactggcgctggcaaaggagagttagaaagggctttcagttattatggtcctttaagaactgtatggattgcgagaaatcctccaggatttgcctttgtggaattcgaagatcctagagatgcagaagatgcagtacgaggactggatggaaaggtgatttgtggctcccgagtgagggttgaactatcgacaggcatgcctcggagatcacgttttgatagaccacctgcccgacgtccctttgatccaaatgatagatgctatgagtgtggcgaaaagggacattatgcttatgattgtcatcgttacagccggcgaagaagaagcaggtcacggtctagatcacattctcgatccagaggaaggcgatactctcgctcacgcagcaggagcaggggacgaaggtcaaggtcagcatctcctcgacgatcaagatctatctctcttcgtagatcaagatcagcttcactcagaagatctaggtctggttctataaaaggatcgaggtatttccaatccccgtcgaggtcaagatcaagatccaggtctatttcacgaccaagaagcagccgatcaaagtccagatctccatctccaaaaagaagtcgttccccatcaggaagtcctcgcagaagtgcaagtcctgaaagaatggactgaagctctcaagttcaccctttagggaaaagttattttgtttacattattataagggatttgtgatgtctgtaaagtgtaacctaggaaagataattcaaccatctaatcaaaatggatctggattactatgtaaattcacagcagtaagataatataaattttgttgaatgtattaacatcatatggtctgaaaatgtgggtttttatttggcacatttaaataaaatgtttcaaaaaagaaaaa

SEQ ID NO: 71594 - DNA, 1082 bp, Homo Sapiens
cagtcgacggtaccggacatatgcccgggaattcggccattacggccggggagtgccgccgggactcttggcgggtgaaggtgtgtgtcagcttttgcgtcactcgagccctgggcgctgcttgctaaagagccgagcacgcgggtctgtcatcatgtcgcgttacgggcggtacggaggagaaaccaaggtgtatgttggtaacctgggaactggcgctggcaaaggagagttagaaagggctttcagttattatggtcctttaagaactgtatggattgcgagaaatcctccaggatttgcctttgtggaattcgaagatcctagagatgcagaagatgcagtacgaggactgggatggaaaggtgatttgtggctcccgagtgagggttgaactatcgacaggcatgcctcggagatcacgttttgatagaccacctgcccgacgtccctttgatccaaatgatagatgctatgagtgtggcgaaaagggacattatgcttatgatggtcatcgttacagccggcgaagaagaagcaggtttcttcgtttgagtcagtcgccttgattcagaatgtcacgagccttatgatatcatgctgaggcgcctttgcaaaatccgacaattaagatcctcctagaccttgaggtgatcagcataagaggccagatcccctcgagtcatctacacctagcttcaccttattctttaaagggcagaaaatttgagacggtgatcgccgtaacagtaaatttggcttacaattggggcccccctccggtttagaaagaggaacaccagattgaccacattcccaactagaaaaatcttcttgcgtcaatcaagcctcacctggctcatttggctgtcagtttgatcgtcgttagattgaagaaaacatctagatgcagcgatcggctatagatacttctagatcgtctagatctactagaccatgggccaaagagggtcgacctgcaaacttgcaaggtttattttaaatacacattacagtgttttatattatgtaatgctaagttgtaattcagcttttaacaaatctttttttaggtagttaaa

SEQ ID NO: 71595 - DNA, 1184 bp, Homo Sapiens
ggcgggtgaaggtgtgtgtcagcttttgcgtcactcgagccctgggcgctgcttgctaaagagccgagcacgcgggtctgtcatcatgtcgcgttacgggcggtacggaggagaaaccaaggtgtatgttggtaacctgggaactggcgctggcaaaggagagttagaaagggctttcagttattatggtcctttaagaactgtatggattgcgagaaatcctccaggatttgcctttgtggaattcgaagatcctagagatgcagaagatgcagtacgaggactggatggaaaggtgatttgtggctcccgagtgagggttgaactatcgacaggcatgcctcggagatcacgttttgatagaccacctgcccgacgtccctttgatccaaatgatagatgctatgagtgtggcgaaaagggacattatgcttatgattgtcatcgttacagccggcgaagaagaagcaggtcacggtctagatcacattctcgatccagaggaaggcgatactctcgctcacgcagcaggagcaggggacgaaggtcaaggtcagcatctcctcgacgatcaagatctatctctcttcgtagatcaagatcagcttcactcagaagatctaggtctggttctataaaaggatcgaggtatttccaatccccgtcgaggtcaagatcaagatccaggtctatttcacgaccaagaagcagtcgttccccatcaggaagtcctcgcagaagtgcaagtcctgaaagaatggactgaagctctcaagttcaccctttagggaaaagttattttgtttacattattataagggatttgtgatgtctgtaaagtgtaacctaggaaagataattcaaccatctaatcaaaatggatctggattactatgtaaattcacagcagtaagataatataaattttgttgaatgtattaacatcatatggtctgaaaatgtgggtttttatttggcacatttaaataaaatgtttctaactagatttttgatttgtgttcaatattaacacttcttaatttgatatatttgagagtcagacattataattgttaaccttattcatacatacctacattcagaattgaaaggtggttggttaagtcttgaacatcactattctatgcataaaactttggccaggatcttaagggactttgaaa

SEQ ID NO: 71596 - DNA, 1295 bp, Homo Sapiens
  misc_feature (1249)..(1249): n is a, c, g, or t
ttttttttctctctccaagtccttcctttaatgtcaggtagtgcttcaacccaaacacaagcagtatacataccatagagaaagggacctgagggcatctgagtcatgcatggtgtggtacatacaaaccttggcccagcccaaaggagcagtcaagggcctggaagaaagatggtttgctctttccccctcctcctctctctttcctaccgggcttaaagtccgtggaagagaaagtttttaatcagtggaactgataaggcctcagggccgtggagggtagatttggttgttcagtaatataaaatgtgtttaagaaaaaaaacagcccaggcttcccagcagtagcccatgtgttggctggttcagcagcctgacctctacatctagacaaggaagtgaggagggtgattgctgggcattggtgtaggtttatgacggagcagcataagattttccgtgccctgtgaacacgtatacaaacattcatagccccttcccctcagccctgctctgctgcaaggaagctgctgagagtgagtgacagctgggcacaaagtgtcttgtgagaccagctatagggtctaatgcagtgaagtcagtcatttaggacctattttcacacaggggcaaggaaaaaccagaaacaacttctctcttaccctttaaactaagatacttcattctacacgattacctgaaacaaatgtctcaggtcaaatcacaagccttagcttctgctagggtttgaagtctgggaaatatataatccagctcttctctttcagtccaagctctagcttgtcagcaagactgttgcagaagatctatccttaagaggcagaaacatctgcggtgaggaaggcagctattgaaggtattccaggagcatgagactgagtttgcagagctgagggttgtcaatttccttttctactgatatcttcttcctttagagcaaacttcctccttaggacctcagagataagcacagcagggtcttcctccttcaataaactccggttcagatcttgactctgtttcattcggtgaaagtccttcaggatacccatcatgtctgcaaagctgctggccttggacaaagagacgcagtcatcctcttcagacgaactgcaggcagctttgtgttctggtttgcaacattcagggctggcagaacaaagcagggggactgatggaagctcagggacctccacctctgtctcctcggtgatgtcactaatgacanaggaagttgtagagtggaatgaggatccacaacaaggtaagggaga

SEQ ID NO: 71597 - DNA, 1090 bp, Homo Sapiens
  misc_feature (880)..(880): n is a, c, g, or t
gaggctggaccggtccggaattcccgggatgggcggttgaggctgggcggcccaaggtggaaggaggggccgtgaggtgagagagtccgggagcccgagcttgagatggcctgatatgaaggagtcacgcctcccgcctcccggagctgcccagtggctgccttgtccttcaagtgcaggagctggttcaaatgtcaggaatggaagccactgtgaccatcccaatctggcaaaacaagccacatggggctgctcgaagtgtagtaagaagaattgggaccaacctacccttgaagccgtgtgcccgggcgtcctttgagaccctgcccaacatctctgacctgtgtttgagagatgtgcccccagtccctaccctggctgacatcgcctggattgctgcggatgaagaggagacatatgcccgggtcaggagtgatacgcgccccctgaggcacacctggaaacccagccctctgattgtcatgcagcgcaatgcctctgttcccaacctgcgtgggtccgaggagaggcttctggccctgaagaagccagctctgccagccctaagccgcactactgagctgcaggacgagctgagccacttgcgcagccagattgcaaagatagtggcagctgatgcagcttcggcttcattaacgccagatttcttatctccaggaagttcaaatgtctcttctcccttaccttgttttggatcctcattccactctacaacttcctttgtcattagtgacatcaccgaggagacagaggtggaggtccctgagcttccatcagtccccctgctttgttctgccagccctgaatgttgcaaaccagaacacaaagctgcctgcagttcgtctgaagaggatgactngcgtctctttgtccaaggccagcaagctttgcaaaacatgatgggtatcctgaaaggacttttcaccgaaatgaaacatgagtcaagatcctgaacccgggagtttactgtgaaggagggaagacccctgccttgggctttatcttcttgagggcccctaagggaagggaaagttttgccctctaaaagggaaagaaacattatctcgtc

SEQ ID NO: 71598 - DNA, 496 bp, Homo Sapiens
  misc_feature (36)..(36): n is a, c, g, or t
  misc_feature (66)..(66): n is a, c, g, or t
caaatggttaactggaatgtttgttctgtgaaacantcatcctaggcgaagtttttttgttggttnttttaaattagtttatttctaaatcttagtcttccacatttctagaggccacctgacacaagtccctgtatctgaagtctagcatctcaaggctgatctggaagtgtgctagtatgctccctagtggataacttaatcttttaatacagttccgtcattcccatcttgttttcagaagagaaggtggctacagccaggcataacatatccactgtgtgcatagagggtctcttcacgttgatgcttggcattccatcagctttctctaagtctttgctcaagttcaaccttaaaatgatgttagacaacaggtcccagtcagttccctctattttcacccattttgctcacaagccatattggcccgattagtggtactgtctgactcacgtgtgtgatccaaataaaggtagctgctgaccacaaaaaa

SEQ ID NO: 71599 - DNA, 780 bp, Homo Sapiens
  misc_feature (38)..(38): n is a, c, g, or t
  misc_feature (69)..(189): n is a, c, g, or t
gtacggtccggattcccgggatatcgtcgaccacgcgntcgccacgcgttcgaacacgtatggctaatnnnnnnnnnnnnnnnnnnnnnnnnnnnnnnnnnnnnnnnnnnnnnnnnnnnnnnnnnnnnnnnnnnnnnnnnnnnnnnnnnnnnnnnnnnnnnnnnnnnnnnnnnnnnnnnnnnnnnnnnntgaaccactgggcccagcccaaaccttcaccttctaagggcactgggatgaacagaccgatcggcttgagggtgggcaaaggggtgtgggctaggttataaggaagtggtaccaaataactgtgtgcctgagttccaccgcaagattactaaaagcaggaccagaccagaaactgctaaagaacatggcctgtttgacatgttcatgagtcacctgacccacagcatatatgcttatgactaaaccctccactcctgattctcaagagtgtatcacctgtcagcaaaatgaatagtgggatattttgggccattttaaatgtgaaattttgcctctttaatgttaattcaaaactatatcaatgttttcttgttcccacctctaacccaaggaaaaaagagcaaaacatactatgcaaaggaagtttaaacttaagttttccttaagggtcagccaacaatgactttcagtcaaatggattaactggaacatgtttggtttctgtcgtaaacagatcatcctaagcgaaagttttccggtgttgctttcaaaattagtttatttctaaatcttagtcttccacatttctag

SEQ ID NO: 71600 - DNA, 1429 bp, Homo Sapiens
  misc_feature (472)..(489): n is a, c, g, or t
  misc_feature (978)..(988): n is a, c, g, or t
  misc_feature (1189)..(1298): n is a, c, g, or t
  misc_feature (1306)..(1320): n is a, c, g, or t
  misc_feature (1345)..(1354): n is a, c, g, or t
gctacttaggaacggaacggccctcttcagtctcctctgtacattcagaagggattaccataggcagacgccagggtgggcctgggaagacaggccctcttcaacaggctcaactcagtttccttataaccctctgactatgcggatgctcagcagtactccaccaacaccgattgcatgtgctccctctgcggtgaaccaagcagctcctcaccaacagaacaggatctgggagcgagagcctgccccactgctctcagcacagtacgagaccctgtcggatagtgatgactgaactgcacaaagtgaggggaacagggtgcaggagagggatctctagtttttgtggtttaatttttagtagcaggtcaaaaacctgccctcctgtgacttattccctgagacttttcaggagagccagcccacagatgatgaagaaatgatggaagttcatttggagagtcaaatgggnnnnnnnnnnnnnnnnnnctgcctttgatacaggcaattcagtggactataataatagtggagggttgagatgtagagtttttaaaaagtgaacagttgctgttcttacatctgtaaagaaaaccataatgtctttaaatcactcttctgtaaatagatgacctttttgcagtgtatatccccttgctgtagtatctggtgtacttatgttcaaatcagcgcatcaactttgggggtgatttttaaaaatctttttgtctatctatctttttaaccctagccttctaaacaacctcatacagcccagttacataatgttggctgtcacgggcattgtacttttatctgatattgtttcctctaaattcagctttccagtgatgtttaaaatcttgtgaaaatgtttagatttttaacacagaccctgtcataaaatctgtacattagggtcaaaaggtaaaagtaacaaattctgccatattgtaaatttccagtgcaggctttaannnnnnnnnnncattagtagcactgaaaaaatattactgcatgggtatgttctagttcagtttataaagttttaaaggcttatttgaggcatacctcactgttacgcacactggtaatttaaccatgcccctaagtattccttttctcctgcatttgatgcagcccaacaaagcttttgttttgaaataaatttgactaccctgtccataannnnnnnnnnnnnnnnnnnnnnnnnnnnnnnnnnnnnnnnnnnnnnnnnnnnnnnnnnnnnnnnnnnnnnnnnnnnnnnnnnnnnnnnnnnnnnnnnnnnnnnnnnnnnnttgggggnnnnnnnnnnnnnnnaaaaattttttaaaacctttttttnnnnnnnnnnccccaaaaggaaaggaaaaggggccaaacttgttcccaagaaaacccgggcaaggacaagggttggaatcccccc

SEQ ID NO: 71601 - DNA, 640 bp, Homo Sapiens
  misc_feature (153)..(186): n is a, c, g, or t
gctgttgaatgagtcctaaaactgatactactgttaagtggaccaagtttggtgaagcagaatgtgacaaaggttgattaaggaaggaacaactcaaggacattgggaatgataacttttccacttgagaactactttatgttttactgtaannnnnnnnnnnnnnnnnnnnnnnnnnnnnnnnnncaaaagaaaatagtatttacaggtggcttcttttaaaatataaaaatataaagcaggaatgtatatgaaatgtcagattttattgtatttgcagagtattagctttgaaattgaataaagaaagctgtttgtagttttaaaatgccttattggtatcaattagaaatttcttctattttttgatgtacttagagctttttgagtgtagaattttaaatggcaggattttacagtgtttacatgcaagtgcattttataagtgttctatatgtgtaaaatagtattttcaactggaaagtgttggctagtgcaaaaggcctggccattttctggttcccatgatgttgcctacactgctagactacagtttagtatcgctttgtatcatgaggccaagaaattccatgttgtttgtaaatagaataattgaaaaagcaataaacatttattgaac

SEQ ID NO: 71602 - DNA, 1303 bp, Homo Sapiens
cagtcgacggtaccggacatatgcccgggaattcggccattacggccggggtaggaggccaagacttggcagaggatgtagtctaggtgtcctggtatatataaatggtcactcacttcgtttatatattccacactcagaaaagaagtcagagttttttctgagtaatacaaaaaccatcacttacataatttgtataagaaactttaaacagttttaatcaaaactatgagtaacatcaaaaatgctttaagattctatatttggaatacctgtgaagtagtatgactacatcatgttaaatatttattttcttctatgattttggagcagcaatttttattttaaataaaattccacttttaagaaattcagggaagatttggtcacattgaagatacagtatttttgtagtatttataaactgttctaaatgatagactatagaaaacatttttgtcatatgaaggtaaatcagtccattattttggatcatttaaactgaacattacaccttctgggctttgatttatgaagtggcacagaatctaactttgcactgaatatcttttcattcacatctcctctgccttagtcacaatggcaacagtacagaaaattctatcaaacctcagaatatagtagaaataattaagctgttgaatgagtcttaaaaattatactactgttaagtggaccaagtttggtgaagcagaatgtgacaaaggttgattaaggaaggaacaactcaaggacattgggaatgataacttttccacttgagaactactttatgttttactgtaatttttaaagttttttggtccttttggttattttgcaaaagaaaatagtatttacaggtggcttcttttaaaatataaaaatataaagcaggaatgtatatgaaatgtcagattttattgtatttgcagagtattagctttgaaattgaataaagaaagctgtttgtagttttaaaatgccttattggtatcaattagaaatttcttctattttttgatgtacttagagctttttgagtgtagaattttaaatggcaggattttacagtgtttacatgcaagtgcattttataagtgttctatatgtgtaaaatagtattttcaactggaaagtgttggctagtgcaaaaggcctggccattttctggttcccatgatgttgcctacactgctagactacagtttagtatcgctttgtatcatgaggccaagaaattccatgttgtttgtaaatagaataattgaaaaagcaataaacatttattgaacaaaaaaaa

SEQ ID NO: 71603 - DNA, 967 bp, Homo Sapiens
aggagcgaggcctgggtggcgttccgagacgaggccggagaggcagcagcaccccgagctgtcaggcgttccgccgcggccgcgaggcccgccggccggcggggagctacgcccggacggccagcaggcccgcgggagtggggctgccgcggctgaggcgaggcgggccgcgcgcgtcggcgtcacagcccgcggcagaggcgcccagggcggccgggcccacgacgccgaaagcgccgctgcggttgccgcctcggaggctcccccgggccccggcggctggacccggcgcgggcgggaggctcgggcgggcggtccggcccgggactcgggtttgggcgaccaggaggtgccggtggccgcgctcggacccggtgacttaagagattaaaattaatttggttgctgttggttctgaacaaataatgagttcttttatttgaggtatgccattttgaagactgagacgttggagttttatcctagaggataaaggaaatctttgggaaagtcagtattttatatagcaaaaatatgaacctcaaactgaatcctctaaaggccccatacaatgaagtagacattggtggaaacatttacacccagtcagcttgaagagtttcaaatggaccctaccactgagaaatcaagatggcagtctactatggggaattgaggaaaaatggattaatacaagagtcctgtgataatatacaaccaagacagggttcttttaacatggattccatgcagtgaatgaagacataggtttcttacccaacacaaatggacagtggatttgactttctaaagactttttttgtggacattttgacatttggagaagaaagatggcacactaacccagataatagtttttatgcctggaattttttgcagtttgatttgtatgcgtatgacctcttgaaatgttaatttttaataaaatttgtaacacttaaaaatt

SEQ ID NO: 71604 - DNA, 927 bp, Homo Sapiens
  misc_feature (353)..(372): n is a, c, g, or t
  misc_feature (818)..(852): n is a, c, g, or t
acggacaattaattaaatacattcaagaggttaaacgtatcaatcaacctccaaaattccaggcataaaaactatatctgggttagttgtgccatctttcttcgccaaaggtcgagaggtccacaaaaaagtctttagaaagtcaaatcccctgtccatttgtgttgggtaagaaacctatgtcttcattcactgcatgatccatgttaaaagaaccctgtcttggttgtatattatcacaggactcttgtattaatccattttgtcctcaattccccatagtagactgccatcttgatttctcagtggtagggtccatttgaaactcttcaagctgactgggtgcttgatgnnnnnnnnnnnnnnnnnnnncgctgttggcatcttaatcttttaaacagaaaacatccacccaccttgaagatatcctaccatacacaaaactttcattttgtaacagctttcaactatgaaattgtaaagttgtatgcaaaacacacacacaactccttgataagactgcacgccaaagtaacaagtgggtgtgtaatatccacagagacatttgtatcaatcctgattaagtccacagcgaagagtacagacttgtataataattctagaatctaatcactcgaattattcggtgtacatcgggcagtttttacttggagatgaaattcagcattcgtggtgagctggatttacagagacaacgtggattatcaatttcaatgccagtacaggttccgagcttcttccgagatggtgtcggtaatgtctgaattcccgggcatatgtccggtaccgtcgactgnnnnnnnnnnnnnnnnnnnnnnnnnnnnnnnnnnncggccgcttcctcgctcactactcgctgcgctcgtcgttcggctgtaagcgctagcgcctatagtggctatcatt

SEQ ID NO: 71605 - DNA, 997 bp, Homo Sapiens
  misc_feature (859)..(867): n is a, c, g, or t
aggtagcgaggcctgggtggcgatttcggcacgagggatggccggagaggcagcagcaccccgagctgtcaggcgttccgccgcggccgcgaggcccgccggccggcggggagctacgcccggacggccagcaggcccgcgggagtggggctgccgcggctgaggcgaggcgggccgcgcgcgtcggcgtcacagcccgcggcagaggcgcccagggcggccgggcccacgacgccgaaagcgccgctgcggttgccgcctcggaggctcccccgggccccggcggctggacccggcgcgggcgggaggctcgggcgggcggtccggcccgggactcgggtttgggcgaccaggaggtgccggtggccgcgctcggacccggttctccaacggaggagctttttaacctctttccggtgaggtgggaactcatcttcatgatctaatttaaaagaacaatggaaccctgactacgtttcaacaaaaataaaacttgtttttttccctcctattgggtgttggctttttactctttcaaagccgattttgaaacggctgcagtgatacctgcgaaaggtgactttaggagattaaaatttaattttggttgctggtggggttctgaaacaaataaatgaagttcctttttattttggaggggatgcccattttttgaaagaacctggaaaaccttttggaagttttcttatcccctagaagggaataaaagggaaaattccttttgggcgaaaagtcccctaaatttctatttttaccccaaaacatttttgaaccctccaaaacttggaatccccctcttaagggccccccccttccaatgggaaaggataaaaccttnnnnnnnnnaaaaaaatttttcacacccccagttccaggtttggaaaaaagattttccaagagggaccccttctcccccgggggaaaaattcaagaaaggggcaaatcctcacctatgggggggatatttggagggaat

SEQ ID NO: 71606 - DNA, 240 bp, Homo Sapiens
tggtacgggcagtctagtcagctgaagagttcaatggaccctaccactgagaaatcaagatggcagtctactatggggaatgaggaaaaatggattaatacaagagtcctgtgataatatacaaccaagacagggttcttttaacatggattccatgcagtgaacgaagacataggtttcttacccaacacaaatggacagtggatttgactttctaaagacttttttggtggactagag

SEQ ID NO: 71607 - DNA, 1100 bp, Homo Sapiens
  misc_feature (25)..(25): n is a, c, g, or t
  misc_feature (164)..(164): n is a, c, g, or t
  misc_feature (971)..(971): n is a, c, g, or t
  misc_feature (1025)..(1043): n is a, c, g, or t
ttttggtaccgttcaccttggtgtngacctccccaccaagacgggcacggatctggggagagcgaagacgccataccaaccctttcccggcgtgccgatcatttgcagtgccgacaggttccgactgaagcggcagtggcccacgcatttatggagtagctcantcttagccccccagcttacacttgtgctcccgctcgtttttgtgtgaattgtagcggatacaatttcacacaggaaacgctttgcttgatacgaatttaatacactcactttgggaatttgccctcgaggccaggaattcgccaggagggtgggcatgaacttcgacattccaaaaccccaagccaggaaaaagggcagggcctggtcctagggatgcttactggcagcaagagcagtgcccagtcagggtgggaggtagcaccaggctctgtgaccctcacccaagtgggggggtggtcagtggaagctggggaggcttcactcagctcaaccctgcagaccccccatatgagaacccccctcctcccaccagctgggggagatgacatcactgctctctccatggggagggggctcacagggcaccaagttcgggatcctaggactggcaggacctgctggagcctgagatgggccccaggggcctgaggttgcctcctcctgtccagacccagccttggcacctcccaagactgccaagggccctaccatggccccacagcccccagggctggcagttccatctaggagggtgcctctaggccccactctcaggctaggatggagaggcagatctgggcctggtgaggtgacctgcttctggaggggcagggccgcacccgagagcagggacaggtgcccgaacacagggtctccaggacgtagcgcccccccgcatacttgaatgtatgtgcgtatttattgctcacgtctgtgccatgttgtcaatgggtcctttccaaccncaagaggtacatttgtttttctgtttttcctgaaaaataaagtcggccaagtgnnnnnnnnnnnnnnnnnnngcctacagccgcggccgcaagcttattccctttagtgagggtaattttagcttgcac

SEQ ID NO: 71608 - DNA, 510 bp, Homo Sapiens
  misc_feature (185)..(185): n is a, c, g, or t
gcggaccatcggtgaccgcatgggggaggccaaggcatgtggaaacctgggaaacacactcaaggtcctggggcgcttcgacgaggctgccgtctgctgccagcggcatcctgagcatcgcccaagagcagggagacaaggttggggaggcgagggccctctacaacatcgggaaacgtgtaccnacgcaaaagcaagcaactgtcctggaacgccgcaaacgccacgcaggacccccggcacctgccgcccgatgtccgagaaaccctgtgcaaggcctccgagttctacgagaggaacctgtccctggaaggggcaagggccgcacccgaagagcagggacaggttgccccgaacacagggtcttccaggacgtagcgcccccccgcatacttgaatgtatgtgcgtatttattgctcacgtctgtgccatgttgtcaatgggtcctttccaacccaagaggtacatttgtttttctgtttttcctgaaaaataaagtcggccaagtg

SEQ ID NO: 71609 - DNA, 1667 bp, Homo Sapiens
  misc_feature (106)..(106): n is a, c, g, or t
  misc_feature (111)..(111): n is a, c, g, or t
ttctccccccatttctgctgggacggagggggtgttatcattaggagggggtccccaggggttgacctgagggaaagcttcccccagtttccactgacctaccccncccgnttggtgagggtcacagagcctggtgctactccccaccctgactgggcactgctcttgctgccagtaagcatccgtaggacccaggccgtgacctttttcctggcttggggttctggaatgtcgaagttcatgcccagccattccctatgctttagagataggcccggctcctgtcgaggcccgtgcagggccctgggactcggcggggggcacgtcagggctgccactgcagcgtggtctgccatgcgtggtctggggggccttctgtggttgctgacctctgaccgggaagtggggagacaggcttggagggagccctgccccaggacgaagctggaggggtggagcatgcctgtcacacggccatcccaagaccagctctggggggacagaacatggccctgtccttggtggccccaagaggcggctcagagacacctttggggagggtgggggagacagcagggtttcacatttggcagggcagggcagaacgggaagggcttgggggagaggatgcgggagtctgacagcaccaggtcggggccgacatgccgaaggccccgtccggcctgcggcaggggcagaagggaggaagccgagggccatgggggccagcccgggatggaagcacgccctcccaccacgggcagcttggcctgagcctgtcgccctgggtcggggaggccgtggggctgcatgcccagtgcctgtcctcggcaatggcctcgggaggacgtggctgtgactgtgagaccggcgtccaggagtgggggcagggtgggcctggcggtgggcacagggccttagctcgcaccaggctggcactgctgctggggctcgggcgggccgcctgccccctgctccgggcccccggcgaggtccacccgctgctcgtccatgcgcttagcctgcaccctctgaatgaggctgaagaagtcctcgtccggcatggtagggccccggggcagtacgtcaggtggtgggcagcgctggtcatcgatcctggaggactggtacttgatgagcatgttgaagaagtcgtcccccggctcctggggctcgccgtggcctcggaggtgccctgcattgctgtgggtgattcgcagccccggcaggctgcccacgctggcccgctggtcgtccagccggcggctctgggagctggcgatgaggtcgaagaattcctcggtctggggcgaggccgtcatcgagggctgggcgatcctgtcctccagggtgggggcggccgtggcctcggcagccccggcctggccatcgtccaggggacaacgctggtcgtccatgcggctgctctggaacttggtcaacaggtcaaagaagcactcctcgtccgaagacggggccctcgggatgctcgtgcgtggcacgtgcacccggacgtcggcgctgtccagcggggagtggctgccctcccggggcctcctctcagcgtccgggccttcctggtacttcctgctcctcacggggaggggtagcgagtccctgctgggcccccgcctcgtgccgaattcgccacccaggcctcgctcctt

SEQ ID NO: 71610 - DNA, 1355 bp, Homo Sapiens
ccggggtcaatcggacgaggggtatctgcgtgtcgggacgtgcggaggctctcactttccgtcatggcgctgaaggtagcgaccgtcgccggcagcgccgcgaaggcggtgctcgggccagcccttctctgccgtccctgggaggttctaggcgcccacgaggtcccctcgaggaacatcttttcagaacaaacaattcctccgtccgctaagtatggcgggcggcacacggtgaccatgatcccaggggatggcatcgggccagagctcatgctgcatgtcaagtccgtcttcaggcacgcatgtgtaccagtggactttgaagaggtgcacgtgagttccaatgctgatgaagaggacattcgcaatgccatcatggccatccgccggaaccgcgtggccctgaagggcaacatcgaaaccaaccataacctgccaccgtcgcacaaatctcgaaacaacatccttcgcaccagcctggacctctatgccaacgtcatccactgtaagagccttccaggcgtggtgacccggcacaaggacatagacatcctcattgtccgggagaacacagagggcgagtacagcagcctggagcatgagagtgtggcgggagtggtggagagcctgaagatcatcaccaaggccaagtccctgcgcattgccgagtatgccttcaagctggcgcaggagagcgggcgcaagaaagtgacggccgtgcacaaggccaacatcatgaaactgggcgatgggcttttcctccagtgctgcagggaggtggcagcccgctaccctcagatcaccttcgagaacatgattgtggataacaccaccatgcagctggtgtcccggccccagcagtttgatgtcatggtgatgcccaatctctatggcaacatcgtcaacaatgtctgcgcgggactggtcgggggcccaggccttgtggctggggccaactatggccatgtgtacgcggtgtttgaaacagctacgaggaacaccggcaagagtatcgccaataagaacatcgccaaccccacggccaccctgctggccagctgcatgatgctggaccacctcaagctgcactcctatgccacctccatccgtaaggctgtcctggcatccatggacaatgagaatatgcacactccggacatcgggggccagggcacaacatctgaagccatccaggacgtcatccgccacatccgcgtcatcaacggccgggccgtggaggcctaggctggccctaggaccttcttggtttgctccttggattccccttcccactccagcaccccagccagcctggtacgcagatcccagaataaagcaccttctccctagaaaaa

SEQ ID NO: 71611 - DNA, 1062 bp, Homo Sapiens
  misc_feature (250)..(263): n is a, c, g, or t
aactactggaccgattacgctaacctcttggccctttgtcaaaaaatggagccaaaaaggttgatttagacagaccccctgctcagtgcagcacctgttattctctgtatttatattaccaagggccttcggtaaattatgaaaaataggatgccacctgggacaacactgcttagacagcactggaagacctttataaatatactaggttgcttttctccaatcagcctagccttgatttgaaattcannnnnnnnnnnnnngagacggtgaaattcatttttaaaagatagttttaacctcagcgatctctgatgtttgcgctaatacccttgtaaaggctttcagaaattttaaagaattgctatgaaaggaaaagtaacattctagtttttctctgtaaaagaggttcacaaacggcagatcgctgttatgaaaaggaggggtggaagtatttaaggaattgtggcaaacaaagtcacagaagaatggatataagcaaaagtagcacactgaaaaaaatggggaaaagtggagtctagatcacaaactggtaagcttggtgatgttctctagccaaattcgaaggtaataacattgtattatggctttctgtttaaaagcagtttcgcttatttgattattcaacaaatctttattaacacgcattacgtgtaccagaaactgtggtacacttaactgtggagctggggaagcaaaagtgaacatgccgccttaagtgagttcagatggcttatcttccggttggggaggcatcaagtacacaggtccgttgtaaaccagtgtcttaagtgctaaccttatcacatttgctattagaggatattaaacatgtcagacttcttggagaaagttgatattttcatgttccaagtttgggaacatcattgaattcagacagatctggattgaaacagattaaagtgcctacactttaatagctgcgttcctctcagttaactcccccatttatctgtgccttgtctgtacacctggattaagaatagtacctacttcataaagtataactaataatgtata

SEQ ID NO: 71612 - DNA, 886 bp, Homo Sapiens
gaaatagctgtaaaataagtagatagctgctgttaatataatacagtacattttggggggcatatgtgtggttggggggtccttaaaaatcaaaatgtgccatttcagttggatgaattactagaggtaataacaaatcttactataaaatcaagaggtttaagaacatacactgggcagatgttgattccgtgcatgcccaccttttattaccaaacaaggttttgtttatatgattgtattagaaatgctcagacttccccagaaatgaaccataaattttggaacttcctttcagctcaagaggttcagctatattgtatttgtgcagtgtaatcactactatttctgctcggtttcctaaaaggaaaaaaaaggcacagtggtgatgaccctcatgaatgagccacgcttctgcattcttcttagaaactgctgtgaaaaacaatttatgtttgcagggtttaaaaatcagtaaaaatgggaatgattgagctaaaacccactctatgagaaggaagattactgaaaagcatgtgacatattgctacaaagattttttttcctaaatgattcagtaattgaatgattatttaatatatagtgctatcaagcaatccctggtactttggacttccatggcttgttatataaaattacatttttacatgtaaaaataaactaaacaaatctaatgataaaatataatgtcagatccatgttctaaaaaatttttgtaatgacatgacattacaagagtataacaaatggacattaaatcatggccttgccattaaaatatggaaagcagagcagtacatattcaaatgtattcacgaaagtcaaaagattacctatcgttctacaataaaatacatggaaatag

SEQ ID NO: 71613 - DNA, 1123 bp, Homo Sapiens
tgaccaatgggcttcctttctatagggaggataccagcaggcccttaagccttccaggacactaaggtcgtgggagcgggactgcaacaagcaatgccagataactgagaaatcatgttctttgtggactatttcagacaaccaggttccgacagtccagcccagaacttttccttctcattttgggttttctcttctcctgctttcctggggagagattaagcgctcattaagcagaggagcccactttgaggagagcaaagcacaagcttgcctgaagaatggatcccaacttctccccggcagctctgcctccctaagtctgtgaagccgcagccctgccctgtcctgtcctgtcctgacttcatctctccttctgcccaagtctgtgtcccatcagacttgcagcctttcagcttaacagttgcccggtcctgctggccccttttcctctggcccccctcttctgaaacaggatgtgcacacatgggccatagccctaaggactcctgccagaccacacagcccacacctggccctgttcacggctgttccacccacccctctttattctggagcatatcagggaaagaaaagttggatgatagattgccttcaccctcacagcgcacaaataaagctacgatgccaactttgcagatgcaagaatgaagacactgtgtgggtagggcactgagctgctgcagtttcacagggaaggctgcacctatcaatcaatcaatcaatcctatcccaagacacagttccctgagggaagaagaggagggacctggaaaggcctaagggtgtactctctgtatagccccgctatgggaaaataaagtggagtagggggcatagaaatgcaccatctaagggaaatcttttgtcaggtggtggccaggggtgttcaaagctcattgcttgcattaccagctattagagagatcagagagggcaattaattaaaggctcctggttctcacatcccaaacacacacagttttggcctgctgggctctctaacttggatgtctttgagtcctcagtggtgccccctgcctgcctcccctttgccctatgccaaggtgtgctggcaaatattaaacaaccagctttttgg

SEQ ID NO: 71614 - DNA, 890 bp, Homo Sapiens
tgaatggtacagtgtgcattctctccagctgaaaactttcttcaactttcctaaattcttactaaattcagaggaataggataaagatcacttagagaaagggtgcttatggacatagcctgagtttcctttaacctctctccaatgggtgcttttaactagcttctacaatggcaagctgtttcagtttgcaaaatcactgcccagcatgtttgaagtcagttggcaccttaaaacacctgttctccagcccttggacagtggagagaatctgtaaaagtgtgaccccctctaagatttcgttgtaaatgatcagattcggttccagttttattcttgttgagtttttccctatgaaggctccttttgaatgtgtcttgagacccaaattgagcatgttgctgttattcctgccctgcacctgtggagcaggagtggcagggctggctgtgctgggttccagctcgctcccaccgagggactagcttggcctttgcgctttgattccagatagtaagatgagtggaagtgtttatcgagcatgcaaaagaaaccctcacggctaacggctctgggagttgtgtctgtgtgacctgagagtgatccatctcctgcctgtgtgaggtagcagtgggcacttttcattgagacaaactccagggtgtccagagggggttctgccccttgtgaaggcccattcctggcacttagagacagaaagaactcagcaatctttcgttctagttatattcggtctttgaaactgacaatctttgaaatgtgaatactgtaacaatatgttttcttggattgttgtctttaaaaaggatttttgtgaagcaattgatttatcaaagcaaaaaaattaaaaatagaaacttgctttaaaa

SEQ ID NO: 71615 - DNA, 674 bp, Homo Sapiens
ggggttgcctcgcccaaagaagactacaatctccagggaaacctggggcgtctcgcgcaaacgtccataactgaaagtagctaaggcaccccagccggaggaagtgagctctcctggggcgtggttgttcgtgatccttgcatctgttacttagggtcaaggcttgggtcttgccccgcagacccttgggacgacccggccccagcgcagctatgaacctggagcgagtgtccaatgaggagaaattgaacctgtgccggaagtactacctgggggggtttgctttcctgccttttctctggttggtcaacatcttctggttcttccgagaggccttccttgtcccagcctacacagaacagagccaaatcaaaggctatgtctggcgctcagctgtgggcttcctcttctgggtgatagtgctcacctcctggatcaccatcttccagatctaccggccccgctggggtgcccttggggactacctctccttcaccatacccctgggcaccccctgacaacttctgcacatactggggccctgcttattctcccaggacaggctccttaaagcagaggagcctgtcctgggagccccttctcaaactcctaagacttgttttcatgtcccacgttctctgctgacatcccccaataaaggaccctaactttcg

SEQ ID NO: 71616 - DNA, 1235 bp, Homo Sapiens
agggagcgaggcctgggtggcgaattcggcacgagggcggcggcggcccggaggagaacgggcggagggcgcgggccgaccgggcgcaccgaccatggcctccaaatgccccaagtgcgacaagaccgtgtacttcgccgagaaggtgagctccctggggaaggactggcacaagttctgcctcaagtgcgagcgctgcagcaagacgctgacgcccgggggccacgccgagcatgacgggaagccgttctgccacaagccgtgctacgccaccctgttcggacccaaaggcgtgaacatcgggggcgcgggctcctacatctacgagaagcccctggcggaggggccgcaggtcaccggccccatcgaggtccccgcggcccgagcagaggagcggaaggcgagcggccccccgaaggggcccagcagagcctccagtgtcaccactttcaccggggagcccaacacgtgcccgcgctgcagcaagaaggtgtacttcgctgagaaggtgacgtctctgggcaaggattggcaccggccctgcctgcgctgcgagcgctgcgggaagacactgacccccggcgggcacgcggagcacgacggccagccctactgccacaagccctgctatggaatcctcttcggacccaagggagtgaacaccggtgcggtgggcagctacatctatgaccgggaccccgaaggcaaggtccagccctaggctacagcggctctcatgatgtgggctcacctgcgccccagaccctgcaggggcccccctgcttggctctgctgggagagtgctcagccgcccagtcctgcctgcaagcccagggcgagtattggaggaggggcagccacgggcagagcaccatgcccatccccgagtctctggtgtgtctgccccctctggcatcctctgggcgtcccatgatcccttctgtgtctgcgtgtccgaatccccgtgtgaccctgtcccagcattttcccgccgaccctgcgtgtccccgtggcgctgtccgctctccctctcctgctgcccacccacctgccagtgttatttatgctcccttcgtgggtgatggccacgccctcaccatgtccctggcagagggcttccctccgggatcccctgcctggtgcccacactgcctcgcaagcgctcgccaccctcacgtggctcacctgctgttgagccttgtgctgtcaataaacggtttgaggattgcaaaaaa

SEQ ID NO: 71617 - DNA, 1774 bp, Homo Sapiens
caccggcaggttgtactcaaagagattgcccgttttcttctaaaagttctatagtttgagctctgaagtttcgctctttgatccactttgaggtaaattttggcagatggtatgaggcaggagtagcgtttcactctcctgcctggggcggtgcctgcaccgtgtggaaaaaggttgtccgtatcccactgaacggtcacagctcccttgtctaagatcaacgagccctgaacatgagggttccaactggactcttagttctacgtccactggcctgtgtctgcccaccattactaccgccgtgccatactgaggtcaggctggggcttttctgggctgctgggtgagctggagaatgcggttgtgtgacccgcaggaagggcagagctgagcgtatgacctgtgtcgttcccctccagaaatacccgcagcccaaagggcagaagaagaagaagatcgtcaagtacggcatgggtggcctcatcatcctcttcctcatcgccatcatctggttcccgctgctcttcatgtcgctggtgcgctccgtggttggggttgtcaaccagcccatcgatgtcaccgtcaccctcaagctgggcggctatgagccgctgttcaccatgagcgcccagcagccgtccatcatccccttcacggcccaggcctatgaggagctgtcccggcagtttgacccccagccgctggccatgcagttcatcagccagtacagccctgaggacatcgtcacggcgcagattgagggcagctccggggcgctgtggcgcatcagtccccccagccgtgcccagatgaagcgggagctctacaacggcacggccgacatcaccctgcgcttcacctggaacttccagagggacctggcgaagggaggcactgtggagtatgccaacgagaagcacatgctggccctggcccccaacagcactgcacggcggcagctggccagcctgctcgagggcacctcggaccagtctgtggtcatccccaatctcttccccaagtacatccgtgcccccaacgggcccgaagccaaccctgtgaagcagctgcagcccaatgaggaggccgactacctcggcgtgcgtatccagctgcggagggagcagggtgcgggggccaccggcttcctcgaatggtgggtcatcgagctgcaggagtgccggaccgactgcaacctgctgcccatggtcattttcagtgacaaggtcagcccaccgagcctcggcttcctggctggctacggcatcatggggctgtacgtgtccatcgtgctggtcatcggcaagttcgtgcgcggattcttcagcgagatctcgcactccattatgttcgaggagctgccgtgcgtggaccgcatcctcaagctctgccaggacatcttcctggtgcgggagactcgggagctggagctggaggaggagttgtacgccaagctcatcttcctctaccgctcaccggagaccatgatcaagtggactcgtgagaaggagtaggagctgctgctggcgcccgagagggaaggagccggcctgctgggcagcgtggccacaaggggcggcactcctcaggccgggggagccactgccccgtccaaggccgccagctgtgatgcatcctcccggcctgcctgagccctgatgctgctgtcagagaaggacactgcgtccccacggcctgcgtggcgctgccgtcccccacgtgtactgtagagtttgttttttaattaaaaaatgttttatttatacaaatggac

SEQ ID NO: 71618 - DNA, 665 bp, Homo Sapiens
tgggtgaggagtggtgcacccagccccgaggccagtggtgctcggggccttccgtgtgagttctagtgttcacttgatgccggcgaatagaattagagaaaactctgacctgccgggttccagggactggtggaggtggatggcaggtccgactcgaccatgacttagttgtaagggtgtgtcggcttttccagtctcatgtgaaaatcctcctgtctctggcagcactgtctgcactttcttgtttactgtttgaagggacgagtaccaagccacaagaacacttcttttggccacagcataagctgatggtatgtaaggaaccgatgggccattaaacatgaactgaacggttaaaagcacagtctatggaacgctaatggagtcagcccctaaagctgtttgctttttcaggctttggattacatgcttttaatttgattttagaatctggacactttctatgaatgtaattcggctgagaaacatgttgctgagatgcaatcctcagtgttctctgtatgtaaatctgtgtatacaccacacgttacaactgcatgagcttcctctcgcacaagaccagctggaactgagcatgagacgctgtcaaatacagacaaaggatttgagatgttctcaataaaaagaaaatgtttcactaaaaa

SEQ ID NO: 71619 - DNA, 1269 bp, Homo Sapiens
  misc_feature (175)..(175): n is a, c, g, or t
  misc_feature (965)..(965): n is a, c, g, or t
  misc_feature (968)..(968): n is a, c, g, or t
  misc_feature (970)..(971): n is a, c, g, or t
  misc_feature (1115)..(1123): n is a, c, g, or t
  misc_feature (1127)..(1138): n is a, c, g, or t
  misc_feature (1188)..(1223): n is a, c, g, or t
gacgagcccctcaacttcctggatcccaaggtggcccaacgagtcctggccacgcagccagggccaggccggggcaggaagaaggaccacagcttcaaggtgagcgccgatggcggctgatcataagggaggaggcagacggcaacaagatggaggaagaggaaggtgccaaagngaaggatgaagagatggctgacccaatggaagatgtgatcatcaggaataaaaagcaccagaagctcaagcaccagaaagaggctgaggaggaggagctggagataccccctcagtaccaagctggaggctctggcattcatcgccctgtggccaagaaggctatgcctggggctgaatacaaggccaagaaagcaaaaggtgatgtgaagaagaaaggccggccggatccctatgcctacatccccctcaacagaagcaagctcaaccgcaggaagaagatgaagctgcagggacagttcaaaggcctggtgaaggctgcccggcgaggttcccaggtgggacacaaaaaccgcagaaaggatcgtcgaccctgaggcccagggcccctgggctgccctgtggtccagtctgaggccctttcagcccccaggctgccttgccaccagctccaggtgctcaagattctggcagagcctggactcaggatgacttggaactagggcttggctctcagaagtcctggattttggaaactccaaatggaatcacccttcagagacatccctggtgcctggagatgggaatgtggcctcagtgcctctgagtaggtgccatgaggcacctttgctttctgcccagagtggccatgagcaccagaacagatgatctccatttccgccagctgcctgtagccacgtggcatcctgcctgtggtctgggtgagatttactgtgaccagatgtagaataaatgtgtctcatcctgccgacgaccggctcaacaagganatnanngcttgtcggccggctccgcccttcaaaaacttttcaaaaccattccgttggggccccgggcccccaaaagggaaaggggaaaatggggcaaaactttgtttcccaaagaaaaacccggggcaaagaaaaaaggggcgggggttnnnnnnnnncacnnnnnnnnnnnncccccgggggggaaaccccaaagggttttttggagaaaaattcccccaannnnnnnnnnnnnnnnnnnnnnnnnnnnnnnnnnnncgcccctccaaaaagggaggaggtcccccccgcgcgcctccaaaat

SEQ ID NO: 71620 - DNA, 1109 bp, Homo Sapiens
cagtcgacggtaccggacatatgcccgggaattcggccattacggccgggtgatatatcctagttttgaaagtaattttcttttttctttctagcatttgatgtctaaataattttggacatctttttcctagaccatgtttctgtcttactcttaaacctggtaacacttgatttgccttctataacctatttatttcaagtgttcatatttgaatttctttgggaagaaagtaaatctgatggctcactgatttttgaaaagcctgaataaaattggaaagactggaaagttaggagaactgactagctaaactgctacagtatgcaatttctattacaattggtattacaggggggaaaagtaaaattacactttacctgaaagtgacttcttacagctagtgcattgtgctctttccaagttcagcagcagttctatcagtggtgccactgaaactgggtatatttatgatttctttcagcgttaaaaagaaacatagtgttgccctttttcttaaagcatcagtgaaattatggaaaattacttaaaacgtgaatacatcatcacagtagaatttattatgagagcatgtagtatgtatctgtagccctaacacatgggatgaacgttttactgctacacccagatttgtgttgaacgaaaacattgtggtttggaaaggagaattcaacaattaatagttgaaattgtgaggttaatgtttaaaaagctttacacctgtttacaatttggggacaaaaaggcaggcttcatttttcatatgtttgatgaaaactggctcaagatgtttgtaaatagaatcaagagcaaaactgcacaaacttgcacattggaaagtgcaacaagttcccgtgattgcagtaaaaatatttactattctaaaaaaatgagaattgaagacttagccagtcagataagttttttcatgaacccgttgtggaaattattggaattaactgagccaaagtgattatgcattcttcatctattttagttagcactttgtatcgttatatacagtttacaatacatgtataacttgtagctataaacattttgtgccattaaagctctcacaaaacttt

SEQ ID NO: 71621 - DNA, 182 bp, Homo Sapiens
aactaccttaaacttaagggaaaagttctcctatcttgatttcactggaatataggctttaggagctctgtaaggctggtatttttgtctgttttatcttctactgtatcgccagtgcctggaacagtgtctggtgcacataataggtgctcaataaaaatgtgttcaatggatgaatttct

SEQ ID NO: 71622 - DNA, 1229 bp, Homo Sapiens
gcgctaggtacgaggcctgggtggttgaatcggcacgaggcgagcagctccttttccagattcagagctggtatcggagcggggagacctgggatagcaagttcagcaccatcgcctccagctacgaagagtgccgggctgagagcgtgggtctctacctctgtctccacccgcaagtgctggagatctttggctttgagggggctgatgcggaggacgtgatctacgtgaactggctcaacatggttcgggccgggctgctcgctctggagttctacacacctgaggccttcaactggcgacaggcccatatgcaggcccggtttgtgatcctgagagtcttgctggaggctggcgagggactcgttaccatcactcccaccacaggctccgatgggcgcccagatgcccgggtccgcctcgaccgcagcaagatccggtctgtgggcaagcctgctctagagcgcttcctgcggagacttcaggtgctgaagtccacaggggatgtggccggagggcgggccctgtacgaggggtatgcaacggtcactgatgcgccccccgagtgcttcctcaccctcagggacacggtgctgctgcgtaaggaatctcggaagctcattgttcagcccaacactcaccttgaaggctcagacgtgcagcttctggaatacgaggcgtcagctgctggcctcatccgatccttctctgagcgtttcccagaggatggacccgagttggaggagatcctcacacagctggccacagccgatgcccgattctggaagggccccagtgaggccccatctggccaagcttgaggaagatgtgtggccttgcccccaattccatcagaccaaggctgcaagtggccctccattcgtgtgtgtatttaggggctggggagggggaggggcaggagcttggaccttggtactacctcagctgagggtggtgacacaaccccttccatttgtcagcactttccagcctgccaattgcttcccctctgtgatctcatttcatctgcactgccatacgtggagtgagcaagacagggcttaccatcctgtctaccagatgaggaaatggcagttctgagaagtcactggtctagatcccgcaggtggcacgtgacagctagggttcaaaacgttctcaccaaatccaatgctcctcacatattaattttataaccagacaaataaatattagagacaaccaccatc

SEQ ID NO: 71623 - DNA, 1016 bp, Homo Sapiens
  misc_feature (140)..(148): n is a, c, g, or t
  misc_feature (267)..(301): n is a, c, g, or t
gggtatctaactttcagtttactcaaaaacttttgggtaaataaaaaagggaagtacagatagtttaggttgtgcatggttgcatgaattttgaagtcatttctatgtggagcattatttttcttcttgttaaatatagnnnnnnnnngagattctagtacaaagttactgtttaacaaaagcaacataaactctgggaaagatttcattttgccatgttatatttactgtttattctgtgtactagtacatatctttaaattaccnnnnnnnnnnnnnnnnnnnnnnnnnnnnnnnnnnntatcacttggaattagcaatatcacccaactggctttaaaattgaaaatttaaataacatggtggcatgaagtacaattcgagtattaggcaatttgcatagtgttcctcatgctactttctgttacacctctattatattagttttgaatataaacatctttttcagaccaaaaaaaactttattgtatgagagcttatcttatcctgtttatttttccaatgcttttctgtaatacattatgtaatttaaaaaatattcctttttaaacagcaacagaaatgcactataaaatatagtatgtgattaaccaatcctgcttccatatttaagcactgggaatggaaacttaatctctgtgactacaaagggaagtttttgtgccttggtgttccagtcactgattgtggttttagaatcttctgtggctgacttcttgtattcaactctggtttattatcttaatcttcaacttcagacatacatttgtgtgtttatatgctcacaggtggactgagaaatcagttacatcttaagtgacctacagggtatatgttggcaaaagcagactgtgtatatgtcttataaagttgaatttatgttcagtgtgtttggaagtgtatagcatgtaaattatttcatatatgatttaaaggtaattaaatgttcacattttactttgaatgtttttcttctggataaaacaaatggaatc

SEQ ID NO: 71624 - DNA, 877 bp, Homo Sapiens
  misc_feature (648)..(648): n is a, c, g, or t
  misc_feature (650)..(650): n is a, c, g, or t
  misc_feature (669)..(669): n is a, c, g, or t
ttcacattcaacttccctgttctcatctttggtaggattctgccagttgcttttgcatcttctgttcctgggtaatggtgggtcttaatggaggctgggtggaccactgcccgtccactcttcaacaggaggaacagcatgccaccacagtaacacacattagagaaaggacagaggtctgctccttcctgccacctttctcctggccccttagcattcccccagtccctccctcttcaccttgctccgtctatgtcttcccagctcagccttttccccactcttaaatactgtactacttcactgtaagaacgaaagaatagttaggataccaatgagtaaaagggttcctgttcactctgactctgtgcaaattgtattacagtagaccgctgacgttcccaagtgacagatccagggcctttcaaacatccccaaagtcatggccatactcaccattagccagtttctaacatctgtttcagggtatccagctgtagatgttcttatcccccatacttgtgagttcttggggttgctcacaaatactaggggtttttgttgtatttttaacaaatatatcctaatgtcatatttattctcttttgtaactgctgtctttacaataaagaaatcatctgcaaaacncnacaatccgtcgacagtganccctgtccggccgcctcgggccctcaaaaagttttccagaccatttcctttgtgcgcgcggggcccagtaaggtaagggaaacatggggcataggctgggttcccaaggaaaaacccggggccatggaactaaggccttgggattcctccaccaaataaaaaaacaccccccggtgggacaaccgaaagcgtttccgtgaacaaaaaa

SEQ ID NO: 71625 - DNA, 481 bp, Homo Sapiens
tgggcagaaggcccctccagggggaatgctccaacaggaaagagcccctcccccacttttaagcactgagttaggagtgctaactcctaaactgggaccccctaccctgttctcccctgaggccccgttcctgggaggggcacccctcaactgtcactttatggactgtctgtgcaattacgtccaccaaagacccgtgttgggggtactgaaggagaggccctgggggaccctctgaagcatttctgcctcactttatgtcatctgcttctcccctgttggggctaaggaaggagataggtggctcctaaaagaggaggccatcttctcacccaccccttcctctttggcacagctactcctggctgggggtggggccttgggggtctgggctgggcatccatggtcactgcctcagcccagccaggctgtgcctttgactttaaaataaaagtccacccagtgctgtgtgtggcaaaaa

SEQ ID NO: 71626 - DNA, 1057 bp, Homo Sapiens
  misc_feature (105)..(105): n is a, c, g, or t
  misc_feature (149)..(149): n is a, c, g, or t
  misc_feature (187)..(187): n is a, c, g, or t
  misc_feature (217)..(217): n is a, c, g, or t
  misc_feature (219)..(219): n is a, c, g, or t
  misc_feature (223)..(223): n is a, c, g, or t
  misc_feature (241)..(241): n is a, c, g, or t
cggccgggtctgagggacggagccccataccaccctttcccgggtgcgatcatatcagtgcagacagtcccgatggaagcggcatggcgcacgcattatgtgatngtcatcataggcacccagctttacatttatctcccgctcgtatntgtgtgattgtgacggatacatttcacacaggaacagntagacatgatacggaattgatacgactcantntagngattcgacctcgagccanggaatcgcacgggagtctacaacaacctcactgtggtggggaacgccaagcacaacgtgcatgtcatgaacatctccacaggcaagaaagtgaagggggctccagcaagctgacaggccgtgtccttgctctgtcctttgatgcccctggccggctgctctgggcgggtgatgaccgtggcagtgtcttctctttcctctttgatatggccacagggaagctgaccaaagccaagcgtttggtggtgcatgaggggagccctgtgaccagcatctcagcccggtcctgggtcagccgcgaggcccgggatccctcactgctcatcaatgcttgcctcaacaagttgctgctctacagggtggtagacaacgaggggaccctgcagctgaagagaagcttccccatcgagcagagctcacatcctgtgcgcagcatcttctgtcccctcatgtccttccgccagggggcctgcgtggtgacgggcagtgaggacatgtgcgtgcacttctttgatgtggagcgggcggccaaggctgctgtcaacaagctgcagggccacagtgcacctgtgcttgatgtcagcttcaactgcgacgagagcctactggcctccagtgacgccagcggcatggtcatcgtctggaggcgggagcagaagtagggtcctgtcggccctgctgctgtcctccatcccacccctcttactccagcctcgtgttgtaaataaagtttcggtggtcatgctgagggccggctcccagctctgccggggacggacagggcagagggcagcgggcagctccaggaacacggtga

SEQ ID NO: 71627 - DNA, 1389 bp, Homo Sapiens
gctggaccggtccggaattcccgggatatcgtcgacccacgcgtccggagacagaaggaaccggcgacagtggtctcagggccgctccggggggcctcaagaaccggaggcagccccggaggtggtccccgagtcccgggctatgctcttggatctgagaagggaaggcggagggcggcggggacaagatgggtggagaatgtcaagcaaggaatgctaggcgggggaggggcgttgctatggcgactggggaggggcggtgtctgttctgaatcgctgtgtgtcacccgggcgctgcccaggaagggcagggctggggtgatgaccatggtaacacccgggtgggagttcgtgacatctccggcgcggagggactcgatgtctatggcaatggtcgcctggtggaagggacggaactagatcccttcgctcgggacgctcacattccaggcccttgtcctgcaggctgccgcgggcggacacgccagaggaggaggccggggaatggccgcggtgtggcagcaagtcttagcagtggacgcgaggtacaacgcgtaccgcacaccaacgtttccacagtttcggacgcagtatatccgccggcgcagccagctgctgcgggagaatgccaaggctgggcaccccccagcgctgcgtcggcagtacctgaggcttcgggggcagctgctgggccagcgctacgggcccctctccgagccaggcagtgctcgtgcctatagcaacagcatcgtccgcagtagccgcactactcttgaccgcatggaggactttgaggatgatcctcgggccctgggggcccgtgggcaccgtcggtctgtcagcagaggctcctaccagctgcaggcgcagatgaaccgtgccgtctatgaggacaggccccctggcagcgtggtgcccacgtcagcagcagaggcaagtcgggccatggccggggacacgtcactgagcgagaactatgcctttgcgggcatgtatcatgtttttgaccagcacgtggatgaggcagtccccaggggggcggcttccgccaatgatgacccgacacccccccgggcctgctggctcacccgacggggcagcatcctccctggtgcccacctgggggccctggcccctcccaccaggggtttctccgaaccaacgcggactatcccccgccgcggggcatccaaaatttccccgggagcccttctcccgaagcccgcgcacccgccgggataacttgtacgtgggaggcgaaacaaagcgcgcaatatccacggcctctaagaggacacgcgccccacgagacccacagacggtgacccgcggtctccctggaggcggccagggggaccggtgcccggacgcgagatacttcacgagacg

SEQ ID NO: 71628 - DNA, 1828 bp, Homo Sapiens
ggcagcatcttgcctggagcctgagaaagggaggagagacagaaggaaccggcgacagtggtctcagggccgctccggggggcctcaagaaccggaggcagccccggaggctgccgcgggcggacacgccagaggaggaggccggggaatggccgcggtgtggcagcaagtcttagcagtggacgcgaggtacaacgcgtaccgcacaccaacgtttccacagtttcggacgcagtatatccgccggcgcagccagctgctgcgggagaatgccaaggctgggcaccccccagcgctgcgtcggcagtacctgaggcttcgggggcagctgctgggccagcgctacgggcccctctccgagccaggcagtgctcgtgcctatagcaacagcatcgtccgcagtagccgcactactcttgaccgcatggaggactttgaggatgatcctcgggccctgggggcccgtgggcaccgtcgttctgtcagcagaggctcctaccagctgcaggcgcagatgaaccgtgccgtctatgaggacaggccccctggcagcgtggtgcccacgtcagcagcagaggcaagtcgggccatggccggggacacgtcactgagcgagaactatgcctttgcgggcatgtatcatgtttttgaccagcacgtggatgaggcagtcccaagggtgcgcttcgccaatgatgaccgacaccgcctggcctgctgctcactcgacggcagcatctccctgtgccagctggtgcctgacccagccacagtgcttcgcgtgctacggggcccaccccgtggtgtctccgacttcgcctggtccctctccaatgacatcctcgtgtccacctcactggatgccaccatgcgcatctgggcctctgaggatggtcgctgcatccgagagatccctgaccccgatagcgctgaactgctctgctgcaccttccagcctgtcaacaacaacctcactgtggtggggaacgccaagcacaacgtgcatgtcatgaacatctccacaggcaagaaagtgaaggggggctccagcaagctgacaggccgtgtccttgctctgtcctttgatgcccctggccggctgctctgggcgggtgatgaccgtggcagtgtcttctctttcctctttgatatggccacagggaagctgaccaaagccaagcgtttggtggtgcatgaggggagccctgtgaccagcatctcagcccggtcctgggtcagccgcgaggcccgggatccctcactgctcatcaatgcttgcctcaacaagttgctgctctacagggtggtagacaacgaggggaccctgcagctgaagagaagcttccccatcgagcagagctcacatcctgtgcgcagcatcttctgtcccctcatgtccttccgccagggggcctgcgtggtgacgggcagtgaggacatgtgcgtgcacttctttgatgtggagcgggcggccaaggctgctgtcaaacaagctgcagggccacagtgcacctgtgcttgatgtcagcttcaactgcgacgagagcctactggcctccagtgacgccaagcggcatggtcatcgtctggaagcgggagcaaaagtaggggccctgtcggccctgctgctgtcctccatcccaccccctctttactccagccctctggtggaaataaagttttcggtgggtcatgcctgagggcccggctccccagctttgtccgggggaacgaacaggggcaaaagggcaaccgggcaagcttccaggaaaaaccgggggaaacgggggaaaacaataccccaccccccctttttctctcctacggg

SEQ ID NO: 71629 - DNA, 1072 bp, Homo Sapiens
  misc_feature (605)..(615): n is a, c, g, or t
  misc_feature (921)..(931): n is a, c, g, or t
ttcgttcgagggagcagcagcccaggcggtgtcgtcatccattggggaagcgcacccttgggactgcctcatccacgtgctggtcaaaaacatgatacatgcccgcaaaggcatagttctcgctcagtgacgtgtccccggccatggcccgacttgcctctgctgctgacgtgggcaccacgctgccagggggcctgtcctcatagacggcacggttcatctgcgcctgcagctggtaggagcctctgctgacagaacgacggtgcccacgggcccccagggcccgaggatcatcctcaaagtcctccatgcggtcaagagtagtgcggctactgcggacgatgctgttgctataggcacgagcactgcctggctcggagaggggcccgtagcgctggcccagcagctgcccccgaagcctcaggtactgccgacgcagcgctggggggtgcccagccttggcattctcccgcagcagctggctgcgccggcggatatactgcgtccgaaactgtggaaacgttggtgtgcggtacgcgttgtacctgcagggtcaggatgcagggcaggcagcaggcacaggacagagggaatcaatcagctcnnnnnnnnnnntacggcaggagagtgaggtgtgtggcagtgactggggcactaggtggtaagaatgactagcagtggtgatgagggacctcattggtcctgtggtgggagtgagtctgcagtaataatgagcatggtcatgaggtcagtttgcagacaacagagtcagtctgctgccctgctggggtccctacggggtgaatgggtcagcgcagacaaaaaatagggtcagtataccagggcgacagaaatcagactgacaatatgggggttagccttgggaggtgaaggggtcagaaaggggaaatgatgaagttnnnnnnnnnnngtctaggggacacccataggggataggatgtcacctgcctgagccccacctccctctcacaggtagccgctttgcgcatgcccaatctgaccacattttcccagcttgctgtttagatccttccggcgcagcgagctcacc

SEQ ID NO: 71630 - DNA, 692 bp, Homo Sapiens
cttcataacgtcagtggcctcatccgatcagatgaggactataagaggaaaaggtgaactcccttgaggaggaggaaatttgcctccagcctgcatccccagctcttccctgggtctccaggatgctggcctgccctcaagatgttagacttgccagcccccaaaatcctatgagccagttccttaaaacaaatctctgcatctccctccatcctgttggttctgtttctctagtgaggcctgactagtaactggggggttctagctctggccttatttcctgagagatggggacggagttccccttctggttccctttggtggttctggcgtggcttcaggcagaagaacagcatggagacctctctcctctgtaggccattcatgatggattgctgctcaccccacgtggccattaacacatggctgttggtttccaacctggccccttgtatgaaaaaccctaggtaaacacatcaaaataattatcccccggcatagcactttatttaaaagtccctcattttatgatgaggaaatggggcctccaggagggcaatgggcagagtgtgaccatcctacccactgcctctcaggagccccttgtatctgccacgagtggcctgcctcactgcaagctgtggcacagatacgtagttagacatggttaataaaaatcattgtgatttaaa

SEQ ID NO: 71631 - DNA, 684 bp, Homo Sapiens
  misc_feature (564)..(572): n is a, c, g, or t
aaaagaataacttaaaaagtaaaagtgtcctctatgtgaacatgaaaacagctaataaagatgtgttattttattttattattagtaatttgtcctcccatattggcaaagataaagcaattgacaaaaatggaattcttgttcaatactggcaggagtgaaaattggtagaacctttctagaaggcaatttggcaacatgtatgaaaacctaaatgttgatacacctttacccagcagtttgtttaggaatttatcctaatgaataaaagttgtccaagtcttcaaacatgagcccaaaggtatatttcatgatgtttatgatattaaaacattggaaacaactgaaacatccttcagtaaaagatggattaaataaattccatgcagttgtcatttaaaaatatttagatatatgtttattgctatggatatatgttcccaaaatattattgaatcaaaaagtagactacaggatatatgttgaatatgagctcatttataacattgaatattttaagataatgtatgtttcatagagagatcttcaccaaatgttaaggannnnnnnnnctgggctgtggtatttgggtgatctttacattcttcagactcatgtgtgtttgaaactttttataatgaacatatatcatttttattagaaaagaataaagtttttgaaaaa

SEQ ID NO: 71632 - DNA, 219 bp, Homo Sapiens
tagaaagatgttgagggcttccagggcacaaaggaaagagaagtaactgtgtctccttccccaaccatgtatgtgatacattcattctctaggattggaaattcccagaaagctgtgtcagcaatgagatttgtttcattgttttgccttgttttgtcattgagttgttatagttaaagtttattattttttaatgcagaaaaaagtgacttttggggg

SEQ ID NO: 71633 - DNA, 729 bp, Homo Sapiens
  misc_feature (495)..(504): n is a, c, g, or t
cattatgtgcgctgataagcgttcatggaacgcgttgaaattgtaattatatctgaggaattctgtatagattagaattctgtatagattagagagtgttgaaacggatgatttctatgctgagtttgtgctggtgtatgtgtgaagtgagtgagttgggtgtattgtgcgctaaacttttctgatagaggaagcctgattaaagaatggtccgtgctaaggacttgttagatctagttcactctccatttaataattatatgctatttctatattttcattctcctatcacctgtcttgcctttttcattattttattatgaaacttgtgtaaatacaattttgtttctgtactttttggcataacataaatctgtgaacttgaaatttgaattttgtgttagagatttttttgttgtttgtttagtcttgtctcagattttattatgtaaatcccattattcaaagttgcctaaatccatttggaaatctttnnnnnnnnnnttggggattcttaaagttgaatttattggcttttctgatccagttttgtttggaccaaaaaccagtattgtacaaagtattaagcatatatttttatatttactaaaatggactgtggtgactttggataataaggaaaagtttaatattaaagccatgtttattacagtataattaacatgttaaaccatgggataaatgccatcaataaaaaattatgacata

SEQ ID NO: 71634 - DNA, 1118 bp, Homo Sapiens
ggatttggagggaccctacgaaccaggagtcaggcgagccgatctggggctgcaggatgttccgctgggagcgctccattcccctgcgaggctcggccgccgccctgtgcaacaacctcagtgtgctgcagctgccggctcgcaacctcacgtattttggcgtggttcatggaccaagcgcccagcttctcagcgctgctcctgagggtgtgcccttggcccagcgccagctccacgctaaggagggtgctggagtgagtcccccacttatcactcaggtccactggtgtgtcctccccttccgagtgctgctggtactcacctcacatcgaggaatacagatgtacgagtccaatggctacaccatggtctactggcatgcactggactctggagatgcctccccagtacaggctgtgtttgcccggggaattgctgccagtggccacttcatctgtgtgggaacgtggtcaggccgggtgctggtgtttgacatcccagcaaagggtcccaacattgtactgagcgaggagctggctgggcaccagatgccaatcacagacattgccaccgagcctgcccagggacaggattgtgtggctgacatggtgacggcagatgactcaggcttgctgtgtgtctggcggtcagggccagaattcacattattgacccgcattccaggatttggagttccgtgcccctctgtgcagctgtggcaggggatcatagcagcaggctatgggaacggacaagtgcatctatatgaggccactacaggaaatctacatgtccagatcaatgcccatgcccgggccatctgcgccctggacctggcttctgaggtgggcaagctactctctgcaggtgaggacacctttgtgcatatctggaagctgagcagaaacccagagagtggctacattgaggtggaacactgtcatggtgagtgtgtcgccgacacccagctgtgtggtgctcgattttgtgattcctcaggcaactcctttgctgtgactggctatgaccttgcggagatccggagattcagcagtgtgtgagaagagcagccttcctttgtccctgtggtattcataaagtacccgctccacccgaaa

SEQ ID NO: 71635 - DNA, 733 bp, Homo Sapiens
agaaaattaaaaccttataatatttttctatcaagatgtatattttacagtcgtgccttttactctcattagcaaaaaagataaagattttattttggtatttacaagaattcccaggtacgaagatatctgcatgggtggaaatcaggttcaagcaacgtactttgcattaactgataatacctcagctgcggggttaaagttttcccagtatagagagactgtcactaggaacattgtattgatttattcaggtcattgagatcttctagatgtattttaaaaagaatgctttttggttatgtgttgctaccacagttaacactccataatgttcatgtcagccaaagaggactaaccaaagctgaaatctcagagaacaatttgctttactaagctgagtcaacttgagagcgaacttctaacaatgccgcactgtagtgtggctggttctaccactatgactttaaaacatgtttatatcatttttaatttttatgatacggtagtgtcagggagaaatgtaatgttctatatgaaattcctttttcaagtttgttcattaataacagttattaatttaaatcagcgttagagtttgtgctgctgcaactgctgtgaaaatttctctgagtaattctgatttgtgaatgatcccagaccaaccctgagattttgtcaacctgattaagtcaatatgaatgattaaaaagatgtgagaacactaaaaaaa

SEQ ID NO: 71636 - DNA, 2498 bp, Homo Sapiens
  misc_feature (11)..(11): n is a, c, g, or t
aggaggcctanagaccggcgctcccctttcccctcccgccggacctgccaggaggtgggctggcgcggagggagggccctgtcccctgtccctttaaggaggagggccaaacgccggcctagagtgcggcgtagcccccacccgccgtgccctcaccccagagcagctgcagcctcagccggccgcccctccgccagccaagtccgccgctctgacccccggcagcaagtcgccaccatggtgaagatcgtgacagttaagacccaggcgtaccaggaccagaagccgggcacgagcgggctgcggaagcgggtgaaggtgttccagagcagcgccaactacgcggagaacttcatccagagtatcatctccaccgtggagccggcgcagcggcaggaggccacgctggtggtgggcggggacggccggttctacatgaaggaggccatccagctcatcgctcgcatcgctgccgccaacgggatcggtcgcttggttatcggacagaatggaatcctctccacccctgctgtatcctgcatcattagaaaaatcaaagccattggtgggatcattctgacagccagtcacaacccagggggccccaatggagattttggaatcaaattcaatatttctaatggaggtcctgctccagaagcaataactgataaaattttccaaatcagcaagacaattgaagaatatgcagtttgccctgacctgaaagtagaccttggtgttctgggaaagcagcagtttgacttggaaaataagttcaaacccttcacagtggaaattgtggattcggtagaagcttatgctacaatgctgagaagcatctttgatttcagtgcactgaaagaactactttctgggccaaaccgactgaagatccgtattgatgctatgcatggagttgtgggaccgtatgtaaagaagatcctctgtgaagaactcggtgcccctgcgaactcggcagttaactgcgttcctctggaggactttggaggccaccaccctgaccccaacctcacctatgcagctgacctggtggagaccatgaagtcaggagagcatgattttggggctgcctttgatggagatggggatcgaaacatgattctgggcaagcatgggttctttgtgaacccttcagactctgtggctgtcattgctgccaacatcttcagcattccgtatttccagcagactggggtccgcggctttgcacggagcatgcccacgagtggtgctctggaccgggtggctagtgctacaaagattgctttgtatgagaccccaactggctggaagttttttgggaatttgatggacgcgagcaaactgtccctttgtggggaggagagcttcgggaccggttctgaccacatccgtgagaaagatggactgtgggctgtccttgcctggctctccatcctagccacccgcaagcagagtgtggaggacattctcaaagatcattggcaaaagtatggccggaatttcttcaccaggtatgattacgaggaggtggaagctgagggcgcaaacaaaatgatgaaggacttggaggccctgatgtttgatcgctcctttgtggggaagcagttctcagcaaatgacaaagtttacactgtggagaaggccgataactttgaatacagcgacccagtgggatggaaacatttcaagaaatcagggcttgcgccctcattttcacagatggttctcgaatcgtcttccgactgagcggcactgggagtgccggggccaccattcggctgtacatcgatagctatgagaaggacgttgccaagattaaccaggacccccaggtcatgttggccccccttatttccattgctctgaaagtgtcccagctgcaggagaggacgggacgcactgcacccactgtcatcacctaagaagacaggcctgatgtggtacgtccctccacccccggacccatccaagtcatctgattgaagagcatgacagaaacaaaatgtattcaccaagcattttaggatttgactttttcactaaccagttgacgagcagtgcatttacaaggcactgccaaacaagatgcccttgggagctgtgagggaaagaggacctgcgggcttagatcaatctcaattccttttcatgccctcctgcattgctgctgcgtgggtatttgtctccttagccatcaggtacagtttacactacaatgtaagctataggtggagcatcagcagtgagtgaggccattcttcatccttaggatgtggcaatgaaatgatggtgcaagttcctttctcttttgtgaatctttccccccatttcctgtttacatgtaacccaacaaaatgcaatttctagtgccttctgtccaatcagttctttcctctgagtgagacgtacttggctacagatttctgccttgttttgcgacattgtcccattcacacagatattttgggataataaaggaaaataagctacaa

SEQ ID NO: 71637 - DNA, 688 bp, Homo Sapiens
  misc_feature (673)..(673): n is a, c, g, or t
gagttatggtagtcatgagagcatctgatagctcctctgtgactcatccatttattttaatgacatctgaatatgacagtatattgaaaaaagaatgcatgttatttattccatactggggaagtgccactataacattgttttaaaaaatcttcaaaaatttcctattagaacctatcattgaattagaaaagcaagctttgccaaatgcctgattatgcctttactggtcctgctagctggcatgtttcaccaacttttccctagtgtttcctttggcactgttgagcccacactacaaaacatgaacaagtcccacaaaaccacactatgccctctgcttccccatcatgtggggaccatctgcctggacatccactgtggggtagcaggaagaactttggcctgggtggacacatggggttaattatctgtgtgtctttggtctatgatcaccgcattcttccatttgttcgaccctcagttttcctgcctaccagtaatgccctatgactcctccagctctggtatctgggatcttgagtctgaggggcaggtcacttgttgctatgggcttctgctcccagcaaaggcagtgggtgactgcttgactttagggttcagtctggcaatagctttgtttctggtgaagggaaaggttagatcatcctgntcctggccattcctg

SEQ ID NO: 71638 - DNA, 1315 bp, Homo Sapiens
aagggctcctacaatgacttcagcttcgtgacgcacaccaatagagagggcgtccccatgcgtaagggcgagcacctgggcgagttcaacctgggctccaccatcgtgctcatcttcgaggcccccaaggacttcaatttccagctgaaaacaggacagaaaatccgctttggggaagccctgggctcgctctagagtctctttcctgattatggctgctaagggatcttttccaaacagagtgagggtcttttcaagagggaggcccatgaggccatccaggtaagggcctgcctcagcgtggttgggagtctgaccaggtaggacttgaatgattcggctaccacctgttccagaggtgcagacaagaggtggcgagagcccccatcatgcccctcaacctatcccgttccttctgcctacaaataaaaagtgcaggctggaatgatctcagtcacatttggatctttttaaacactgtatagacggaagagcctgcattcctgaccgaaccttcagttggtctcggttgtcgttttttcttgctgctcctccccccatcacctgagctgttttctgttggccccttttgatatttggccttaacgctcctgctgcacagggtgaggtgcctccttggcacagactgtggatgcctctcccccagcagagccacacagccttcgtgacaactgctttccgttcccacattcacctcatcctgctctttagaaaaagcagtctttgtgcttgtggctgaacgcatcaccctggactctgctagtgtcttctgaggacactgatgacactgattaatgatacagacctttgcaggacctgatgagtgacccttctggagctggccaggtcctctgcagcaggcaagaccaatcaatcactgaacctgcctcatggcaccagagtgaacagggcaggcaggtagtaggcccagctggggaaatgggagagttcctgtccccctccacatatccctacatgaaatatgggaaagttgctgctattgattcagggtctgtcttggaggcagaggacccttggtggatagttggtcagtgcctggaaaacctgtcccagtttatcaggaacgcaggcctggggagcccccagtggcggggacagggccagatttcatgttgaccctggggatgctgtgaatttctcctgcaggagagacatcattgaattttttcaactgtatcagtagcacagtatttttgtatgaaaagtgggagacttctgaacagtaattcatttaattgcaaagcattttgaaataaaaaaaatcaaacttaaa

SEQ ID NO: 71639 - DNA, 647 bp, Homo Sapiens
  misc_feature (21)..(21): n is a, c, g, or t
agaattcggcacgaggggccncaggttggattccagaaaccagtgaagatgtggccacaggaggaggtgtgctgaggtggctgctgaccgtggactccctgcgcagtggcctgcagatgttggggctgggttacagctgattgaagctgagtggccctggggggtctgtgaggggagttcctccccagtgatgaaattctctccttccaccctcaaatccctagaccttgactgaaatgctccgtggtcgggagcctggtcaaggaggaggagctgctgagaggcattgttcgcccttgctcatagcttagctcgatgtccgtgtcagacaggagatgattgagaacagccttgcctgtcactgtcctagaacaccctggagtttagtgttctgtgtcagagtcttgggagcctccttcagacccagatgacgggcctccctctgtccaaggagcagctgtaaaggagaagagggatttcatttgtttggtggctgttaccttgtctgtaagtcaaacttggagttgagcagtgctttttaaacgattcccttttgcagctaaaatttcacagggctatttctaatacgtaagcaaatgttaccattgactttattaataaaatatagttttgatttgcaaaaaaaa

SEQ ID NO: 71640 - DNA, 1104 bp, Homo Sapiens
  misc_feature (1104)..(1104): n is a, c, g, or t
aggaacttctaagccggaaaaccaatgtatttgaaatgacagtttatttctgcctgaacctacactgtctaggaatctgttcctggaatcctcagggtatacagatttcttctcaaatcagagctgtaaaaactacccattcaccatttgggaaacacctttcttccacttcttattggaagccctggtggtcatgttgatcctctgctatgtttttctcccaaagccaaataatcctctttacagacttggggtttcatggacatcctcatcacccttaggtgatttgcatactcgggaacatcgttaccgtatctttggggaaaccatcgatattgcagtgggtaattgtctggatcgttttgctcgagtgctgaagatttctaacgacccaagtccaggatacaacattgaacagatggcaaagcggtaaggggacataaggtggaagcaggctggctgctggggcttcagcgatttccccatatacgaggcaagaagctggttgagctgccatacactgtaaaggggatggacgtctcattctcagggatcctgtctttcattgaggatgtagcccatcggatgctggccacaggcgagtgtactcctgaggatctgtgtttctccctgcaggaaactgtgtttgcaatgctggtagagatcacagagcgagccatggcacattgtggctcccaggaggccctcattgtgggaggagtggggtgtaatgtgaggctacaggagatgatggcaacaatgtgccaggaacgtggagcccggctttttgctacagatgagagattctgtattgacaatggagcgatgatagcccaggctggctgggagatgtttcgggctggacacaggaccccactcagtgattctggggttacacagaggtatcggacagatgaagtagaggtgacctggagggactaataagatcaacagaatcagagtagatagttccttaatcggaacccaaaggaccccgtgcctcaatctctatcctgatgtcatgggagtcctagcaaagctatagactccaagcaaggcttggggtcctttatggaaccccaggatgactcagcaataaaatan

SEQ ID NO: 71641 - DNA, 1006 bp, Homo Sapiens
aggctggaccggtccggattcccgggatcacattgaacagatggcaaagcgaggcaagaagctggttgagctgccatacactgtaaaggggatggacgtctcattctcagggatcctgtctttcattgaggatgtagcccatcggatgctggccacaggcgagtgtactcctgaggatctgtgtttctccctgcaggtaatgcagtaaaaaactgggacagaaagttggggctgaaggttttatattgtagagcagaactaatctgggatgcccctctaatattttctccttatctgtccctgacaggaaactgtgtttgcaatgctggtagagatcacagagcggagccatggcacattgtggctcccaggaggccctcattgtgcgaggagtggggtgtatgtattattgaaaagtgttcctctttcctattcttaacactatgcgtcttcctcctggtactctaaatcattaagcgtttggagtaggcttcccaatccttgcccctaatcccctatgtcattgttctaagtgagtgcacatgacgtgttctgctggaccatgaagagatggctaaaactaagctaatcctgttccctgcctctttgtaggtaatgtgaggctacaggagatgatggcaacaatgtgccaggaacgtggagcccggctttttgctacagatgagagattctgtattgacaatggagcgatgatagcccaggctggctgggaaatgtttcgggctggacacaggaacccactcagtgatttctgggggttacacagaggtatcggacagatgaagtagaggtgaccttgagggactaataagatcaacagaatcagagtagatagttccttaatcggaacccaaaggaccccgtgcctcaatctctatcctgatgtcatgggagtcctagcaaagctatagactccaagcaaggcttggggtcctttatggaaccccaggatgactcagcaataaaatatttttggttttttggt

SEQ ID NO: 71642 - DNA, 1365 bp, Homo Sapiens
taatacgtctaggtagcgaggcctgggttgcgaattcggcacgaggctttcccagtgctatctgcaggctggccagcttcctctgcgctccggaaagctgcggcccagcgcggactagtgaggacctccacagctcctgacattgccaggagtcctgtcggcgttttctcccagcctccgccatgccggcggtgctgggttttgaaggcagcgccaataagattggcgtgggcgtggtgcgggatggcaaggtgctggcgaacccgcggcggacttacgtcacgcctcctggcacaggattccttccaggtgatacagccaggcatcaccgagctgttatcctagacctgctgcaggaggcactaacagagtctggattaacctcccaggatatcgactgcattgcatacaccaagggccctggcatgggtgccccactggtttctgtggctgttgtggcccgtactgtggcccaactgtggaataagccattggtgggtgtgaaccactgtataggccacattgagatgggccgcctcatcactggagccaccagcccaaccgtgttgtatgtgagtggaggaaatacgcaggtgattgcatactcggaacatcgttaccgtatctttggggaaaccatcgatattgcagtgggtaattgtctggatcgtttgctcgagtgctgaagatttctaacgacccaagtccaggatacaacattgaacagatggcaaagcgaggcaagaagctagttgagctgccatacactgtaaaggggatggacgtctcattctcagggatcctgtctttcattgaggatgtagcccatcggatgctggccacaggcgagtgtactcctgaggatctgtgtttctccctgcaggaaactgtgtttgcaatgctggtagagatcacagagcgagccatggcacattgtggctcccaggaggccctcattgtgggaggagtggggtgtaatgtgaggctacaggagatgatggcaacaatgtgccaggaacgtggagcccggctttttgctacagatgagagattctgtattgacaatggagcgatgatagcccaggctggctgggagatgtttcgggctggacacaggaccccactcagtgattctggggttacacagaggtatcggacagatgaagtagaggtgacctggagggactaataagatcaacagaatcagagtagatagttccttaatcggaacccaaaggaccccgtgcctcaatctctatcctgatgtcatgggagtcctagcaaagctatagactccaagcaaggcttggggtcctttatggaaccccaggatgactcagcaataaaatatttttggtttaaaaa

SEQ ID NO: 71643 - DNA, 1004 bp, Homo Sapiens
  misc_feature (92)..(92): n is a, c, g, or t
  misc_feature (130)..(130): n is a, c, g, or t
  misc_feature (188)..(188): n is a, c, g, or t
  misc_feature (234)..(234): n is a, c, g, or t
  misc_feature (268)..(268): n is a, c, g, or t
  misc_feature (308)..(308): n is a, c, g, or t
  misc_feature (351)..(351): n is a, c, g, or t
  misc_feature (447)..(447): n is a, c, g, or t
gttacacaatgtagtctggtacctaaagtgcttgcatatactcattggaccccagttttgggactgaatagataaaacactctttgcagtanactatgtgggtgtactgagcacctgaaaagtttggagntggggataacatgtgtgtaggcagtagtcttcccacaggagttgcagataaggagtcntgatcctataaaaatgctgattctcagagccttgagatactgattnagaagtctgtgctaggtcaggtatccgcattganaaagctgcccccatgtattctgacggaagcagcaatgtgntgtctaggttcgctattgtgagaatcaagttgatatttacctnacctatatcctccacaaaagcagacagtctggctctgctcttctttcctccatccttagcccacagcacagaaactggcacattgcaggtgctttntgctatgtcagttcctcacctgcttaaagaggtcagggaggacagtcttcctgggcgactcctggcctcaggaactcagatgtgtgagcctcgcccataagaaacaaggtggaggaccctgtagggcaggaaaatcatgttaacagctttggcgtggggcactccccaggataggcacaggagctgtgcaggcaagtagaaaagagcactgggagaacggcccagttcacagaagaggaggcagcaagtctgcacactgtgtactatgctgaaattgttcaatcactcgacagttcagaaataaatataggaagattttgaaaatcctacctctctgctctgctccacagcactcctggaagcctgcactttccgtagaccttaaaatctcagaggtagggctgccaccaaggtgaagatgggaacgcagatgatccatgagtttgccctggtttcactggcccaagtggtttgtgctaaccacgtctgtcttcacagctctgtgttgccatgtgtgctgaacaaaaaataaaaattattattgattttatatttca

SEQ ID NO: 71644 - DNA, 948 bp, Homo Sapiens
cagtcgacggtaccggacatatgcccgggaattcggccattacggccgggacctgggacaatctgaaaggcaagaagtcctgccatacggcagttggcagaaccgctggctggaacatccccatgggcctgctctacaataagatcaaccactgcagatttgatgaatttttcagtgaaggttgtgcccctgggtctaagaaagactccagtctctgtaagctgtgtatgggctcaggcctaaacctgtgtgaacccaacaacaaagagggatactacggctacacaggcgctttcaggtgtctggttgagaagggagatgtggcctttgtgaaacaccagactgtcccacagaacactgggggaaaaaaccctgatccatgggctaagaatctgaatgaaaaagactatgagttgctgtgccttgatggtaccaggaaacctgtggaggagtatgcgaactgccacctggccagagccccgaatcacgctgtggtcacacggaaagataaggaagcttgcgtccacaagatattacgtcaacagcagcacctatttggaagcaacgtaactgactgctcgggcaacttttgtttgttccggtcggaaaccaaggaccttctgttcagagatgacacagtatgtttggccaaacttcatgacagaaacacatatgaaaaatacttaggagaagaatatgtcaaggctgttggtaacctgagaaaatgctccacctcatcactcctggaagcctgcactttccgtagaccttaaaatctcagaggtagggctgccaccaaggtgaagatgggaacgcagatgatccatgagtttgccctggtttcactggcccaagtggtttgtgctaaccacgtctgtcttcacagctctgtgttgccatgtgtgctgaacaaaaaataaaaattattattgattttatatttcaaaa

SEQ ID NO: 71645 - DNA, 908 bp, Homo Sapiens
gttaccaatctggaaggatctgtcactgaaacaattgcttggtcgagacctctaatttttcttcctctccagccagtctcctgtggctccctggtgctgggtttctggcctttggtgacatcctaacagaagggtctggaagcagggaccccagacaccttgctccctctcccaaatcacacccaaaacatactggggtgaaacaacttgacagagggtctctgtggtgagcaactgactgaagtttccagtggaaaagttcctgacgattgtttccgcagggaccttgaatttcctggtcaccatggcgacctggaagtcccaccgaatgctctcaacaatggggtaccccgaggacattcgtgtaattggctgcgcagtctgaggcctgaaaagcgtttctgccaatcgttcttgactttctggagcctccttagtgggttcaacggagcagggatttttaaaactgcccccttttttaaacaggggagaaaattgagatttagtaccaggtgggttcaggtcctgagcaaaagccccatctttgaattcagaatgctgaccccagggccgatcgtgtagagcctatggtgtatcttaatcgaaacccgtggcccaaacatctcagccaggaacctgggactttaggtgtcacttaatctcttcacacctgttaactacacctatctgcataggaggctccccacatcagtccaggcaacttttttctttgcctggggccatttcttctaaatggaaggagaaaagtctgagcattagaaattgtggcattaatgtctgcaagggctaatggagtgaaaagaatacattattctccttttcttcttagaaaaaaatttcaattgtggatgtaatagaaataccattaaaataatatttctgattgc

SEQ ID NO: 71646 - DNA, 3059 bp, Homo Sapiens
  misc_feature (1137)..(1177): n is a, c, g, or t
ctcggctctgagccatgtgacccggtgggcgggccgcggctctcgtgcgcgtcagcgcaggcccgacgtgccgctgctgggccactgaggcggctcccagctgcgttggcgacatggccgacacccccagagatgccgggctcaagcaggcgcctgcatcacggaacgagaaggccccggtggacttcggctacgtggggattgactccatcctggagcagatgcgccggaaggccatgaagcagggcttcgagttcaacatcatggtggtcgggcagagcggcttgggtaaatccaccttaatcaacaccctcttcaaatccaaaatcagccggaagtcggtgcagcccacctcagaggagcgcatccccaagaccatcgagatcaagtccatcacgcacgatattgaggagaaaggcgtccggatgaagctgacagtgattgacacaccagggttcggggaccacatcaacaacgagaactgctggcagcccatcatgaagttcatcaatgaccagtacgagaaatacctgcaggaggaggtcaacatcaaccgcaagaagcgcatcccggacacccgcgtccactgctgcctctacttcatccccgccaccggccactccctcaggcccctggacatcgagtttatgaaacgcctgagcaaggtggtcaacatcgtccctgtcatcgccaaggcggacacactcaccctggaggagagggtccacttcaaacagcggatcaccgcagacctgctgtccaacggcatcgacgtgtacccccagaaggaatttgatgaggactcggaggaccggctggtgaacgagaagttccgggagatgatcccatttgctgtggtgggcagtgaccacgagtaccaggtcaacggcaagaggatccttgggaggaagaccaagtggggtaccatcgaagttgaaaacaccacacactgtgagtttgcctacctgcgggaccttctcatcaggacgcacatgcagaacatcaaggacatcaccagcagcatccacttcgaggcgtaccgtgtgaagcgcctcaacgagggcagcagcgccatggccaacggcgtggaggagaaggagccagaagccccggagatgtagacgccaccctgcccannnnnnnnnnnnnnnnnnnnnnnnnnnnnnnnnnnnnnnnnaggccctcccaccaccccattttattttatatgattttctccatttgtcatcgttccccaccccttcgacatgctgccaggaaacaagggaaggggcctccctccgagtgagtcagtgatgaggccgcggcctccccgaggttgtggggaggctgcactggagccacaggcaggggtgagagcacccactgaattgacatgaccctctgtccccaggcctggctccccgagggctcagaagagcagcttcggtgtgcagatcatccgtctgtgtggggttctcagtgccggaggccttggggtgggggccaggcctcgcacttgcagaggagcccagtgggctgcacgctcccctccatccccatcggccctgtcccctggagtgtgtcagagcccaggggagaatgcagcccaccaggagcacctggaccccctgcccgccacatggtgtggccatcactcagcccctacccctgccctgctcctaagggtagaaaactccagggtcccctgccaccgactgcccagccactccaagccccctggcagctgcccctcctggagcagaaagtgcctttatctcagccatccgcagactgcttggccagatgcggggacaggctggaatgagggaggcgtcttcatctccctgccatccccctctcacgccacccccgcccccaccgggctgcaggtgctgctgatgcgctgggatctgattgaggataaaaaggaaggagagatgacccctaccccctcatcccccagttttgaaaaggtctaagcaagtgagtctggtggaggacctgaaggagggagccatggaaggtgccagaaggaaggttggcgggggcacgtgtgggccgtggcttgggctggtcagagtggcgtgagctgcccggcgcctgccctgcccaagtgaccagggaagtgtgtgtgtgtccatgtgtatgcgtgtccgtctgtctgtctagtgtctgggtttggcccaagactgggctgtagttacattaatgcccagccagccacccctgccactcacccctcctggcccaggccttgctgactctctgagctggggaggtgggaggccaggcgagcctgactctgttgatctacccgtgcctgggcccctcccctcagagcccatggtaacgaacccctagaaaggagagaacgggcgtcaggggtgcacagtccacagctgaagagcaaggtttcgtggcagcacggcccggcccctcaccctctgtccccacgaggggacccatgggggctgtctttgcagggcacagatgaccaaagtcccttcctgcttcctgttacctgtcttgctcctggggagaaagaggggcctgatgagactccactcaggtgcacacatcaccaggtgcatctgcaggcaccgggctggctgcttgcagccaggagaaggtcagcgagaaggagtgtatgagtgtgagtgtgtgtgcatggaagttggggcactgggcgtctgactccctccccacccaagagaggaaggacccctcaccacccccactggcgagacagtttactttgccgacttgccatgtttttgccaaaaccaagattttgaaggaaatgagtggccagcgccagggcccaggccatgtggcctgcccagcctcaatgtcacttggcggcggggtggggtgggggtgggcagcagcatcccagccttgagatgcttcactttccttctctgtaaccagactttgaaaaattgttcgtttcatcaggctctgttcctcaatggccttttgctacgtgcctcccgagaaatttgtctttttgtataaatgacaaagtgttgaaaatgtatttcctgaaataaatgtttcaaatgcagaaacccaaa

SEQ ID NO: 71647 - DNA, 1208 bp, Homo Sapiens
ggactgaaggggggagagtatgaagtcgacggcgcgccgaattcggcacgaggtaccggcccaggattagcgccctgggagcgcgcgccccgctgcctcgccgccacactttcctgggagcggcggccacggaggcaccatgaagaagtcttactcaggaggcacgcggacctccagtggccggctccggaggcttggtgactccagtggcccagccttgaaaagatcttttgaggtcgaggaggtcgagacacccaactccaccccaccccggagggtccagactcccctactccgagccactgtggccagctccacccagaaattccaggacctgggcgtgaagaactcagaaccctcggcccgccatgtggactccctaagccaacgctcccccaaggcgtccctgcggagggtggagctctcgggccccaaggcggccgagccggtgtcccggcgcactgagctgtccattgacatctcgtccaagcaggtggagaacgccggggccatcggcccgtcccggttcgggctcaagagggccgaggtgttgggccacaagacgccagaaccggcccctcggaggacggagatcaccatcgtcaaaccccaggagtcagcccaccggaggatggagccccctgcctccaaggtccccgaggtgcccactgcccctgccaccgacgcagcccccaagagggtggagatccagatgcccaagcctgctgaggcgcccaccgcccccagcccagcccagaccttggagaattcagagcctgcccctgtgtctcagctgcagagcaggctggagcccaagccccagccccctgtggctgaggctacaccccggagccaggaggccactgaggcggctcccagctgcgttggcgacatggccgacacccccagagatgccgggctcaagcaggcgcctgcatcacggaacgagaaggccccggtggacttcggctacgtggggattgactccatcctggagcagatgcgccggaaggccatgaagcagggcttcgagttcaacatcatggtggtcgggcagagcggcttgggtaaatccaccttaatcacaccctcttcaaatcaaaatcagccggagtcggtgcagcccactcagaggagcgcatcccagacatcgagatcagtcatcacgcagatatgaggagaggcgtcggatgagctgacgtgatgac

SEQ ID NO: 71648 - DNA, 1733 bp, Homo Sapiens
  misc_feature (1673)..(1690): n is a, c, g, or t
gggatcacctgtggaatgagctggagaaatttcgaaagtcagaggaagggaagcagaggtctgcagctcagccttccaccagcccagctgaagtacagagtttaaaaaaagctatgtcttcactccaaaatgacagagacagactaaggtgcctgatgctgttaattcctgagccttttgaagattctgcagactgaaggaattgaagaatctgcagcagcaatacttacagattaatcaagagatcactgagttacatccactgaaggctcaacttcaggagtatcaagataagacaaaagcatttcagattatgcaagaagagctcaggcaggaaaacctctcctggcagcatgagctgcatcagctcaggatggagaagagttcctgggaaatacatgagaggagaatgaaggaacagtaccttatggctatctcagataaagatcagcagctcagtcatctgcagaatcttataagggaattgaggtcttcttcctcccagactcagcctctcaaagtgcaataccaaagacaggcatccccagagacatcagcttccccagatggggtcacaaaatctgggtttatgagacagaacttctcaggacccagctcaatgacagcttaaaggaaattcaccaaaaggagttaagaattcagcaactgaacagcaacttctctcagctactggaagagaaaaacaccctttccattcagctctgcgataccagtcagagtcttcgtgagaaccagcagcactatggtgaccttattaaatcactgtgcagtcttggagaagcaggttcaagagctgcaggcggggccactaaatatagatgtagctgccaggagctccccaggaaaagaatggagttcacagaaagagtgaccctgaggaactaagggaaccgcagcaaagcttttctgaagctcagcagcagctatgcaacaccagacaggaagtgaatgaattaaggaagctgctggaagaagaacgagaccaaagagtggctgctgagaatctctctctgtggccgaggagcagatcagacggttagagcacagtgaatgggactcttcccggactcctatcattggctcctgtggcactcaggagcaggcactgttaatagatcttacaagcaacagttgtcgaaggacccggagtggcgttggatggaagcgagtcctgcgttcactctgtcattcacggacccgagtgccacttctagcagccatctactttctaatgattcatgtcctgctcattctgtgttttacgggccatctatagacttagttgttactctttggaccactcccctcaaaacttggaattctctcacctctaacatcagaacatcaattccagtggaacagtcttcccatttacaggtcttctctccaactcttcacggaaagtgcctgcaaaaacagaggtggatacgaggacaggttggagctgcagggactggcgagtctgctttcttctactgccctgagcctgaacgcttctgcttaatctgagaatcacatttggtttgttgagcctaatatttgttgagattttgcaggaccctgatcttttgtggtcctgtaaaagatactgaggaatgtctttcagccaagccaagaggatggtttcaataaacctaataatctgaagttcnnnnnnnnnnnnnnnnnngcctacagccgcggccgcaagcttattccctttagtgagggta

SEQ ID NO: 71649 - DNA, 489 bp, Homo Sapiens
ctctcacctctaacatcagaacatcaattccagtggaatgagctggagaaatttcgaaagtcagaggaagggaagcagaggtctgcagctcagccttccaccagcccagctgaagtacagagtttaaaaaaagctatgtcttcactccaaaatgacagagacagactactgaaggaattgaagaatctgcagcagcaatacttacaggtcttctctccaactcttcacggaaagtgcctgcaaaaacagaggtggatacgaggacaggttggagctgcagggactggcgagtctgctttcttctactgccctgagcctgaacgcttctgcttaatctgagaatcacatttggtttgttgagcctaatatttgttgagattttgcaggaccctgatcttttgtggtcctgtaaaagatactgaggaatgtctttcagccaagccaagaggatggtttcaataaacctaataatctgaagttcagtatcaa

SEQ ID NO: 71650 - DNA, 2244 bp, Homo Sapiens
  misc_feature (292)..(389): n is a, c, g, or t
ccaaagacaggcatccccagagacatcagcttccccagatgggtcacaaaatctggtttatgagacagaacttctcaggacccagctcaatgacagcttaaaggaaattcaccaaaaggagttaagaattcagcaactgaacagcaacttctctcagctactggaagagaaaaacaccctttccattcagctctgcgataccagtcagagtcttcgtgagaaccagcagcactatggtgaccttttaaatcactgtgcagtcttggagaagcaggttcaagagctgcaggcnnnnnnnnnnnnnnnnnnnnnnnnnnnnnnnnnnnnnnnnnnnnnnnnnnnnnnnnnnnnnnnnnnnnnnnnnnnnnnnnnnnnnnnnnnnnnnnnnntgagccacggcgcccggcccagacttaacttttaagaggagaaattcaagaatgagaatctgggagaaaaatctaatcaagacaagagttttatgtaggggccactaaatatagatgttgctccaggagctccccaggaaaagaatggagttcacagaaagagtgaccctgaggaactaagggaaccgcagcaaagcttttctgaagctcagcagcagctatgcaacaccagacaggaagtgaatgaattaaggaagctgctggaagaagaacgagaccaaagagtggctgctgagaatgctctctctgtggccgaggagcagatcagacggttagagcacagtgaatgggactcttcccggactcctatcattggctcctgtggcactcaggagcaggcactgttaatagatcttacaagcaacagttgtcgaaggacccggagtggcgttggatggaagcgagtcctgcgttcactctgtcattcacggacccgagtgccacttctagcagccatctactttctaatgattcatgtcctgctcattctgtgttttacgggccatctatagacttagttgttactctttggaccactcccctcaaaacttggaattctctcacctctaacatcagaacatcaattccagtggaacagtcttcccatttacaggtcttctctccaactcttcacggaaagtgcctgcaaaaacagaggtggatacgaggacaggttggagctgcagggactggcgagtctgctttcttctactgccctgagcctgaacgcttctgcttaatctgagaatcacatttggtttgttgagcctaatatttgttgagattttgcaggaccctgatcttttgtggtcctgtaaaagatactgaggaatgtctttcagccaagccaagaggatggtttcaataaacctaataatctgaagttcagtatcattttgattgataactttctttgccttgtttgcctgtattttctcctgtttcagggggaaggtggctctgccataaacagagttcagggaaatgaacatgtcacctcataggacatctgatttaggtctcttgcagaatagggtggtgaaagctgaaggaactccctaggggttttagctgttagatcacatgggaggacagcatcttcttccctgccaatttcagatataattggagggagaatttcaggtcttagactataaggatagaatccctttgcttttgcccttgatcacatgtatactaaggtattaagtggcccaagtctttcctttcaccaaagggcagggagaagtgtctatggacagcagggttccaattcttgtcattccaggaatatctgaatattcctggaatgtggaccctgagacagtgctcaggggccactgggagccaatattaggcattgactctcagccaggagtctgactggtctaacaccacactgcaactcctgacctcttgaagtactaagctactttgctgttagtgacagttattacagtttctcagccccattgtctctgccctctgtggcaatggaaggagaatatagagaagacaaaattaaatatagatagacctgagaaggacagccaggatagaattccatttgtgcctattccctgcctcccctcccctcccccatcctaccagttggttattttctcattgcatacatgatgtgttcactgcctagcctctccctaaagaagagagaagacaagtgggctgactgatctgctctaaatctactgtggtgattaaatcttggttacaacatcctgggaagtttcctgaacaactgtaaaataataaaattattttcagaatgaaaaaa

SEQ ID NO: 71651 - DNA, 572 bp, Homo Sapiens
atgtgaggcccgggggtgaatcggcacgaggagagggcgggccagggccgcactccggagactcgcggttgctacgcgcaccatggctggagcgcccacggtctcgcttcctgaactccgttcactcctagcctccggacgggcccggctcttcgacgtgcgctctcgcgaggaggcggcagctgggaccatcccaggggcgctcaacatcccggtgtccgagttggagagtgctctgcagatggagccagctgccttccaggctttatattctgctgagaagccaaagctggaagatgagcatctcgttttcttctgtcagatgggcaagcggggcctccaggccacgcagctggcccggagtcttggatacactggggctcgcaactacgctggagcctatagagaatggttggagaaagagagttaggcaggaggcagcttactgattgccaccccctggccccttaatggccaccttaactaagggtgtgaacgggctgacttggtgaattgggcaactccttatagtgttgtgcacacaaaagcatcaaataaagaacatattaatc

SEQ ID NO: 71652 - DNA, 1192 bp, Homo Sapiens
  misc_feature (76)..(110): n is a, c, g, or t
  misc_feature (614)..(783): n is a, c, g, or t
  misc_feature (791)..(807): n is a, c, g, or t
  misc_feature (845)..(926): n is a, c, g, or t
  misc_feature (1105)..(1113): n is a, c, g, or t
ttgatcacactatagggcgctagctcttagcagcgaacgaccgagcgcagcgaagtagtgagcgaggaagcggcgnnnnnnnnnnnnnnnnnnnnnnnnnnnnnnnnnnncagtcgacggtaccggacatatgcccgggaattcggccattacggccggggagctctgggagggaacgggagatgttgcaggcgccgagagggcgggccaggccgcactccggagactcgcggttgctacgcgcaccatggctggagtgtccgagttggagagtgctctgcagatggagccagctgccttccaggctttatattctgctgagaagccaaagctggaagatgagcatctcgttttcttctgtcagatgggcaagcggggcctccaggccacgcagctggcccggagtcttggatacactggggctcgcaactacgctggagcctatagagaatggttggagaaagagagttaggcaggaggcagcttactgattgccaccccctggccccttaatggccaccttaactaagggtgtgaacgggctgacttggtgaattgggcaactccttatagtgttgtgcacacaaaagcatcaaataaagaacatttaatcnnnnnnnnnnnnnnnnnnnnnnnnnnnnnnnnnnnnnnnnnnnnnnnnnnnnnnnnnnnnnnnnnnnnnnnnnnnnnnnnnnnnnnnnnnnnnnnnnnnnnnnnnnnnnnnnnnnnnnnnnnnnnnnnnnnnnnnnnnnnnnnnnnnnnnnnnnnnnnnnnnnnnnnnnncctggcgnnnnnnnnnnnnnnnnnaaaaattttttaaaacttttttggggggcggggccccnnnnnnnnnnnnnnnnnnnnnnnnnnnnnnnnnnnnnnnnnnnnnnnnnnnnnnnnnnnnnnnnnnnnnnnnnnnnnnnnnncccccgggtgaaaaaggggggtgtataaaacaacaaaggggtgcgtccggtgcttttttgtgttttcacaaaagagggtccccccggatccttttttttatttatgccccccccgcggtgagatattaggagagagtgggggggaatattaaaaaaacccctctcccgccgaggggcannnnnnnnnacacagtggtggtgtaaataatttttcacccccgcggggaacaaacacccccgggtgcgcggggggcaaaaaataatat

SEQ ID NO: 71653 - DNA, 531 bp, Homo Sapiens
ggatgtcacctctgcaaccacacccatgtggtggtttcatgaacagaccacgctcctctgccttctcctggcctgggacacacagagccaccccggccttgtgagtgacccagagaagggaggcctcgggagaaggggtgctcgtaagccaacaccagcgtgccgcggcctgcacaccctgcggacatcccagcctggtatcgccagccttaaggtgtctggagcccccacacttggccaacctgaccttggaagatgctgctgagtgtctcaagcagcactgacagcagctgggcctgccccagggcaacgtgggggcggagactcagctggacagcccctgcctgtcactctggagctgggctgctgctgcctcaggaccccctctccgaccccggacagagctgagctggccagggccaggagggcgggagggagggaatgggggtgggctgtgcgcagcatcagcgcctgggcaggtccgcagagctgcgggatgtgattaaagtccctgatgtttctctttaaaaa

SEQ ID NO: 71654 - DNA, 592 bp, Homo Sapiens
  misc_feature (470)..(470): n is a, c, g, or t
acgccatcatcgaaagccgcatcgactgtcagcaccgctgtggcatcttccagtacgagaccatctcctgcaacaactgcacagactcgcacgtcgcctgctttggctataactgcgagtcctcggcgcagtggaagtcagctgtccagggcctcctgaactacataaataactggcacaaacaggacacgagcatgagaccacgctcctctgccttctcctggcctgggacacacagagccaccccggccttcctggtatcgccagccttaaggtgtctggagcccccacacttggccaacctgaccttggaagatgctgctgagtgtctcaagcagcactgacagcagctgggcctgccccagggcaacgtgggggcggagactcagctggacagcccctgcctgtcactctggagctgggctgctgctgcctcaggaccccctctccgaccccggacagagctgatngtcgccagggccaggagggcgggagggagggaatgggggtgggctgtcgcagcatcagcgcctgggcaggttcgcagagctgcgggatgtgattaaagtccctgatgtttctctttaaaaaa

SEQ ID NO: 71655 - DNA, 901 bp, Homo Sapiens
gttggttggccggcggcgggcgggacgggcatggccctgctgctgtgcctggtgtgcctgacggcggcgctggcccacggctgtctgcactgccacagcaacttctccaagaagttctccttctaccgccaccatgtgaacttcaagtcctggtgggtgggcgacatccccgtgtcaggggcgctgctcaccgactggagcgacgacacgatgaaggagctgcacctggccatccccgccaagatcacccgggaaaagctggacaaagtggcgacaccagtgtaccagatgatggatcagctgtaccaggggaagatgtacttccccgggtatttccccaacgagctgcgaaacatcttccgggagcaggtgcacctcatccagaacgccatcatcgaaagccgcatcgactgtcagcaccgctgtggcatcttccagtacgagaccatctcctgcaacaactgcacagactcgcacgtcgcctgctttggctataactgcgagtcctcggcgcagtggaagtcagctgtccagggcctcctgaactacataaataactggcacaacctggtatcgccagccttaaggtgtctggagcccccacacttggccaacctgaccttggaagatgctgctgagtgtctcaagcagcactgacagcagctgggcctgccccagggcaacgtgggggcggagactcagctggacagcccctgcctgtcactctggagctgggctgctgctgcctcaggaccccctctccgaccccggacagagctgagctggccagggccaggagggcgggagggagggaatgggggtgggctgtgcgcagcatcagcgcctgggcaggtccgcagagctgcgggatgtgattaaagtccctgatgtttctcaaaac

SEQ ID NO: 71656 - DNA, 1804 bp, Homo Sapiens
  misc_feature (38)..(38): n is a, c, g, or t
  misc_feature (64)..(64): n is a, c, g, or t
  misc_feature (69)..(69): n is a, c, g, or t
  misc_feature (90)..(145): n is a, c, g, or t
  misc_feature (150)..(150): n is a, c, g, or t
  misc_feature (153)..(153): n is a, c, g, or t
  misc_feature (162)..(163): n is a, c, g, or t
  misc_feature (212)..(212): n is a, c, g, or t
  misc_feature (218)..(218): n is a, c, g, or t
  misc_feature (1052)..(1071): n is a, c, g, or t
  misc_feature (1277)..(1277): n is a, c, g, or t
gcaataatgtgagtagctcactcattagcaccccagcnttacacttatgctcccgctcgtatgngtgtnggaatgtgagccgataccaannnnnnnnnnnnnnnnnnnnnnnnnnnnnnnnnnnnnnnnnnnnnnnnnnnnnnnntttgnccntcgagccanngaatcgcacgagggggaaaagggagtgcagccgcggtggggtggggcgncgaagnccggaagggataaaaccgcactcgccgccctcgcggggctcacggctcgcctcggtatcgcagcgggtcctctctatctagctccagcctctcgcctgcgccccactccccgcgtcccgcgtcctagccgaccatggccgggcccctgcgcgccccgctgctcctgctggccatcctggccgtggccctggccgtgagccccgcggccggctccagtcccggcaagccgccgcgcctggtgggaggccccatggacgccagcgtggaggaggagggtgtgcggcgtgcactggactttgccgtcggcgagtacaacaaagccagcaacgacatgtaccacagccgcgcgctgcaggtggtgcgcgcccgcaagcagatcgtagctggggtgaactacttcttggacgtggagctgggccgaaccacgtgtaccaagacccagcccaacttggacaactgccccttccatgaccagccacatctgaaaaggaaagcattctgctctttccagatctacgctgtgccttggcagggcacaatgaccttgtcgaaatccacctgtcaggacgcctaggggtctgtaccgggctggcctgtgcctatcacctcttatgcacacctcccaccccctgtattcccacccctggactggtggcccctgccttggggaaggtctccccatgtgcctgcaccaggagacagacagagaaggcagcaggcggcctttgttgctcagcaaggggctctgccctccctccttccttcttgcttctcatagccccggtgtgcggtgcatacacccccacctcctgcaataaaatagtagcatcggcnnnnnnnnnnnnnnnnnnnnctcgaggcactcatatgttcgggggtgcggaaaaagaggtaattgaaatgtggcccatgtggctcattagcttgttttccgtgacccagttttcttgttccaaggtgtggtagactctgccggtcttcccttattagtgagctcgtattaaatttcgattaagcccgggtttaacccgttgcatttaattgaattccgggcgaagnccacccccggcacagtcacacacgcccgcccaatcatgacccgcgcctcttccctacgtgcgactccagcggcacccatctcgacaactcccttctcgccccaggccgaccaccacctagtgcccgccccgccaccacgtagctaaaccccacacggttaccacccagccgccgtcacgatcacgcagccgaccgtcacacgtcggccgacgccacgaccgccttttactgccacggaacgccgggcgtcccacgtgggcgttatgcacgccacgtgagcgcaggcaatggagtcccaggctgcgataacggggtacctacgaataagcacgcaaccgacggcttacacgttacaggcgccactccatttccgaccgaaaacctatgagtagaaccccgcaagtatacatgtacatccgacagcgggaaaaacgacgactggctgacaccacagtgggcctctagcgcagcagcggccgcgacaatgcgaagacattcacacggggacgggacacccaacgaagcgt

SEQ ID NO: 71657 - DNA, 895 bp, Homo Sapiens
gccggaagggataaaaccgcagtcgccggcctcgcggggctcacggcctcgcctcggtatcgcagcgggtcctctctatctagctcctctctatctagctccagcctctcgcctgcgccccactccccgcgtcccgcgtcctagccgaccatggccgggcccctgcgcgccccgctgctcctgctggccatcctggccgtggccctggccgtgagccccgcggccggctccagtcccggcaagccgccgcgcctggtgggaggccccatggacgccagcgtggaggaggagggtgtgcggcgtgcactggactttgccgtcggcgagtacaacaaagccagcaacgacatgtaccacagccgcgcgctgcaggtggtgcgcgcccgcaagcagatcgtagctggggtgaactacttcttggacgtggagctgggccgaaccacgtgtaccaagacccagcccaacttggacaactgccccttccatgaccagccacatctgaaaaggaaagcattctgctctttccagatctacgctgtgccttggcagggcacaatgaccttgtcgaaatccacctgtcaggacgcctaggggtctgtaccgggctggcctgtgcctatcacctcttatgcacacctcccaccccctgtattcccacccctggactggtggcccctgccttggggaaggtctccccatgtgcctgcaccaggagacagacagagaaggcagcaggcggcctttgttgctcagcaaggggctctgccctccctccttccttcttgcttctcatagccccggtgtgcggtgcatacacccccaactcctgcaataaaatagtagcatcggaaaaacaaaaagagaaggacagcaccggcgcgccccacagaataac

SEQ ID NO: 71658 - DNA, 852 bp, Homo Sapiens
ggtactttggagtgtgtgttcgcaggacactgccacttcctttaatacagcggtgcctccacgccccgcatccgatgcagtgttacacgtgtgtgtcgctcaaacatccatcctactgcacatactcagtttcggccagcaggcggggagcccgaggtagctcccgctcccttgagccaggcccctgccagacctgagctccctcccaagcctggcttccccaaccggtggccttcatgggccagaagccattccttcacggccagtcctccggagtagttgcccacggctccgctgctgcagaccactctgtggcacgggatgaggatggggacaggattgcctctcattgctcctcccactgctcgcgcggctttggggttgcctgccagggctgctaattgctggtaagaaatcacttctccgaatttcacaaccttcagcagcttccataacacctgtctggtgaacgactcttgctggaaaacgggatggtgaagagccggcacggggaactcttcgatagcctcgggctggtggaaataggcattcagccaggctgtgcactgcatcaggggctccggacctccgagaaccgcagcgggggctgggacctccacggcatcagctgcagacgtccccttgcccaggagctttatttcgtgcagaccctgctcacaaccagacagctccagcttccccaaagggctgtccagtgtggtgcgtttcatttcacaatccttgtccatttttccaagtaccaagtcgcaaacggtgcgcaccgcgaggacctgcgggcgtcgggacgcaaagcgttctaggggcgcgggctgtcccagcatatccggggcg

SEQ ID NO: 71659 - DNA, 913 bp, Homo Sapiens
gtcacggtctaaccagaaagtgggcaggtctcaggtggcctgggagctaggggcctgcccctcggaccctggggcaagaagagcaccctgccgagtgaggtcctacctgcaggcagtcactgccccggccatgggcctctcaaggctggcacgaagccattcagggagagggctccacaacaagctgagggtgcccgactcaaactgtagaaccgggagtggacacccacagacgcccaggctggatgcgtgcgcaggcacactggatctcgtggctctctgggccgctgccaccgcctttgaacgtgtcggggagcaggagccaggccagagtctggcccagaggacagcgagaagcacctgttgatgctggggccactggaggaagctccatccctctactttcagcccgcaccaggcggccagctcagagcaccaggcgtggcgcaagcagggtggtcgtgggcagccagtcccgccctgctgcctggactgtgcccagcgggatgtgggcccgagcaggccagagaggccgagggcctggggtctctgcggcagccacagcccgtggtgagtagcagccttagctgtcctggagataccggggcctcgtggagtctaggcaggctggggcactgtggctgtggccgtggccaggtgagaagccccattcgcgcaggaaagactggccacctgggaacccacgcctccacggagggacttgccggccacaggctgtgggctgcccaagaggactgtgcaggcagggctgcctgctgattggcagctccggatcaggcccggtgcctgcagacctggtgctcccctcgggcagggctgggtgccgcaaccgcctgctggcttttttggcagctcctctgtatcagaaccaataaagtgcacttgttctcgg

SEQ ID NO: 71660 - DNA, 738 bp, Homo Sapiens
  misc_feature (102)..(102): n is a, c, g, or t
  misc_feature (112)..(112): n is a, c, g, or t
gtgtccagaccagtgaactgtccagagagccaccatgtgggccatgccacattcctcaaaggcagtgaaaccactgtgcacatgtgccttgctggggtaacncaggacatcntatgcaatctctattgcttgaggggctggagaagagaggcgcctcatgcttccctattccaaaccccttcagcatagccctgtgcctccctccttccccgcagcacttgggcttcactcacctgcttgcccccatgttcttcctggagagaggagtgattcagaccaggccccggcctgacctccacgcagggcgctttccttcctttgttctcagcttctccgcttgagtggcttgagtgcacttctgctccctttccataggcccaggggcagaggaagggcagagaggtgaactggaaaaatctgcaggtggttaaggctagggaaacctaaatgagcctttggagaaagggatactcttgcagactgaagctgagctcctgaagctccctctcttccccagccagactgcaacagataccagagcggcccctggctcctgctgagggccgggtcagccagaggtgggggacagcgtgtccagctggggcagatccagcctcagcctctacctcagacttatgtgccagggaagaaaccatgtctttacccttttgtatctacctctcaaccctttgcccagcataggtgctaaataaaagagcctgttggctaaaagaaaaa

SEQ ID NO: 71661 - DNA, 836 bp, Homo Sapiens
  misc_feature (411)..(435): n is a, c, g, or t
tagacattcatagtagatttaaattagttagctttctaactagtcagatttctgcccaaagtgcttagtcaatagtaattaagatatagcttcaaaaatggctttgcttttgatttctactcatattcgtatggctccagaaaaatatttttttcatatttgacaatgtcagctccactttagaaattttcaataaccagatgagaaaaaaattaagaaattgctcaagggaaacatttgtaaatggatttgaaagattgagccaaattctgttgtcagttctaagcatgcagttctcacctccatttagtcccccatcagaacagaggtcaggaatttagctggggagcctaaatttagttcagcttacctttgagaatagcatcaattcagactctcttttcattatgnnnnnnnnnnnnnnnnnnnnnnnnnaaactacattgtgttagagtcatagtctaggatcctgagagattttccattcttgtcaccattcacttgcattgtaaagattttctttgtctgttgttggcatagattcttttgtacatatttatttatttgtgtttatatatgtcaattggtttcctttcttagcttgatattgcctagctttgttgttttaattaactttctattagagagactgtatatattttttctaaatactttgtgaaatcatttttggtagcaatatctttgaatatgatgaataaaagtgactgtgagtgcaaatagaattagcagtaagaagctactctagctaatttgccattttacttaaatggaaaatgtttttcaaataaatacttatgttgttcatgttccaagtt

SEQ ID NO: 71662 - DNA, 901 bp, Homo Sapiens
cggtccaaggtagcgaggcctgggtggcgtattcggcacgaggggcgtccagggcgaccagccgcgggccgcagggcatggaccttcaggccgccggggcccaggcgcagggggccgcggagccgtctcggggcccgccgctgcctagcgcgcggggggcgccccccagcccggaggctggctttgctacagctgaccactccggtcaggagagagagactgagaaggctatggatcgactagcccgtggaacacagagcattcctaatgacagtcctgcccggggtgagggcacccattctgaagaggaaggctttgccatggatgaggaggactctgatggagaactgaatacctgggagctgtcagaagggacaaactgtccacccaaggaacagcctggcgatctttttaatgaggactgggactcggagttgaaagcagatcaagggaatccatatgatgctgacgacatccaggagagcatttctcaagagcttaaaccttgggtgtgctgtgccccacaaggagacatgatctatgaccccagctggcaccatccgcctccactgataccctattattccaagatggtctttgaaacaggacagtttgacgatgctgaagattgagtgtggagctttctgccttgtaggtgggcgggcctccacgtcaagatctcttttcctgtcttggaggtgaaaagtcatatctgagaaaatgtttgcagtgacccctagtctggggtacacagaccagtgttccttattgacagtgttcaataaggccccgtcattctcgccagtctgttgttgttcttaatgggctcctccttgaaatgtgtgtgtgtttgtgtcaagaggagttgtgttctttgtaaataaaggttaaaagagaaacc

SEQ ID NO: 71663 - DNA, 1330 bp, Homo Sapiens
ggggccccacctttggaataaaaggtggcgctgcaggaggcggctactcccaggtcattcctatggaagagtttaatctccacctcacaggtgacatccatgccatcactgcagctaataacctcgttgctgcggccattgatgctcggatatttcatgaactgacccagacagacaaggctctctttaatcgtttggtgccatcagtaaatggagtgagaaggttctctgacatccaaatccgaaggttaaagagactaggcattgaaaagactgaccctaccacactgacagatgaagagataaacagatttgcaagattggacattgatccagaaaccataacttggcaaagagtgttggataccaatgatagattcctgaggaagatcacgattggacaggctccaacggagaagggtcacacacggacggcccagtttgatatctctgtggccagtgaaattatggctgtcctggctctcaccacttctctagaagacatgagagagagactgggcaaaatggtggtggcatccagtaagaaaggagagcccgtcagtgccgaagatctgggggtgagtggtgcactgacagtgcttatgaaggacgcaatcaagcccaatctcatgcagacactggagggcactccagtgtttgtccatgctggcccgtttgccaacatcgcacatggcaattcctccatcattgcagaccagatcgcactcaagcttgttggcccagaagggttcgtagtgacggaagcaggatttggagcagacattggaatggaaaagttttttaacatcaaatgccggtattccggcctctgcccccacgtggtggtgcttgttgccactgtcagggctctcaagatgcacgggggcggccccacggtcactgctggactgcctcttcccaaggcttacatacaggagaacctggagctggttgaaaaaggcttcagtaacttgaagaaacaaattgaacaaatgccagaatgtttggaattccagtagtagtggccgtgaatgcattcaagacggatacagagtctgagctggacctcatcagcggctttccagagaacatggggttttgatgccgtgaagtgccctcactgggcagaaggggcaaggtgctttaacctggtcaggcgtcaagagcagaaagcgcccagcggttcagtcttatgactcagtccccactgagtaaacggtctggccgaattggggcatggcttatttccagcacaagtgatccaagggtgatcctccgttacattttgtaccaagtcaggtttccaaccgggtaaaaaacgcctttgaaa

SEQ ID NO: 71664 - DNA, 1012 bp, Homo Sapiens
  misc_feature (772)..(793): n is a, c, g, or t
  misc_feature (795)..(820): n is a, c, g, or t
  misc_feature (822)..(822): n is a, c, g, or t
  misc_feature (824)..(835): n is a, c, g, or t
  misc_feature (841)..(845): n is a, c, g, or t
  misc_feature (850)..(852): n is a, c, g, or t
  misc_feature (854)..(859): n is a, c, g, or t
  misc_feature (861)..(864): n is a, c, g, or t
  misc_feature (866)..(867): n is a, c, g, or t
  misc_feature (869)..(871): n is a, c, g, or t
  misc_feature (887)..(888): n is a, c, g, or t
cagtcgacggtaccggacatatgcccgggaattcggccattacggccggggatgccgtgaagtgcactcactgggcagaagggggcaagggtgccttagccctggctcaggccgtccagagagcagcacaagcacccagcagcttccagctcctttatgacctcaagctcccagttgaggataaaatcaggatcattgcacagaagatctatggagcagatgacattgaattacttcccgaagctcaacacaaagctgaagtctacacgaagcagggctttgggaatctccccatctgcatggctaaaacacacttgtctttgtctcacaacccagagcaaaaaggtgtccctacaggcttcattctgcccattcgcgacatccgcgccagcgttggggctggttttctgtaccccttagtaggaacgatgagcacaatgcctggactccccacccggccctgtttttatgatattgatttggaccctgaaacagaacaggtgaatggattattctaaacagatcaccatccatcttcaagaagctactttgaaagtctggccagtgtctattcaggcccactgggagttaggaagtataagtaagccaagagaagtcagcccctgcccagaagatctgaaactaatagtaggagtttccccagaagtcattttcagccttaattctcatcatgtataaattaacataaatcatgcatgtctgtttactttagtgacgttccacagaataaaaggaaacaagtttgcaaaannnnnnnnnnnnnnnnnnnnnncnnnnnnnnnnnnnnnnnnnnnnnnnncncnnnnnnnnnnnnaaaatnnnnnaagannnannnnnntnnnnanncnnncccccacaaaccttcnnaaaaacctttcctataccctctttctttaaagccaaaccctggccccataaccgtaatcccttaggagtttctcttgggggtgtttctcttgggcgggggtctgtggaccacaggccaaaatta

SEQ ID NO: 71665 - DNA, 1334 bp, Homo Sapiens
tccaggatcctttttgggcccagggggctggactttttctgtgggcttactttatacttccctaaactccccaggtgggcccttgaaataggacactgggccagactttcaaaagtagctttctgaaagatgggatggggaatctgtttagaaataattccattccacctgttccgtttcagggtccaaaatcaatatcataaaaaccagggcccggggggggagtccaggccattgtgctcatcgtccctaataaggggtacagaaaaccagccccaacgctggcgcggatgtcgcgaaatgggcagaatgaagccctgtagggaccacctttttgctctgggttgggagacaaagacaagtgtgttttagccatgcagatggggagattcccaaagccctgcttcgtgtagacttcagctttgtgttgagcttcgggaagtaattcaatgtcatctgctcccatagatcttctgtgcaatgatcctgattttatcctcaactgggagcttgaggtcataaaggagctggaagctgctgggtgcttgtgctgctctctggacggcctgagccagggctaaggcacccttgcccccttctgcccagtgagtgcacttcacggcatcaaaagccccatgttctctggaaaggcggctgatgaggtccagctcagactctgtatccgtcttgaatgcattcacggccactactactggaattccaaacattctggcattttcaatttgtttcttcaagttactgaagcctttttcaaccagctccaggttctcctgtatgtaagccttgggaagaggcagtccagcagtgaccgtggggccgcccccgtgcatcttgagagccctgacagtggcaacaagcaccaccacgtgggggcagaggccggaataccggcatttgatgttaaaaaacttttccattccaatgtctgctccaaatcctgcttccgtcactacaaacccttctgggccaacaagcttgagtgcgatccggtctgcaatgatggaggaattgccatgtgcgatgttggcaaacgggccagcatggacaaacactggagtgccctccagtgtctgcatgagattgggcttgattgcgtccttcataagcactgtcagtgcaccactcaccccctacaaaacaaatgtgtgcagcatcaactcccaccagcaaaaaaacccaaccttctgaaaccaatatttgacattctaggcttacccatgttagccatcttggaccaattgatactttcacctgaattggaccattcatggtttttttctggatatgctatgaagctgccaattattaaatta

SEQ ID NO: 71666 - DNA, 462 bp, Homo Sapiens
caagctcagctgctgactgatgtgagaaatccattctagactattttagagcacgacaatgctcgttcccagagtactcagttatttgtaactctggtatctgggcagaaatttctataaataccaaactcaatatgtgtcttccaaagctgaaactgcaatattacgcaagagttcaataccaacttttaacatcaggtcactctattaagccatcaaagtgtagctgaactacctagcaacaaagataaagcaatggtactcttgatgttctctgcaaattgaagtcatacacccacttttagagatgcccacaggatgaagatgttactcaaatcatctggaacttgtgatctattactaaagcataccagctattattcactctgatgtactttttaaacatttcataattatcttgtaattagcaaaataggattaaattgatgaattaattgcaaa

SEQ ID NO: 71667 - DNA, 522 bp, Homo Sapiens
ctttgatatctctgtgcccagtgaaatgatggctgtcctggctctcaccacttctctagaggacatgagagagagactgggcaaaatggtggtggcatccagtaagaaaggagagcccgtcagtgccgaagatctggtgggtacccagacacgccaggcttggcgacatatctgtgtctgttgtcctagggtctttcagcagttattaataacaaaatgtaatgctgtacttaagacattgcaattaattcatcaatttaatcctattttgctaattacaagataattatgaaatgtttaaaaagtacatcagagtgaataatagctggtatgctttagtaatagatcacaagttccagatgatctgagtaacatcttcatcctgtggcatctctaaaagtgggtgtatgacttcaattgcagagaacatcaagagtaccatgctttatctttgttgctaggtagttcagctacacttgaccgctaatagagtacgtcctcatccaggatcctctagatcac

SEQ ID NO: 71668 - DNA, 576 bp, Homo Sapiens
  misc_feature (184)..(234): n is a, c, g, or t
gaatcactgtttagaacacacacacttactttttctggtctctaccactgctgatattttctctaggaaatatacttttacaagtaacaaaaataaaaactcttataaatttctatttttatctgagttacagaaatgattactaaggaagattactcagtaatttgtttaaaaagtaataaannnnnnnnnnnnnnnnnnnnnnnnnnnnnnnnnnnnnnnnnnnnnnnnnnntattacactctgtaattgaatattattcctcaaaaaattgcacatagtagaacgctatctgggaagctatttttttcagttttgatatttctagcttatctacttccaaactaatttttgtttttgctgagactaatcttattcattttctctaatatggcaaccattataaccttaatttattattaacatacctaagaagtacattgttacctctatataccaaagcacattttaaaagtgccattaacaaatgtatcactagccctcctttttccaacaagaagggactgagagatgcagaaatatttgtgacaaaaaattaaagcatttagaaaactt

SEQ ID NO: 71669 - DNA, 1414 bp, Homo Sapiens
  misc_feature (1020)..(1070): n is a, c, g, or t
cagtcgacggtaccggacatatgcccgggaattcggccattacggccgggaggaggagaaggccaatgatagcaaccctaatgaggaatcaaagaaaactgataaaaacccagaagagtccaagagtccaagcaaaactaccgtgcgatgcctggaagctgaagtttagatgagacagaaatgaggagacacacctgaggctggtttctttcatgctccttaccctgccccagctggggaaatcaaaagggccaaagaaccaaagaagaaagtccacccttggttcctaactggaatcagctcaggactgccattggactatggagtgcaccaaagagaatgcccttctccttattgtaaccctgtctggatcctatcctcctacctccaaagcttcccacggcctttctagcctggctatgtcctaataatatcccactgggagaaaggagttttgcaaagtgcaaggacctaaaacatctcatcagtatccagtggtaaaaaggcctcctggctgtctgaggctaggtgggttgaaagccaaggagtcactgagaccaaggctttctctactgattccgcagctcagaccctttcttcagctctgaaagagaaacacgtatcccacctgacatgtccttctgagcccggtaagagcaaaagaatggcagaaaagtttagcccctgaaagccatggagattctcataacttgagacctaatctctgtaaagctaaaataaagaaatagaacaaggctgaggatacgacagtacactgtcagcagggactgtaaacacagacagggtcaaagtgttttctctgaacacattgagttggaatcactgtttagaacacacacacttactttttctggtctctaccactgctgatattttctctaggaaatatacttttacaagtaacaaaaataaaaactcttataaattctatttttatctgagttacagaaatgattactaaggaagattactcagtaatttgtttaaaaagtaataaannnnnnnnnnnnnnnnnnnnnnnnnnnnnnnnnnnnnnnnnnnnnnnnnnntattacactctgtaattgaatattattcctcaaaaaattgcacatagtagaacgctatctgggaagctatttttttcagttttgatatttctagcttatctacttccaaactaatttttatttttgctgagactaatcttattcattttctctaatatggcaaccattataaccttaatttattattaacatacctaagaagtacattgttacctctatataccaaagcacattttaaaagtgccattaacaaatgtatcactagccctcctttttccaacaagaagggactgagagatgcagaaatatttgtgacaaaaaattaaagcatttagaaaacttaa

SEQ ID NO: 71670 - DNA, 999 bp, Homo Sapiens
  misc_feature (80)..(114): n is a, c, g, or t
cgatgatagatcactatagggcgctagctcgtttttaccgaacgacgagcgcagcgagatagtgagcgaggaagcggcgnnnnnnnnnnnnnnnnnnnnnnnnnnnnnnnnnnncagtcgacggtaccggacatatgcccgggaattcggccattacggccggggagtggccatctgaggtgtttccctggctctgaaggggtaggcacgatggccaggtgcttcagcctggtgttgcttctcacttccatctggaccacgaggctcctggtccaaggctctttgcgtgcagaagagctttccatccaggtgtcatgcagaattatggggatcacccttgtgagcaaaaaggcgaaccagcagctgaatttcacagaagctaaggaggcctgtaggctgctgggactaagtttggccggcaaggaccaagttgaaacagccttgaaagctagctttgaaacttgcagctatggctgggttggagatggattcgtggtcatctctaggattagcccaaaccccaagtgtgggaacaacatggggtgggtgtcctgatttggaaggttccagtgagccgacagtttgcagcctattgttacaactcatctgatacttggactaactcgtgcattccagaaattatcaccaccaaagatcccatattcaacactcaaacttgcaacacaaacaacagaatttatggtcagtgacagtacctactcggtggcatccccttactctacaatacctgcccctactactactcctcctgctccagcttccacttctattccacggagaaaaaaattgatttgtgtcacagaagtttttatggaaactagcaccatgtctacagaaactgaaccatttgttgaaaataaagcagcattcaagaatgaagctgctgggtttggaggtgtccccacggctctgctagtgcttgctctcctcttctttggtgctgcagctggtcttggattttgctatgtcaaaaggtat

SEQ ID NO: 71671 - DNA, 1130 bp, Homo Sapiens
  misc_feature (25)..(25): n is a, c, g, or t
  misc_feature (56)..(115): n is a, c, g, or t
  misc_feature (117)..(117): n is a, c, g, or t
  misc_feature (164)..(164): n is a, c, g, or t
  misc_feature (195)..(195): n is a, c, g, or t
  misc_feature (204)..(204): n is a, c, g, or t
  misc_feature (233)..(233): n is a, c, g, or t
  misc_feature (247)..(247): n is a, c, g, or t
  misc_feature (250)..(250): n is a, c, g, or t
  misc_feature (268)..(268): n is a, c, g, or t
  misc_feature (325)..(325): n is a, c, g, or t
ggcaccccagcttacacttatgctnccgctcgtatgtgtgtggaatgtgagcgatnnnnnnnnnnnnnnnnnnnnnnnnnnnnnnnnnnnnnnnnnnnnnnnnnnnnnnnnnnnngnccctcgagccaagaatcgggcacgagctatattcgcaatcaactgtngaaagagagagtaagctgtgctgggtgttcntaaactttntgatgccagtggagtcctattccagcaanaactattgagcttntcntgaatggtgtactcctantgaaaaaggtattgaagtggacccttcaatatccagaagagcacacgccagtgtttntaccagatttatgacaatgagaaggcagcctcaacttctagtgaaactgagatccttgaacagaagatcaagaaatgtactaagtctactgccagaaacattaattggaaatatgtgttctattcacttgttgatatttaatcgacaaattcttggagatgtgctcctgaaagacaggatgagcttgcaaagtactgatttaattagccatcccatgctggccaccttccccatgctcttggagcagcctgatgtgatggatgctctcaggagttcgtgggctggaaaagaaagcacattaaaaagatcagagaagagagacaaagagttcctgaagtccacgtttctcctggtttaccatgactgcgtgctcccacttctccactccacacgcctacccccattcaggtgggcagaagaagagactgagactgcacggtggaaagttatcactgacttccttaagcaaaaccaagaaaaccagggcgccctccaagctctgctgtcaccagacggagttcatgaaccttttgacctttcagagcagacctatgacttcttgggtgaaatgagaaagaatgcagtgtgacagtggcagcctctagccctcagcttcccacggaatcagatggatcctccacgattacgtgaataaaatgatggaaccaaaaatcactgtcactttacaacttaggttttactcttttctttctacagaccatatttttaaagaaatgtttatacaataatttaaatattttttaaaaccataaaataaatttttataaggaatactgttatatct

SEQ ID NO: 71672 - DNA, 967 bp, Homo Sapiens
  misc_feature (763)..(782): n is a, c, g, or t
cctggaagtgaatggccaaagtggggggatttgggacctcctaatggggggttcccccgcacttttggtggggcatatgtgatgaggtgtaactaagggattttaccagggggcccctgtgtgatctgtggagggacctggggtctctgatggcctattatgtaaaggagtgccccctcccggaggaaggacagagatggctgcccaaagatgtcaaatctggggagctttaagacagacctctttctatgaacgcaaaaaatacggcttcaagaagaggtgattggtgggtggccccttcctcccccccaacatcagtttgctgcagctgccagaaaacatgcctactactaccagcagaaagggagcagagcccagagcatcaccaggagtgcctgctagtgtactggcagcttgccaccccctcctctcccttcacccagacacgtggtagggatggaaaaggattcttcacagagcactctggcacaccatatcggagaaaacttgatagattagttaatggtttttcttgaattcgagaagcatagatctgttctccatattggtatgttctccctcaaccaagatcttctaaaaagaaataatattttagtcttctgcttgaggaactgactgtgaagcgacgcccagtgaaaaacatgttcttgcagcagctctggtggcagctgtccttgaggaacctttggtgtgtggtgggaagctatcagaacaagaaatgtaggcatttcccgtttttttnnnnnnnnnnnnnnnnnnnncagggctctgccctcttgaaaggcatttacttgtttaacacttgtccagctacagtggggtacagtagctggctattcacaggcatcatcatagcccactagtctcatattattttccttttgagaaattggaaactctttctgttgctattatattaataaagttggtgtttattttctttcac

SEQ ID NO: 71673 - DNA, 979 bp, Homo Sapiens
  misc_feature (866)..(881): n is a, c, g, or t
attcggcacgagggacggaagttccgaagcttccggtggccggcttagttaggagctatggctaaacatcatcctgatttgatcttttgccgcaagcaggctggtgttgccatcggaagactgtgtgaaaaatgtgatggcaagtgtgtgatttgtgactcctatgtgcgtccctgcactctggtgcgcatatgtgatgagtgtaactatggatcttaccaggggcgctgtgtgatctgtggaggacctggggtctctgatgcctattattgtaaggagtgcaccatccaggagaaggacagagatggctgcccaaagattgtcaatctggggagctctaagacagacctcttctatgaacgcaaaaaatacggcttcaagaagaggtgattggtgggtggccccttcctccccccaacatcagtctgctgcagctgccagaaaacatgcctactactaccagcagaaagggagcagagcccagagcatcaccaggagtgcctgctagtgtactggcagcttgccaccccctcctctcccttcacccagacacgtggtagggatggaaaaggattcttcacagagcactctggcacaccatatcggagaaaacttgatagattagttaatggtttttcttgaattcgagaagcatagatctgttctccatattggtatgttctccctcaaccaagatcttctaaaacagaaataatattttagtcttctgcttgaggaactgactgtgaagcgacgcccaggtgaaaaacatgttcttgccagcagctccggtggcaagctgtcccttgaggaacctttggtgtgtggtggaaagctatcagaacagaatgttgcttcccgttttnnnnnnnnnnnnnnnnagggtctccccttgagggttcgtgtcacccaccggcccccggggtacgcgtttcaggtctatacccaactttttctggaagagccgcgtttaaagggg

SEQ ID NO: 71674 - DNA, 1334 bp, Homo Sapiens
  misc_feature (22)..(22): n is a, c, g, or t
tacgctagtacgaggcctgggngtggaattcggcacgaggcagcaggctccctggtgtgtccctgccccagcagacacaggctgccagtccctccagcctcacctccccgccctgggcagcaggtgtgggcagcgtgtgaggctgccgggtggtggtgactggtgacttccttgtgttcagggaagggagaaggtgccttcccttgttttctggccttgttatatacagatggcagcttggatctcaggtacagctccaggggcaggcagtgcccagctggacctggtggccctttcctagtgcctctgcttggggaggagaacctctgtccacgtggaggctaggaggtctcaggtgctgccctggcagcaccagagtgtgggccgggcccgagtgtctgcccctcggtccctcagggtggggcacttagcacccagaagggaccaaaagcagggcatggcggtgcacgaggagtttgggaggtgtaaacagcccatgcacgtggaggaggagctggctttcagccccagaccccacgctagcactttccacgctgcttgcccgctgttgatgtgcagttcccagtgcctgtgtgagccgacatctgctcagtcctatccctcgtcagcgtgtggagacccagctcctgcagccctcctgctcccacgcccccagacagcttggtggagggtcctgcatctgggccaggctggggtgcaccagccaaagacaaagctgcctccacgtgcccaaggattcagatggtgcactggccccgggaggagtctgaacaaaaatggagcccgctctgtgggaagccccgactcccccacgagaaacggtcccacggtgcggatctcccccttcccttgtggggcacagctggcctgggcctccaatcctgcggagctttcctgggtgtggctttgacctcagaagtggctctggtttggcctcaggagtgtggcctggcccagcctgctgcagcctcctggggggcccttgatgccactaatcccccgaccccccgcatctgccaaactgcacagacacacgcattgtaaggccgcttgtggcctccagcgtgcactcttgtttacgtcattgtcatcttcaagaccagtcctttgtgattagttttgcttcgcgagccctggtgtggactgtggtctgtatgaatcgtgtgtaactgtggtgaggggcttgtcctgtatgtgagtctgtacccaggtggggtctgtgccctgcacaccgggcccctctgtatttatcgctgcctgaatgcaacagtaatttatatccaggacaaatacagtctgggcgtcactttcct

SEQ ID NO: 71675 - DNA, 850 bp, Homo Sapiens
  misc_feature (188)..(188): n is a, c, g, or t
  misc_feature (290)..(290): n is a, c, g, or t
aaagaggaagtggggggtggagggggcgagaaacagggagatagagccagggatagtctgccatgcatgtgtgtcagcgccggccagctgacctcgggagccaggtcgcagaagtccttgactaagcaccatgcaaagttaggtaaagagttggttctcgtcgcgccctgacccctctggagcccggnctggcctccctccccccactccacgacccccaccctggctgagaagcttccggacaccccaatggcacaacccgaccaccccctcccccgcccgccctcccnggagagcggcccacgctttgatccccaagggccaccgggggagcgggccccgaggacagacggacggagggaccaagggctcgaggccagaggatggcgaacctctcttgggggtgatgggggagggtcctgggtctttctctttaggagcgagcgggttcgccaagctcctgaggctagtttgggaggagagtctggttttcgggggcaggggggtgaggctaggagcaggtgagacccggagacctgccctggctttggcctgggtcgggggagggggcagtggtggggggagtttttccctaggcatggaggtcagttggggctgggctgggtgggccggggaggggtccttgtgtttgagctcggtggccctaaaacacctaacaccccctcccaggcctcccctaaagatggcgatcctggggtgggggtggaggtgtggatagggccagggagccggggtgggggggcacctggcgtccccagcttagtgttttggagcggctcaacggaaaaacgcttagccctcgtggagcgccacccaggcctcgcttcct

SEQ ID NO: 71676 - DNA, 808 bp, Homo Sapiens
  misc_feature (115)..(115): n is a, c, g, or t
  misc_feature (347)..(347): n is a, c, g, or t
  misc_feature (635)..(684): n is a, c, g, or t
tcgccatctttaggggaggcctgggagggggtgttaggtgttttagggccaccgagctcaaacacaaggacccctccccggcccacccagcccagccccaactgacctccatgcntagggaaaaactccacccccctgcccccgaaaaccagactctcctcccaaactagcctcaggagcttggcgaacccgctcgctcctaaagagaaagacccaggaccctcccccatcacccccaagagaggttcgccatcctctggcctcgagcccttggtccctccgtccgtctgtcctcggggcccgctcccccggtggcccttggggatcaaagcgtgggccgctctccngggagggcgggcgggggagggggtggtcgggttgtgcccattggggtgtccggaagcttctcagccagggtgggggtcgtggagtgggggagggaggccagccgggctccagaggggtcagggcgcgacgagaaccaactctttacctaactttgcatggtgcttagtcaaggactcctgcgacctggctcccgaggtcagctggcggcgctgacacacatgcatggcagactatccctggctctatctccctgttcctcgccccctccaccccccacttcctctttnnnnnnnnnnnnnnnnnnnnnnnnnnnnnnnnnnnnnnnnnnnnnnnnnnttccatgtttcctaatttgcccgaaattttctaccacaagatgtgccttgccttccgagaataagtattacctttaaacaatatcagcgcacacacatagctgcatgttctgctcgtgtagttt

SEQ ID NO: 71677 - DNA, 842 bp, Homo Sapiens
  misc_feature (150)..(174): n is a, c, g, or t
  misc_feature (588)..(653): n is a, c, g, or t
aaactacacgagcagaacatgcagctatgtgtgtgcgctgatattgtttaaaggtaatacttattctcggaaggcaaggcacatcttgtggtagaaaatttcgtgcaaattaggaaacatggaatttttttaaaggtttttcttgtaccnnnnnnnnnnnnnnnnnnnnnnnnnaaagaggaagtggggggcgcaccggcttccccaaagcccacccccgccccccgggcagggcaggacgcttgcgaagtgacgcccagctctgcccctcgggccacgcaggggccccatctctctagctctgggggggcacggcgatgagggttgactggaggggctggtggaaaggctggaggggagggggaggaggcccgcggccattccgtgtcccagctggacaaaggggggggcgggtggtggtaatcaggcacttaaaccactcgctctcacctcccaccgccaggggctgacgggggcgctccagacgggcacccccaactcggggagctctgggtgtccgggctcccccatccccttcctcggaaagtgcatttcttacagtgtgtgcaatgtgggtccctccctttnnnnnnnnnnnnnnnnnnnnnnnnnnnnnnnnnnnnnnnnnnnnnnnnnnnnnnnnnnnnnnnnnnccaattgcatagagacttctcctcccaaacgggcgggcgcgagggctgaaagagtccccagcgagacagcgagtcggccggcgctttgggaggggcttgtggggaggccccgcggcaggcagggccccctcgaggggcagcaggtgcctgggcctcacttcctcccctggccagggctcgcaagcgcca

SEQ ID NO: 71678 - DNA, 942 bp, Homo Sapiens
  misc_feature (528)..(553): n is a, c, g, or t
  misc_feature (792)..(805): n is a, c, g, or t
ggcctgggtggcgaattcggcacgagggcgccccccacgcctccgctgccagtgccttacattctggagcgacccccctccctggtgcctcccagcgaagggggaccgccgtttgcactttcatcgcctaccccgacgcggggcccagctgcgggacgtgcatcacggctgggcccccagaggagagaggaggccgacgccagcggtccccgctcggaacggggagggttttcggggggttcggcgtcgcaccttggggccccccgcagccgtgtagggggcctcccatctgctaagcgtttttccgttgagccgctccaaaaacactaagctggggacgccaggtgcccccccaccccggctccctggacctatccacacctccacccccaccccaggatcgccatctttaggggaggcctgggagggggtgttaggtgttttagggccaccgagctcaaacacaaggacccctccccggtccacccagcccagcccccaactgacctccatggctagggaaaaacnnnnnnnnnnnnnnnnnnnnnnnnnnggaccaggccaaagccagggcaggtctccgggtctccgctgctcctagcctcaccccccttggcccgaaaaccagactcctccctccgcgactagccctcgggagcgtggcgagacccgtttgctcctaaggagaaaaaacccaggacccttcccccttttccctttaggagaggggtcgccattcctccgggtcttccaccccgcgggcccccccaatcaattatatgccgcgagggnnnnnnnnnnnnnngtgggcgcttgggtgacccccaccgtccggagcagttaataacgaaaacgacccgcgccccccgggccgcccacccctcgtggtgctgctcacgcacgatatgtctgtaccacgcagcaggcccgcgacggggtggt

SEQ ID NO: 71679 - DNA, 1697 bp, Homo Sapiens
  misc_feature (140)..(662): n is a, c, g, or t
  misc_feature (692)..(714): n is a, c, g, or t
cgcaacccattggggaaggcttcaccgattgggtcctacggtgggttgggaaaaccccgttccgaaggagaagcgacagtatccggtaacggcaggtcgaacaaagagcgcacgaggagctcccaggagaaaggctgttnnnnnnnnnnnnnnnnnnnnnnnnnnnnnnnnnnnnnnnnnnnnnnnnnnnnnnnnnnnnnnnnnnnnnnnnnnnnnnnnnnnnnnnnnnnnnnnnnnnnnnnnnnnnnnnnnnnnnnnnnnnnnnnnnnnnnnnnnnnnnnnnnnnnnnnnnnnnnnnnnnnnnnnnnnnnnnnnnnnnnnnnnnnnnnnnnnnnnnnnnnnnnnnnnnnnnnnnnnnnnnnnnnnnnnnnnnnnnnnnnnnnnnnnnnnnnnnnnnnnnnnnnnnnnnnnnnnnnnnnnnnnnnnnnnnnnnnnnnnnnnnnnnnnnnnnnnnnnnnnnnnnnnnnnnnnnnnnnnnnnnnnnnnnnnnnnnnnnnnnnnnnnnnnnnnnnnnnnnnnnnnnnnnnnnnnnnnnnnnnnnnnnnnnnnnnnnnnnnnnnnnnnnnnnnnnnnnnnnnnnnnnnnnnnnnnnnnnnnnnnnnnnnnnnnnnnnnnnnnnnnnnnnnnnnnnnnnnnnnnnnnnnnnnnnnnnnnnnnnnnnnaagaattcggcacgagggcggctgtaggcnnnnnnnnnnnnnnnnnnnnnnnacaggtccagactacaacaaaattagtcacttttatttaaaagaaacattacaaataagtgtgcaaaattaaacatcatgattaaatacacatgaaaggaacatgcatactttacagcaacatccacagagaattagctgattacatgacagtgacagtaaagaactaaagaaaccggcaaaaccgagaactcgctgctatgcaggttttacatgtttgcaatctgaaatcaaaaccataaaatagagtttaacgggaatttaagaaaattaaatatatatcccaagtagctgacaatgtagagcccataacctagttaccaaatgttaaaaaaagttatgtgcctctccttcccaaaatgttagtgtgtagctattcttacaaatgaggggaggggagacggtggacctgggggctcggaggccagaccagggcatttccctccacaccagcgggaactgcatggaccctcccagaccctgctctggcagacgaccccgaagttaaaggatgttttccccataacgaatgttcaaagttcgtgcatcactctgctgttccctacacataaccgggaaacaggtttaatccaaaatgtaaccaggagaccccccgtccccgccccgcacacgcctgaggtgtgacggctcggcttctagagtggcctggtgtctgcctcattctaatggccccaacggagacggggacgccacgcacgggcacaggtgacgtcacgggcacagatgaccacgttgcgggtacggagaagaccacaggctgggctcacacgaggggaaacattcacactgtgttctctctacagggtcaggtcgtttttcttcatgttcgggcgggaaaaggaattcctttctccttttctaaggcaagctgctggtgttgtattcaatctgcttatcatgtaagaacttacatctgcacacttgttcactcccccgctgcagactcagtaagaacgacggaat

SEQ ID NO: 71680 - DNA, 825 bp, Homo Sapiens
cagtcgacggtaccggacatatgcccgggaattcggccattacggccgggggccctgaggaccctagtccaacatggcggcgcccagcggagggtggaacggcgtcggcgcgagcttgtgggccgcgctgctcctaggggccgtggcgctgaggccggcggaggcggtgtccgagcccacgacggtggcgtttgacgtgcggcccggcggcgtcgtgcattccttctcccataacgtgggcccgggggacaaatatacgtgtatgttcacttacgcctctcaaggagggaccaatgagcaatggcagatgagtctggggaccagcgaagaccaccagcacttcacctgcaccatctggaggccccaggggaagtcctatctgtacttcacacagttcaaggcagaggtgcggggcgctgagattgagtacgccatggcctactctaaagccgcatttgaaagggaaagtgatgtccctctgaaaactgaggaatttgaagtgaccaaaacagcagtggctcacaggcccggggcattcaaagctgagctgtccaagctggtgattgtggccaaggcatcgcgcactgagctgtgaccagcagcccctgttgcgggtggcaccttctcatctccggtgaagctgaaggggcctgtgtccctgaaagggccagcacatccactggttttctaggagggactcttaagttttctacctgggctgacgttgccttgtccggaggggcttgcagggttggctgaaagcccgggggcaaagaacagaggggccaggggccctcctggctcccaacagctttctcagtttcc

SEQ ID NO: 71681 - DNA, 1037 bp, Homo Sapiens
cggcagtaactacctacggtcttaaggtagcgaggcctgggtggcgaattcggcacgaggcagcggagggtggaacggcgtcggcgcgagcttgtgggccgcgctgctcctaggggccgtggcgctgaggccggcggaggcggtgtccgagcccacgacggtggcgtttgacgtgcggcccggcggcgtcgtgcattccttctcccataacgtgggcccgggggacaaatatacgtgtatgttcacttacgcctctcaaggagggaccaatgagcaatggcagatgagtctggggaccagcgaagaccaccagcacttcacctgcaccatctggaggccccaggggaagtcctatctgtacttcacacagttcaaggcagaggtgcggggcgctgagattgagtacgccatggcctactctaaagccgcatttgaaagggaaagtgatgtccctctgaaaactgaggaatttgaagtgaccaaaacagcagtggctcacaggcccggggcattcaaagctgagctgtccaagctggtgattgtggccaaggcatcgcgcactgagctgtgaccagcagccctgttgcgggtggcaccttctcatctccggtgaagctgaaggggcctgtgtccctgaaagggccagcacatcactggttttctaggagggactcttaagttttctacctgggctgacgttgccttgtccggaggggcttgcagggtggctgaagccctggggcagagaacagagggtccagggccctcctggctcccaacagcttctcagttcccacttcctgctgagctcttctggactcaggatcgcagatccggggcacaaagagggtggggaacatgggggctatgctggggaaagcagccatgctccccccgacctccagccgagcatccttcatgagcctgcagaactgctttcctatgtttacccaggggacctcctttcagatgaactgggaagagatgaaatgttttttcatatttaaataaataagaacattaaaaagcaaaataac

SEQ ID NO: 71682 - DNA, 526 bp, Homo Sapiens
aatgctttaaaaactgtatttgtacaacaggataaaaacagtttttctttcggatgccagttgcaagtttccatgtaacgtatcttaatctacattcccaaagtaattgtgtctcaggtaacctttgccctgcccaaaagatgaacaaaaataaccagaaaggtaaaaatctgtctttggagttgggggaatcactggccacttgcaaactgccacttcactgccaacttttatccaagaaaaccggtttctaaaaacctgcaaaagggacatttaagaggaagctgttccctgaacgaagactgagcaggacaagccaaaagcggtgccaggggacaatgccagatggggaaagtaggagccgggttgtgagacggaaacacacacgccaagaacagccagggagcaaagcgaggagttctggcttctcgtaactcatgaaggatgaatgctcatcgtttaaatttagacgataaagctgatgatgacgggcccgggggcggctatggaaaccacctcattacga

SEQ ID NO: 71683 - DNA, 2128 bp, Homo Sapiens
  misc_feature (25)..(25): n is a, c, g, or t
  misc_feature (76)..(76): n is a, c, g, or t
  misc_feature (1021)..(1031): n is a, c, g, or t
acactttaaatatctgcttcagatnacagttcacaaatacaagagtcctaacttttcaacctttccagttgcagtntaaaaatgaacactttctaaaagttaaggtcaagtgttacagcaagagaagaatgattcctattgaaaagcacatagattttagttaataatactcatgatagattgtaaactggattgatcacattctactcaactggtatcaaattaacacatcagcattacaagtattaaatgtttttctattactatagaggatataaaccaaaacattaatatggcagttatgttctttaggcacagtttagtgatttttttcaaaaataaatactattgaatttcaattgaagttttaaactcaataaccaaagggtcaagaactctgattaggaaaaaagaaaagataactttacgctaacaatgtaagctgtttaaaatttctaacacttaacctatctgagttttatttaagattactttattaaaaaatacaaggaatctgaaaaaagatcaatacaattatcttaaagtacaaagtcataagctgtagcagtttttaactaaaatttaaaaacacaacaaggagggcagccctttagaccaatttattttatatccatttaaaatatcatccaacaaaggacaatgaagtttacatctgggacaggtatacataacttgaggcatttggagtccatcgtgcccactgaataacaactttgctgctgaaatttcttaaaacttaccaaactaaaacaaaaggctgaatgatacaaaaggaggagtatttaggtgtaatctgtcaattggcttttaaaaaaaggaaacacatcctgtttcccagaccagtaaataagcaagagctacatgcagcagtgtgagtattaagacatttctcaagtcttctcaaatgagtccagggtggggatgggatgggggaaaattgatagaaaaactttgctatagacaccacaacaaacaataaatttagataatttaaaatttnnnnnnnnnnnggcaagaggcagcatttcagcagcaaagtgctcaataaaaagtatattgtagaggctaatacaagaaaattggggtaagaagagggcagaaaaatgggtcagcatggatgggcgaaggcctcaaaggaaatatggcgttgtcgttctgggaggaataacacgttctgaatctggaactgcccggaataactttggttctcttgtatttacatctttgaagaccatgatcgaagcaatatttccacaacgatagcagtaattaggagcagaccatactgtcaccagcttctcatcaaacataaatttatagccttcgtgcactagttgatgtgctctgcagatgagttttaagttgttgatatgaacaaactcatttgtgacctttgctccaaaaagccaacctgctcctcggggactgatagcccaggtatccacatcttcaggatctgaccaaaccagatcacaaaatgctcctttatgaggaatttcctgattccgttcgatggttcgaatttgatccagtgttttgatatcaggagataaaccaccatggacacacaaaatctgctcatctattaaagctgctactgtgagcatgtcaaaaactttggtacagtatctccaggcattagcatttccatatttggtttggcactcatcataaaatccatagacctgtgttatctgtctactctcatgatttcctcgcaaaagtgtaatacgatcaggccatttagcctttaatgcaagaaggtaagtgaaggtctccaaactatagtaacctctgtctacaaaatcacccataaatatgtagtttgtgtcaggaacctgacctccagttctgaacagttcacaaaggtcataaaactgtccatggatatctccacacactgttactggtgttgatactggctgaacatttgactcttctaagaggaggtcacaaacgtagtcacatagccgcttcaggtcgttctctggcaggtacttgcacagccgcgctatttccacatacttgtccaggtctagcggcgccattttaagaataacaagccgcggcaacagcgcgcggcggctgtagcagcgcgcggcagcgg

SEQ ID NO: 71684 - DNA, 734 bp, Homo Sapiens
  misc_feature (23)..(23): n is a, c, g, or t
  misc_feature (100)..(101): n is a, c, g, or t
  misc_feature (127)..(127): n is a, c, g, or t
  misc_feature (167)..(167): n is a, c, g, or t
  misc_feature (211)..(211): n is a, c, g, or t
tagagccagacccatactgtcanccagcttctcatcaaaccataaatttatagctttcgtgcactagttgatgtgctctgcagatgagttttaagtgtgnnatatgaacaaactcatttgtgacctntgctccaaaaagccaacctgctcctcggggactgatagcncaggtgtccacatcttcaggatctgaccaaaccaggatcacaanaatgctcctttatgaggaatttcctgattccgttcgatggttcgaatttgatccagtgttttgatatcaggagataaaccaccatggacacacaaaatctgctcatctattaaagctgctactgtgagcatgtcaaaaactttggtacagtatctccaggcattagcatttccatatttggtttggcactcatcataaaatccatagacctgtgttatctgtctactctcatgatttcctcgcaaaagtgtaatacgatcaggccatttagcctttaatgcaagaaggtaagtgaaggtctccaaactatagtaacctctgtctacaaaatcaccctgtccatggatatctccacacactgttactggtgttgatactggctgaacatttgactcttctaagaggaggtcacaaacgtagtcacatagccgcttcaggtcgttctctggcaggtacttgcacagccgcgctatttccacatacttgtccaggtctagcggcgccattttaagaataacaagcc

SEQ ID NO: 71685 - DNA, 1212 bp, Homo Sapiens
gactctgggaggcgtttgggcccagagaagtggatccgccgcttgcgccgcatggagtccgaatcggaaagcggggctgctgctgacacccccccactggagaccctaagcttccatggtgatgaagagattatcgaggtggtagaacttgatcccggtccgccggacccagcagatgacctggcccaggagatggaagatgtggactttgaggaagaagaggaggaagagggcaacgaagagggctgggttctagaaccccaggaaggggtggtcggcagcatggagggccccgacgatagcgaggtcacctttgcattgcactcagcatctgtgttttgtgtgagcctggaccccaagaccaataccttggcagtgaccgggggtgaagatgacaaagccttcgtatggcggctcagcgatggggagctgctctttgagtgtgcaggccataaagactctgtgacttgtgctggtttcagccatgactccactctagtggccacaggggacatgagtggcctcttgaaagtgtggcaggtggacactaaggaggaggtctggtcctttgaagcgggagacctggagtggatggagtggcatcctcgggcacctgtcctgttggcgggcacagctgacggcaacacctggatgtggaaagtcccgaatggtgactgcaagaccttccagggtcccaactgcccagccacctgtggccgagtcctccctgatgggaagagagctgtggtaggctatgaagatgggaccatcaggatttgggacctgaagcagggaagccctatccatgtactgaaagggactgagggtcaccagggcccactcacctgtgttgctgccaaccaggaatggcagcttgatcctaactgggctctggggactgccaggccaagctggtcagtgccaccaccggcaaggtggtgggtgtttttagacctctccttttcttctctttagagacccagcccagggccctcccacccttgcccagacctggtgggcccttcagagggaggggtggacctgtttctctttcactttcatttgctggtgtgagccatggggtgtgtatttgtatgtggggagtaggtgtttgaggttcccgttctttcccttcccaagtctctgggggtggaaaggaggaagagatactagttaaagattttaaaaatgtaaataaaatatacttcccag

SEQ ID NO: 71686 - DNA, 1077 bp, Homo Sapiens
ggcctgggtggcgaattcggcacgagggtggccgagtcctccctgatgggaagagagctgtggtaggctatgaagatgggaccatcaggatttgggacctgaagcagggaagccctatccatgtactgaaagggactgagggtcaccagggcccactcacctgtgttgctgccaaccaggatggcagcttgatcctaactggctctgtggactgccaggccaagctggtcagtgccaccaccggcaaggtggtgggtgtttttagacctgagactgtggcctcccagcccagcctgggagaaggggaggagagtgagtccaactcggtggagtccttgggcttctgcagtgtgatgcccctggcagctgttggctacctggatgggaccttggccatctatgacctggctacgcagactcttaggcatcagtgtcagcaccagtcgggcatcgtgcagctgctgtgggaggcaggcactgccgtggtatatacctgcagcctggatggcatcgtgcgcctctgggacgcccggaccggccgcctgcttactgactaccggggccacacggctgagatcctggactttgccctcagcaaagatgcctccctggtggtgaccacgtcaggagaccacaaagcgaaagtattttgtgtccaaaggcctgaccgttaatggctgcagcccctgcctgtgtgtctggtgttgaggggacgaagggacccctgcccctgtctgccagcagaggcagtagggcacagagggaagaggagggtggggccctggatgactttccagcctcttcaactgacttgctcccctctccttttcttctctttagagacccagcccagggccctcccacccttgcccagacctggtgggcccttcagagggaggggtggacctgtttctctttcactttcatttgctggtgtgagccatggggtgtgtatttgtatgtggggagtaggtgtttgaggttcccgttctttcccttcccaagtctctgggggtggaaaggaggaagagatactagttaaagattttaaaaatgtaaataaaatatacttcccag

SEQ ID NO: 71687 - DNA, 978 bp, Homo Sapiens
tttcccggggggggcactgacccagtttgggcctgggcagtccccagaacccagttagggatccaagctgcccatcctgggtggcaagcaaccacaggggaagggggccctggtgacccttcagtcccctttcagtacatggatagggcttccctgcttcaggtcccaaatcctgatggtcccatcttcatagcctaccacagctctcttcccatcagggaggactcggccacaggtggctgggcagttgggaccctggaaggtcttgcagtcaccattcgggactttccacatccaggtgttgccgtcagctgtgcccgccaacaggacaggtgcccgaggatgccactccatccactccaggtctcccgcttcaaaggaccagacctcctccttagtgtccacctgccacactttcaagaggccactcatgtcccctgtggccactagagtggagtcatggctgaaaccagcacaagtcacagagtctttatggcctgcacactcaaagagcagctccccatcgctgagccgccatacgaaggctttgtcatcttcacccccggtcactgccaaggtattggtcttggggtccaggctcacacaaaacacagatgctgagtgcaatgcaaaggtgacctcgctatcgtcggggccctccatgctgccgaccaccccttcctggggttctagaacccagccctcttcgttgccctcttcctcctcttcttcctcaaagtccacatcttccatctcctgggccaggtcatctgggtccggcggaccgggatcaagttctaccacctcgataatctcttcatcaccatggaagcttagggtctccagtgggggggtgtcagcagcagccccgctttccgattcggactccatgcggcgcaagcggcggatccacttctctgggcccaaacgcctcccagagtcagctctgcgcctcgtgccgaatacccgagcccacta

SEQ ID NO: 71688 - DNA, 921 bp, Homo Sapiens
  misc_feature (295)..(295): n is a, c, g, or t
ctataggctagtacgaggcctggtgttaattcggcacgagggccagagaagtggatcgccgcttgcgccgcatggagtccgaatcggaaagcggggctgctgcggtgacacccctcctcactggtagacgcctaatgcttccatggtgatgaagagattatcgaggtggtagaacttgatcccggtccgccggacccagatgacctggcccaggagatggaagatgtggacttggaggaagaagaggaggaagagggcaacgaagagggctgggttctagaaccccaggaagggngtggtcggcagcatggacgggccccgacgatagcgaggtcacctttgcattgcactcagcatctgtgttttgtgtgagcctggaccccaagaccaataccttggcagtgaccgggggtgaacgatgacaaagccttcgtatggcggctcagcgatggggagctgctctttgagtgtgcatggccataaagactctgtgacttgtgctggtttcagccatgactccactctagtggccacaggggcacatgagtggcctcttgaaagtgtggcaggtggacactaaggaggaggtctggtcctttgaacgcgggcagacctggagctggatggagtggcatcctcgggcacctgtccctgttggcgggcacagcctgacggcaacacctggatgtggaaagtcccgaatggtgactgcaagaccttccaggctccaactgcccagcacctgtggccgagtcctccctgatgtggaagcagagctgtggctaggctatgccgatgggaccatcaggatttcgggacctgcaatgcaggacagccctatccatgtactgccaagggactgacggctccccacggccccatcgcctgtgttcgctgcaaccaggatggcacttgatccta

SEQ ID NO: 71689 - DNA, 571 bp, Homo Sapiens
ctgtataattttaaaagacttatataagccctgtgttgctctcaatcggtttctcctttccctctccccccttcttccctccccattcataaaggcctcccttgtcaccttccctcccaccccgtctcagccctgtgctcctggaggccctgctcccaaaaccgctggaaggactggggcactttctgccacagtagaacacagacagggcttcagatcacccacgcctgttttcagctgtgggtggccatgcagacacgcgccctggcatgtggggcctgggtgggcaggcaggacctgggccctcccacccatcagagcccactcaggaccagcgttcggagctcccacctggacgcatccctcaccacgtccggatttccttctttggatggaatgtaacgcgatctctatttaataaaggcaggctttgttggtacaggctgggtggccacgcgccctcactcctgcaccctggggctctggccaaggcttgggcatctgaaggaatgaaaccaaatcctttccctgcccgccctcgtgcttgggattaaacccaaatcctgaagcc

SEQ ID NO: 71690 - DNA, 1224 bp, Homo Sapiens
aaagaggaaactcctgagtgagctgtttaagaaatctgagtgtgatctattgttacgttatttataactaggtaaaatgtctgtcgtgatagatttcttttaacgttcagatactgtggttgggttgtctatatttaatatgcagatttgcctgctggaatcataatccatttttaagtgaatgtaagaaatgaaaactactgcatttgtgtcttttgaaggcaaggatccttggattttaaaggaagagtatgtgctttgaaggcactcagagactagtaatagcatatggtttgaagggaaacccattctctttcaattacaagagagcatcacttagcgtgcagtacttctgttacagcatccgatgtgtcctttattttaaattgtaaccataacagccattaatggctttatttcttgtattgctctcatctgggaaaagtctctacttcttcaaacgtaacataaatctattatgaagcttgtcccctagtatgccattataaagaaaaaattcttcgatggtatgcagtgtatctattctgtttgtaaaagatcatgtcaaaatgttctgcctctataatgataatagatggttttgtctttcaggatatttatccacctactgtcttctttgccttaaagggacacttggccatcatttttaggctcgaacttaacactgttaagaaataactgaaatatgatggtatttacattaatttttgaaattcaatggtgggatagaattaggtcaggaaatggaagttgttccaatggtgtgagaactaggagacaagatgattcactttattatttaaaccaagcttcatttttagtttttgttgtttaaatggactggaaagttaagtttttgcagggattgttttgaaataaagagatatgctaactcacagatgaactttgttaagacccctttatttttatataaagtctaatatttgaaaagcgattgttataaagtaaaattctctcttcctattctaatatatatcatatatttcaggcttctatttgaaaacaggtataagagatgatatgatacaaccctatagataatgttttttgcttgattgacttatataatcactgtttcatgattactgcttttggaataataggaagttttgtgaaatgctggccttgtgtatatcttagaatgcaaatttaataaagtgtgtatacatgcataaaatttaa

SEQ ID NO: 71691 - DNA, 916 bp, Homo Sapiens
cagtcgacggtaccggacatatgcccgggaattcggccattacggccggggcccatttcaggaggacagcgagtttccatgaagccaggcaggcccggccgttccgagagaggagcatgtccactctgactccacggcaggcccctgcctacagctctaggacgcggacctgcgagcaggcagaggacagatttagccctcagagtcgaggtgcccacctgtttcctgaaaaactggagcatttccaagaggcaagtggaacccgtggtccattaaaccctctccctaaatcatacactttggggcagcccttgaggaaaccagaccttggggatcaccaggcaggattagtggccggaattgagagaacagagccccacagagctcgtcggggaccgtcccccagtcacaagagtatctcaaggaagtagtcttctcccacatcccccaaagataactaccagagggtcagttctctgagcccttctcagtgtagaaaagacaagtgtcaaagcttccccactcaccctgagtttgccttctatgacaatacgtcgtttggcctcactgaggctgagcagaggatgctggacctcccaggatattttgggtcaaatgaagaggatgaaaccacaagtacacttagcgtggagaagctggtgatctagactgagaatcagcctgagcttaacacagctggggtctgctactcgcgttttgtagacttttgtgtaactatttgtaccgtaggacagaatgtgaggaggaagtaacacacacagaggaggatgtgtgtgtgtgcatgtgtttgaattcacaaggaagaaattatttatcttgagctttttcctttgttattcagtttttattggtttattactaataatgataataaaatgtaaacaagagcaaaaaa

SEQ ID NO: 71692 - DNA, 1872 bp, Homo Sapiens
tgcatagtgacctatagaacagctggttcaaaaagcaggctggtaccggtccggaattcccgggatatcgtcgacccacgcgtccgcacaggcagaaaaaaacagagctgcagcaatggcaaacaatttacaaaagggaagtgctggacctatgaggctttatgtgggctcattacacttcaacataactgaagatatgcttcgtgggatctttgagccttttggaagaattgaaagtatccagctgatgatggacagtgaaactggtcgatccaagggatatggatttattacattttctgactcagaatgtgccaaaaaggctttggaacaacttaatggatttgaactagcaggaagaccaatgaaagttggtcatgttactgaacgtactgatgcttcgagtgctagttcatttttggacagtgatgaactggaaaggactggaattgatttgggaacaactggtcgtcttcagttaatggcaagacttgcagagggtacaggtttgcagattccgccagcagcacagcaagctctacagatgagtggctctttggcatttggtgctgtggcagaattctcttttgttatagatttgcaaacaagactttcccagcagactgaagcttcagctttagctgcagctgcctctgttcagccacttgcaacacaatgtttccaactctctaacatgtttaaccctcaaacagaagaagaagttggatgggataccgagattaaggatgatgtgattgaagaatgtaataaacatggaggagttattcatatttatgttgacaaaaattcagctcagggcaatgtgtatgtgaagtgcccatcaattgctgcagctattgctgctgtcaatgcattgcatggcaggtggtttgctggtaaaatgataacagcagcatatgtacctcttccaacttaccacaacctgtttcctgattctatgacagcaacacagctactggttccaagtagacgatgaaggaagatatagtcccttatgtatatagctttttttctttcttgagaattcatcttgagttatcttttatttagataaaaataaagaggcaaggatctactgtcatttgtatgcaatttcctgttaccttgaaaaaataaaaatgttaacaggaatgcagtgtgctcattctccctaaatagtaaatcccactgtatacaaaactgttctcttgttctgccttttaaaatgttcatgtagaacaattaatgaactataggaatagctctaggagaacaaatgtgctttctgtaaaaaggcagaccagggatgtaatgtttttaatgtttcagaagcctaactttttacacagtggttacatttcacatttcactaatgttgatatttggctgatggttgagcagtttctgaaatacacatttagtgtatggaaatacaagacagctaaagggctgtttggttagcatctcatcttgcattctgatcaattggcaagaaagggagatttcaaaattatatttcttgatggtatcttttcaattaatgtatctgtaaaagtttctttgtaaatactatgtgttctggtgtgtcttaaaattccaaacaaaatgatccctgcatttcctgaagatgtttaaacgtgagagtctggtaggcaaagcagtctgagaaagaaataggaaatgcagaaataggttttgtctggttgcatataatctttgctctttttaagctctgtgagctctgaaatatatttttgggttacttcagtgtgtttgacaagacagcttgatatttctatcaaacaaatgactttcatattgcaacaatctttgtaagaaccactcaaataaaagtctcttaaaaaggaaaaa

SEQ ID NO: 71693 - DNA, 616 bp, Homo Sapiens
ctatgctctcgattcgagacacatacactgtctcgacgcgttacctcagtgcctctagcaataggattaactgggccaacgagtttaaaggcgtgccaatcatagtacaggcatcacaggcagaaaaaaacagagctgcagcaatggcaaacaatttacaaaagggaagtgctggacctatgaggccttatgtgggctcattacacttcaacataactgaagatatgcttcgggggatctttgagcctttgggaagaatggaaagtatccagctgatgatggacagtgaaaagggtcgatccaagggatatggatttattacattttctgactcagaatgtgccaaaaaggcttgggaacaacttaatggatttgaactagcaggaagaccaatgaaagtgggtcatgtaactgaacgtactgatgcttcgagtgctagttcattttgggacagtgatgaacttggaaaggacctggaatggattggggaacaactggtcgtcttcagttaatggcaagacttgcagagggtacaaggtttgcagacttcggcagcagcacagcaacgctctacagatgcagtgctctttggcatttggtgctgtggcacattctc

SEQ ID NO: 71694 - DNA, 2046 bp, Homo Sapiens
taggctaggtacgaggcctgggtgttgaattcggcacgaggatggcgatggcggagggcgagaggactgagtgtgctgagcccccccgggacgaacccccggctgatggagctctgaagcgggcagaggagctcaagactcaggccaatgactacttcaaagccaaggactacgagaacgccatcaagttctacagccaggccatcgagctgaaccccagcaatgccatctactatggcaaccgcagcctggcctacctgcgcactgagtgctatggctacgcgctgggagacgccacgcgggccattgagctggacaagaagtacatcaagggttattaccgccgggctgccagcaacatggcactgggcaagttccgggccgcgctgcgagactacgagacggtggtcaaggtgaagccccatgacaaggatgccaaaatgaaataccaggagtgcaacaagatcgtgaagcagaaggcctttgagcgggccatcgcgggcgacgagcacaagcgctccgtggtggactcgctggacatcgagagcatgaccattgaggatgagtacagcggacccaagcttgaagacggcaaagtgacaatcagtttcatgaaggagctcatgcagtggtacaaggaccagaagaaactgcaccggaaatgtgcctaccagattctggtacaggtcaaagaggtcctctccaagctgagcacgctcgtggaaaccacactcaaagagacagagaagattacagtatgtggggacacccatggccagttctatgacctcctcaacatattcgagctcaacggtttaccctcggagaccaacccctatatatttaatggtgactttgtggaccgaggctccttctctgtagaagtgatcctcacccttttcggcttcaagctcctgtacccagatcactttcacctccttcgaggcaaccacgagacagacaacatgaaccagatctacggtttcgagggtgaggtgaaggccaagtacacagcccagatgtacgagctctttagcgaggtgttcgagtggctcccgttggcccagtgcatcaacggcaaagtgctgatcatgcacggaggcctgttcagtgaagacggtgtcaccctggatgacatccggaaaattgagcggaatcgacaacccccagattcagggcccatgtgtgacctgctctggtcagatccacagccacagaacgggcgctcgatcagcaagcggggcgtgagctgtcagtttgggcctgacgtcaccaaggccttcttggaagagaacaacctggactatatcatccgcagccacgaagtcaaggccgagggctacgaggtggctcacggaggccgctgtgtcaccgtcttctctgcccccaactactgcgaccagatggggaacaaagcctcctacatccacctccagggctctgacctacggcctcagttccaccagttcacagcagtgcctcatcccaacgtcaagcccatggcctatgccaacacgctgctgcagctaggaatgatgtgaggtgacgggcggggcggcctgcatcccagggcccctccaatcccaccggacccaggccctgggctaggggcagagcaggccccgccccagggcaatgttggacccccttttactttgtaaagtttgtatttattcccctttaggtttgcagagggggtaggggcagagtcaggggctggccagagggtctgctccctggacagagaggaaggaggtggagcagctggggctgggggcacagcctgggcattctgtggggaggccgtcctcggggtggggtggggccgagtggctgccctgcccccctcatttgcatggctcctcccccactcaagcaatagggccccgccataggaagacccccagagagagggtcagcaggggggccccgcctgcgcctcccctcctatagccccatggtggggctaggctggggctcacccccctccccagctattttatgtctgtaattaaatatgttaaaataaagtcattatcggaagtc

SEQ ID NO: 71695 - DNA, 1005 bp, Homo Sapiens
aaggcagtaactctacggtcctaaggtagcgaggcctgggtggcgaattcggcacgagggcgagaggactgagtgtgctgagcccccccgggacgaacccccggctgatggagctctgaagcgggcagaggagctcaagactcaggccaatgactacttcaaagccaaggactacgagaacgccatcaagttctacagccaggccatcgagctgaaccccagcaatgccatctactatggcaaccgcagcctggcctacctgcgcactgagtgctatggctacgcgctgggagacgccacgcgggccattgagctggacaagaagtacatcaagggttattaccgccgggctgccagcaacatggcactgggcaagttccgggccgcgctgcgagactacgagacggtggtcaaggtgaagccccatgacaaggatgccaaaatgaaataccaggagtgcaacaagatcgtgaagcagaaggcctttgagcgggccatcgcgggcgacgagcacaagcgctccgtggtggactcactggacatcgagagcatgaccattgaggatgagtacagcggacccaagcttgaagacggcaaagtgacaatcagtttcactgaaggagctcatgcagtggtacaaggaccagaagaaactgcaccggaaatgtgcctaccagattctggtacaggtccacagaggtcctctccaagcttgagcacgctcgtggaaaccacattcaaagagacagagaagattacacgtatgtgggggacacccatggccagtcttatgacctcctcaacattattctgagctcaacgggtttacccctcgggagaacaacccttattctattccactggtgacttttgtggacccgagggtcctttctctgtaagcacgtggatactcacccttttcgggagttacaggctcctgtatcccagaactattttcaccttccttcgagggaaccacagaaaccaacactgtgaaccagatcc

SEQ ID NO: 71696 - DNA, 1019 bp, Homo Sapiens
  misc_feature (760)..(760): n is a, c, g, or t
  misc_feature (813)..(813): n is a, c, g, or t
  misc_feature (826)..(827): n is a, c, g, or t
caaggtagcgaggcctgggtggcgaattcggcacgaggcggccgttgccagggtaggggtcgctttgcggcatggcgatggcggagggcgagaggactgagtgtgctgagcccccccgggacgaacccccggctgatggagctctgaagcgggcagaggagctcaagactcaggccaatgactacttcaaagccaaggactacgagaacgccatcaagttctacagccaggccatcgagctgaaccccagcaatgccatctactatggcaaccgcagcctggcctacctgcgcactgagtgctatggctacgcgctgggagacgccacgcgggccattgagctggacaagaagtacatcaagggttattaccgccgggctgccagcaacatggcactgggcaagttccgggccgcgctgcgagactacgagacggtggtcaaggtgaagccccatgacaaggatgccaaaatgaaataccaggagtgcaacaagatcgtgaagcagaaggcctttgagcgggccatcgcgggcgacgagcacaagcgctccgtggtggactcgctggacatcgagagcatgaccattgaggatgagtacagcggacccaagcttgaagacggcaaagtgacaatcagtttcatgaaggagctcatgcagtggtacaaggaccagaagaaactgcaccggaaatgtgcctaccagattctggtacaggtcaaagaggtcctctccaggctgagcacgctcgtggaaaccancactcaagagacagagaaagattaccgtatgtgggggacacccatgggccagntctatgacctccnntcacatattcgaagctcaacgggtttacccctcggaagacccaaccccctatataatttaaatgggtgaacctttggtgggaccgagggcctccctttctcttggaaaaaagtgaatcccttcaacccttttttcgggctttccaaacctcccgtgtgaacccaagaatctaacttttccccctttccgttt

SEQ ID NO: 71697 - DNA, 961 bp, Homo Sapiens
  misc_feature (160)..(160): n is a, c, g, or t
  misc_feature (274)..(274): n is a, c, g, or t
tctttatgacaatcgacttatctgatataagtcatgttggagtccccatcccggatcatggggtcagtttctcattatgacctgtaataccctctgagagtagacagttttgaaattgatcactgctcacctaccaattaacatgatgagcatcattgtnagtttgagaaccctgcaatatgtgatccctgacagctgactgataaggtgctagacacctcactatgctatgactatcacacactgatgccactatatgtccgggttctctccntataacccacagccaatgcgagaacgaagtttcacgttctgaaaatgctattgaatttgtctgaaaatcctgctgtgccaaaaaaactattcagtgccaaagctctttcaatatttgtgggtctctttaacatagaagagacaaatgataatattcaaattgttattaaaatgtttcagaatatcagtaacattataaaaagtggaaagatgtccttaattgatgatgatttcagtcttgagccgcttatttctgcatttcgtgaatttgaggagttagctaagcaactacaagcccaaatagacaaccaaaatgatcctgaggtgggacaacaaagttaatatgattaaccacctgccgctgatcagccttatgttcccaaagagccctgagtagtgctttggtgttcacagtctgtttttttgttgtaacttatattttttaatgctgatgttaactttgtcaaactcttgttttgagctggatcattttgtggatgccaaatgaatatcaaaactgaaaacacatttgttgatatttgtcttgctgtccagattgcggtatttttcagtattaagttttcaatgaactgtgtcacctaagtaagctaccctgctattcgttgtttaaatatatggttctctatttgagtctgtgttttcaataaagttctatgttaaaattggc

SEQ ID NO: 71698 - DNA, 1607 bp, Homo Sapiens
  misc_feature (951)..(962): n is a, c, g, or t
gatgtgatgctgttgtcacggggacctgtgctgggaggactgagtgaagattctttcagctgtttgtgtaaggctgtgactttctcagctccttcctcctgtgtaaatttcactgtcttcccttcttacattttgattcccccctccccttttagtaggttttcctgctattcctcgtcaagtcctcttgtttttttatcttgcccaaagagctccctctcaaggccaactataggctccgcttgccctgtacaaaactaagaaacctctttggttgtcctttccttcctggggtatagaatgttcttggaagctccattgatttagtagctgctccatcatctagcttgtgaaaccattccaaactaattttttaaaaccataactgatttgtcattttgtatttgtgatataacaagtctagaagttagaactgttgtcattcacataataagattactctgtctccttgggaaaaaaactttatggaggctgtttgtcctctcaatatggttttaagattgaaagtaagaaaacggatttaggatgaaaactctagaactaccctatgctgtttatactgggaaatgctttgtaccaagtagcagtgactagacccacagacatgaaaagcaaccttagggagtaaagtgacccaaacattgaaaatgacaggaaagagaaagtagaagcagcaataaatactgccccaactttcctggagcccgaggcctcatccatagctatgatcacttgccctctgaagcttatttttgcttctttgggtttaagaattgagaaatatcacatttgcccctgatgttttgacagtctcctagtgctcctggtagtgccactaagggaaaaccaaggcgcgcattccttctccctggactttaccttacttgttagtctacgccccactgtttccacccatccccttagccaacnnnnnnnnnnnngaattttctgagaatattgtcctatcctcttttatatatggagttctctcctctttatatcctgagactttgacaccagatgtagatatttatctggagctggaaagaaaaattctttttctgtacctcatgcctatctggtaatgtttaatgggttatttctctttgagggtggctttctctggaacattggttagagcagctttgttgtcgtgtttctggattctcttccccattttgcgtaaatattggtcttatatattcttgcctattttgtggcatatgccacataaaaaatgaacctgatatagacaagtactaccttttcaaattctgaaaggctattaccactttaactctttgtgctcctccaaatagctttaaaatgtgggcttttgtgaagaccactttcaaacaagggagcactgaaacctgaattggatactgccagaataggtagttttgaaacaagttaaggacatggtatatgcactctgcattttcattggcagtgtgcccttaaagccctttcagtagatgagggttgtcagggaggagaaatgaagaagctatgttaatttctggtgagtaagacctggggaatgtttggcaatgacaaaagaaataaatgactctcagaaaaaa

SEQ ID NO: 71699 - DNA, 2257 bp, Homo Sapiens
  misc_feature (140)..(140): n is a, c, g, or t
  misc_feature (658)..(730): n is a, c, g, or t
  misc_feature (820)..(837): n is a, c, g, or t
  misc_feature (975)..(993): n is a, c, g, or t
  misc_feature (1542)..(1542): n is a, c, g, or t
ggcttctgcggtctcccgcgcgccgcgcattgccgtacctgccacaagacgataggacgcgcgtcgttcgaccgacgaccggctgcctgcggtgcgcgccgccccgcccgttacactccccgtcggcaggaggcgcgcanatagcggctatctgtagcgccacggcgcggcgcgccgacacctacgcggtggcgatgagatactgccacagggtctggtggcggggaggcggcggaggtctgacacacgtcacgggtccggcgctgaggtgtgtagaagggggcgctttccgccgtgtcgggtggggcagtgtagatacagcccctcgtccccgcccatcgtgcggcgcgtcggcgccgtgtgagcgggcgcgcgggcggaaagctgtgcaccatgcagcgcgccggggagagtgcatgaaaattgtgtggggtataattggcgaggagagcgcgctacgcggatggcgagcttgcacgggaagtggagcaaacaaatctcgcgggttcaagaggaggacctgtggggagggggtcccgcgtgaaaaagaaagtttggttggcacccaaccaccgtgcccggtttggcaccgccccggcgcgtggtgttgtgatgtggtggggggaaggcgcaaggcgggctcggcgcatgggccgcnnnnnnnnnnnnnnnnnnnnnnnnnnnnnnnnnnnnnnnnnnnnnnnnnnnnnnnnnnnnnnnnnnnnnnnnngaaaagaaatgtgtttgagaaaactttctccgggggcgggagggggccggacaagcaacgctcgcggtgctggggccgcttatttccccnnnnnnnnnnnnnnnnnntattgtggtgttttcaagtttcaatcatttaattaacatctttaaatgaaacacagttttcttcatgtgtctcactcaggcttcagggcagagggaatggatttttagacatatcaaagactcaaaaatttaaagaannnnnnnnnnnnnnnnnnnaccttctaacattttatggaaattaaaaatcagaggcttttggtctctccatttactctaggtcaagctcatttaccccagaggacaaagaagggctgcctcttctagaccctcccttctcctttgtcctctgtcccacccagcagggaaacaagctcagaagatcctaacaggatagagttccagtaatgttggaggagggagagggaaagagaagtcaggttctctcccacctccagccattcccaggttgctgccagggcctggtttcatgcagctttgacccagtcctggatcctagggggtggggtagatcaggagctctgagcagaacagtgctcactgattatcctctttccccaactcagtgggcaggtgcagcgtacacccagcagcactctccactgcccacaggcaagggaagaatattgattgattagctacaaggagaagacagtagtgactagtggaaaacaccctggagagggccagaggaacctggctctcaccacatcccctctgttcccagccttggtgagggggcggganggtcatgtcaacctctctccttggtggtgaagctaaaagcaaggttccttgccagactcaagcccaagtcactgttaaggaaagaggatcaagaaagaagcggtggccctggggggcagccacgctgctgtggacccacaggggccaatggggaagccagcttgcctagacaggtggcacaggctgaaaataggttaacattcccggagagtacagtaagagaggctgatacctaggggaccaccacccagcctgccctagaagcactgggtgcccctcattgactagagaagacttgagtaaaatgcacctgtggcttcccatccttgtcactcagcgttagctgcccccagtggaaccacctgtgctgaaaggcagctgcagaaaggacatgcaccgaaatgaggagagagaaaggtcagagaatgaagtgtggagggccaggcctgggcccactgctcaaggaagctccccccctccagatgctcccttccatccacctcctcagtgcttgctcagcccaaaggctcctgcctctgaagtgctgggggcccacccaccccagtgtggtcaaggaggcaaggggcaggtgcttgacactgccaagtgccccgagatgactctactgctcacccatttctttgggccctggcagtctcctacttgtccccagcatggagcacctggcagaactggaaggcaggagggtggttga

SEQ ID NO: 71700 - DNA, 2092 bp, Homo Sapiens
  misc_feature (1815)..(1824): n is a, c, g, or t
  misc_feature (1902)..(1914): n is a, c, g, or t
aacgtaaggctaggtacgaggccgggtgtgtgaattcggcacgaggctgcagcgggcgtgagttgggggaggacgggttgccgactcgcctacctagcggtctcttgattgtcgatattttgttggcataggtttatgtagagacgtatacatatatatagacacactgtctttaaatctaggcctgtatccggtgtccgaggcgaactcagtaagatgatgttaagaggaaacctgaagcaagtgcgcattgagaaaaacccggcccgccttcgcgccctggagtccgcggtgggcgagagcgagccggcggccgcggcagccatggcgctcgctcttgccggggagccggcaccgcccgcgcccgcgcctccagaggaccacccggacgaggagatggggttcactatcgacatcaagagtttcctcaagccgggcgagaagacgtacacgcagcgctgccgcctcttcgtgggaaatctgcccaccgacatcacggaggaggacttcaagaggctcttcgaacgctatggcgagcccagcgaagtcttcatcaaccgggaccgtggcttcggcttcatccgcttggaatccagaaccctggctgaaattgcaaaagcagagctggacggcaccattctcaagagcagacctctacggattcgcttcgctacacatggagcagccttgactgtcaagaacctttctccagttgtttccaatgagctgctagagcaagcattttctcagtttggtccagtagagaaagctgttgtggttgtggatgatcgcggtagagctacaggaaaaggttttgtagagtttgcagcaaaacctcctgcacgaaaggctctggaaagatgtggtgatggggcattcttgctaacaacgacccctcgtccagtcattgtggaacccatggagcagtttgatgatgaagatggcttgccagagaagctgatgcagaaaactcaacaatatcataaggaaagagaacaaccaccacgttttgctcaacctgggacatttgaatttgagtatgcatctcgatggaaggctcttgatgaaatggaaaagcagcagcgtgagcaggttgatagaaacatcagagaagccaaagagaaactggaggcagaaatggaagcagctaggcatgaacaccaattaatgctaatgaggcaagatctaatgaggcgtcaagaagaactcagacgcttggaagaactcagaaaccaagagttgcaaaaacggaagcaaatacaactaagacatgaagaggagcatcggcggcgtgaggaagaaatgatccgacacagagaacaggaggaactgaggcgacagcaagagggctttaagccaaactacatggaaaatagagaacaggaaatgagaatgggtgatatgggtccccgtggagcaataaacatgggagatgcgtttagcccagcccctgctggtaaccaaggtcctcctccaatgatgggtatgaatatgaacaacagagcaactatacctggcccaccaatgggtcctggtcctgccatgggaccagaaggagccgcaaatatgggaactccaatgatgccagataatggagcagtgcacaatgacagatttcctcaaggaccaccatctcagatgggttcacctatggggagtagaacaggttctgaaacccctcaagcaccaatgagtggtgtaggtcctgtgagtggtggtcctggtggctttggtagaggaagtcaagggggcaactttgaaggccctaataagcgtcgtagatattaaacattcgttcattcctggctatctagnnnnnnnnnngtcagtggtatgcctttatacttttacctgttatctggaagaaatggttttattgttaatgtatgtagacttaaaagnnnnnnnnnnnnngtaaaacttgaggtttttgtatttttctttattcatgagctttgtagattagaatggtaatgatgctcatcattttgaatgttgaaatgtgtttgtgactttagctaaatataagtattccatagtactgtgaaatctatgtagttaatctcaataaagaaatcattttggataattt

SEQ ID NO: 71701 - DNA, 451 bp, Homo Sapiens
tatcgaaacctcaattactgttatgaatttactaaatgagttaactctgatttttctcattgtttattgaaatcagttcttaaaaatgctgaatctgatttcattgtatttctagggtgataaaagaaaatgtggctgaagttacccgaagttcagcttgcagtgtaattcagaagagttaagaccagaagtactggaatcatacttcctttcagtcttgccacttgcctagtgaggcttttccgaacctggaaggagacgtctagaaatcccaactttgctgtgtaaggaccattagctgcaagtcagtggaagtctatagaaagcagtgtgaattccatagtggtcttgacttcttagcaaggatttgggataagtctaaaacttcagacttaaagctttgaagcatgttaactgcatgaaatattaaacatttcgaacttcaaaaaaa

SEQ ID NO: 71702 - DNA, 1339 bp, Homo Sapiens
  misc_feature (41)..(75): n is a, c, g, or t
ggacagagcgcagcgagtcgtttgagcgaggaagcggccgnnnnnnnnnnnnnnnnnnnnnnnnnnnnnnnnnnncagtcgacggtaccggacatatgcccgggaattcggccattacggccggggtaaccgaggttcactccagaaacatgtaaagaaagtaaaattattaaacaggccaaatatttaattcttgtgacattgaatctgcttttattataaagagttaacgaaattgccatttccatgacagttgcctcctatcaagcaatcttaatattgaagcttgaatttaggtctgctggtcagtgattctagtctagcaaattactttaggactgaaagctcttgtttctttagaaaaatatactatggagattacgatcctgtttactagctgaacgactctgtctcttttccaggtcaaaagcattttgtgggaaatatcctgttcgtagacctagcgagaaacaagacagaataacaaatctttcttcatttatgaactttcttactccagtacaagcagtcttatggatgtctgggcaatcatagcgacttgccatttacaaaacatgctacagggagcacattattctgtggttaaacaatgatctccagaataagtgtaaactgcagttttcctttgcattgagggttttggctttttatttgtaaattaaatcaagatgttacccactccttggtgtggtggtcttgctggttcgtgttgggaagtagtatggcagcaatgcacaaattcagaatagccaagaaatccctccttttcaacgctctgtgcctgggaaccattagaggagttttaaaaaccatccctcatagcccacaattttgggtcaactctcaaaattgggaataagaaaactggcactgttgggagaaaaatcgttcttactgaaacatgaactggctcaggcaagcaaatagcgggagtcggcacaggaaggagtgtgtgctgcggggatgcgtggtggcgtcaccttcaaaactaaagtggtgccaggcggacagatgagtccttgatcttgtttcctgatcttgtttccatttgactgaattctgaaccttcattgtcttcacagtcttgccacttgcctagtgaggcttttccgaacctggaaggagacgtctagaaatcccaactttgctgtgtaaggaccattagctgcaagtcagtggaagtctatagaaagcagtgtgaattccatagtggtcttgacttcttagcaaggatttgggataagtctaaaacttcagacttaaagctttgaagcatgttaactgcatgaaatattaaacatttcgaacttctttaaaa

SEQ ID NO: 71703 - DNA, 689 bp, Homo Sapiens
ttcggcacagcggcagctctggctatcaccactggcctctggggtcttcatatcttgccatctcatccagggttccatgaaagttacccagggtcctcatgtccttccttagagcctgagtggtgtgaggtgacaggtctctctctccactgcccctttctggtttaaaaaaatggtgcttgatgagggaaggtagactcttccctaggactgacgagttacggctgccagatgcctgcatgggaagaggtggacatctgcatcttccattggtggtcaaggatgggtgtgggagaaccacacctagtgcaagcctggtactcagtaaatatttgttgaaatgaatgataagagcattggtccccaagccagagagccagaagccatcacccaatgaccgccccttccttccggtctacaagagctctcaaggctgggtctgccaccactctgctttgcccaagtgtgacagcactggggaggagagacaggataaagggcagatgtcagcaatactaagggcttcctcatgggagggcatgaggctccactcattgtcttgtgacttccatccctgctgaatggggctgcaaggccaaggctccttaggggagaggtccttacctctgatccacttagagcaataaccactttttaaatgtaaaataaaaagacaaatgaaaaggcaa

SEQ ID NO: 71704 - DNA, 1174 bp, Homo Sapiens
  misc_feature (25)..(25): n is a, c, g, or t
ctggtaaaccggtccggaattcccngggatgcacagagtgccagcagctgatccggtggtgcctgtccctgcggccctcagagcggccgtcgctggatcagattgcggcccatccctggatgctgggggctgacgggggcgccccggagagctgtgacctgcggctgtgcaccctcgaccctgatgacgtggccagcaccacgtccagcagcgagagcttgtgaggagctgcacctgactgggagctaggggaccacctgccttggccagacctgggacgcccccagaccctgactttttcctgcgtgggccgtctcctcctgcggaagcagtgacctctgacccctggtgaccttcgctttgagtgccttttgaacgctggtcccgcgggacttggttttctcaagctctgtctgtccaaagacgctccggtcgaggtcccgcctgccctgggtggatacttgaaccccagacgcccctctgtgctgctgtgtccggaggcggccttcccatctgcctgcccacccggagctctttccgccggcgcagggtcccaagcccacctcccgccctcagtcctgcggtgtgcgtctgggcacgtcctgcacacacaatgcaagtcctggcctccgcgcccgcccgcccacgcgagccgtacccgccgccaactctgttatttatggtgtgaccccctggaggtgccctcggcccaccggggctatttattgtttaatttatttgttgaggttatttcctctgagcagtctgcctctcccaagccccaggggacagtggggaggcaggggagggggtggctgtggtccagggaccccaggccctgattcctgtgcctggcgtctgtcctggccccgcctgtcagaagatgaacatgtatagtggctaacttaaggggagtgggtgaccctgacacttccaggcactgtgcccagggtttgggttttaaattattgactttgtacagtctgcttgtgggctctgaaagctggggtggggccagagcctgagcgtttaatttattcagtacctgtgtttgtgtgaatgcggtgtgtgcaggcatcgcagatgggggttctttcagttcaaaagtgagatgtctggagatcatatttttttatacaggtatttcaattaaaatgtttttgtacataaaaaa

SEQ ID NO: 71705 - DNA, 669 bp, Homo Sapiens
  misc_feature (105)..(105): n is a, c, g, or t
ccagtggtcaataaactgtaaagcgaagaggtaaattgtgatagagaattttctatgtcatgggaaattgaaatcacatttattttgattaccagcaatatgatntgttaactctgtgccaagttttaagtatattttttcacaaagatagagtgccatagtgaaactaaacactgtgcataaaggtacatgaattattccagttttaaagtattatgcatgtttgtttaataaatgtggcatggttttaatacaaatgctatgttatttaaaagttagaggaacatttctattgacaaaaatatgcttcatttacatataatgttaccatatggtgttaatgattaaattagatctttacatagttcttacaaagcatcagtctaggaaatatgacttattactgatgcaaacgtgaacattttgtagtagttttgtaaaagaacatccttttcaaatatctatgttaatgtacccttgaaattaaatgcaagcacatagtcagtttgtctaattttgtgtgaaattttgtcgaaaatacctaaacatttcatctatatttgtgcctaccatgttataaatgttcataagtaccttcatgtgtctataaaaaatgttatatttaaataaatgtgaattaaaataaaatttttgattattttcagatcc

SEQ ID NO: 71706 - DNA, 460 bp, Homo Sapiens
ctgctccctcctccacctccccatcctcttgtctcccctcccctctgaatccagcccagcggggcttctcctgcctccatcacatcacagaagtacctcctgcttctggttttaattagagccttccccgattacattttcctctgaattttttcctatctacatttgatctgtcatgtttaaaccccctacttctaagggaacttctctaatctcttatcctcatccccaaatagtgttttcttcctctgggttcttataatgttggtatcaatctcacagcatttagtgcttcctgcctggtgtgacagttacctgtgtgcatgtgcaatttctaatttcccacgctagactgtgagcttcctaaggcaagaatcatgccttgttggtttctgtattcctcatggtgccaaacacagtgccttctacattgcaggcgctgaataaacatttttaaagc

SEQ ID NO: 71707 - DNA, 1244 bp, Homo Sapiens
  misc_feature (848)..(905): n is a, c, g, or t
aaagcttgtgacactagtgaaccgtggtttaaaaagcaggctggtaccggtccggaattcccgggatatcgtcgaaccacgcgtccgaatggaggcagcgttcctacttgtcatcacacagctgaagacattgtttcttaggtgtgaaatcggggacaaaggacaaacagagacacacggcattgttcatgggaggcatcgtcaccctcctgggtgttctgtgggaatttcctgtgtgaggaaaacgtggccacagggttgtgctgtacccacccttccccggcgagatggccctcggcctgtgccgctgcttccaccctcgccactccatggcagcttttggtctgtttccggctctgccctctgccctgaactctcatccggcttgtacctgcctgctggacccctccacctggaggccagcccatgtctcaggcccagccctagcctcttctcctcaaattctaagtgttttctctttaggtttccctggctttgtgaatggatcatgtgtctctaggtataaacctgacatcatctttccacccggcttacctccaccagatctccccagttctgtctccatcttctacctgcagctgctctgttctcatggtcactgctgcatcactgagtctggacccttgttatcattttcaaactggcctccttccctcgttccccacttcttaaagtcacctgtccattgccaccagattaagctttctccagccagatcacctctctctgagaaacctccattgacatggaaacaccattgtctggcacacatactcacatactcaccttcccgtcttgatccccacacatctttccagcctcccctnnnnnnnnnnnnnnnnnnnnnnnnnnnnnnnnnnnnnnnnnnnnnnnnnnnnnnnnnntgaatcagcccagcggggcttctcctgcctccatcacatcacagaagtacctcctgcttctggttttaattagagccttccccgattacattttcctctgaattttttcctatctacctttgatctgtcatgtttaaaccccctacttctaagggaacttctctaatctcttaatcccctccccaaatagtgttttcttccctcggggttcctataaaggttgggtatccaatcctcacagccatttaattgcttccctggccctgggggtgaacaggttaccctggtggtggccatgttgcccaaatttttctcaaatttttcccccacgggcttaga

SEQ ID NO: 71708 - DNA, 769 bp, Homo Sapiens
  misc_feature (19)..(19): n is a, c, g, or t
agaagataaagtctttacntcacctggagacctgtgcccactccgccagtgtgtgtgacaagcagcttaaactgcaccctggagaacggcgtgccttgtgtgattcaggagtcggccccggttcataatagtttcattgattggagtgcaacatgcgaaggccagttttccagcgcatactgtccattggaattgaacgattacaatgcctttccagaagaaaacatgaactatgccaatggcttcccctgtcctgcagatgttcagacagactttattgatcacaactctcagtctacctggaacaccccacccaacatgcctgctgcctggggacatgccagtttcatcagctctccgccctacctcacaagcacccgaagcttgtctccaatgtctggactttttggttccatctgggccccgcaaagcgatgtgtatgaaaattgctgccccatcaaccccaccacggaacattcgacccacatggaaaaccaagcggtcgtgtgcaaggaatactacccggggttcaacccgtttcgcgcctatatgaacctggacatatggactaccacagcgaataggaatgcaaatttcccactgtctagagactcgagttactgtgggaatgtgtgaaaataattggatttttaaacaatgtgaataaagaggcttgtgttttgattactagtgtaaactggttattgagatagattatgacattggtggatattttggcacttttatatgaaaataaattttttaatga

SEQ ID NO: 71709 - DNA, 2078 bp, Homo Sapiens
  misc_feature (43)..(139): n is a, c, g, or t
tccttgatgttggggtctcataccagcagatttccctagagcnnnnnnnnnnnnnnnnnnnnnnnnnnnnnnnnnnnnnnnnnnnnnnnnnnnnnnnnnnnnnnnnnnnnnnnnnnnnnnnnnnnnnnnnnnnnnnnnnggatagatgccaaggtatgctgtcaagcatactatactgcccagtaacagtggcccatagcagggacctgccctatcaaaatatcaggtgtatggaggtggagtcccaacgctagagcagcccttctcagctccaccctgcccggggagggaggaggagctctggtttcagagcagtgccgggattgcctttccccaggatctgtgtcggccatccaggaagaactgtactggccaagcctgggaccacacgtctgcagagatcctgctctgctggcctgagccccaggccttggcctcctgtgcttgggtaaccatggccactgggaaaagcaaggaccgtgtttgactttcttggagaggtgaaagaggtgaaagaacaagttgtgtgctagaaaacttttgaggaattcttatttgtgttagagcagaggaggtcccagataccaagtggcgcctcccaggaaaggctgggagaagaggtggcctggagtaccccgagatcccagcagcgcacacagtggagggatgaggatggatgggtcctaacccctgattttgatgggatgtgttcatgtcctatctcctctcctggacacattaaggggttgggacaagaagagactcctgtgagatcagcagacctcgtgtttaaggagagaatgcctgcctgcaacactcatggagagggacacttcctggccccacctgctaaatacctccaaactctgggcaggcgcctgcattctcaacacaggacttcccttaacagtttccggatcagtgaccaccaccacgttcaggtttctgaatgcagacccaccacgagggatggattccacccgcccgccctgctgcagatacatgcggcacagcaggcacgtgcctggagagaacagctcctgagcacagcacccttggagccctcaccccgctcacgatcctcaccagtgctgatgatgccgtcatgctgctggcctgagacagtatcccagctacaacaggacgacaccgggttcaggaatatgtggctatcaccttgagcactgacagtggccttccaggctagttgccttccaaacgcaggtagccgacctgcaggagggcctacaaacgggcccagcaagagctgggcaacagctggcttgtgaaatgagacaccttgaccaatatgctttgggtggacggtctcctacatgttcagtggaggccaccaggagcatccatgagcggggaaggggtccacacccttacatggcaagttgatacgatggggtgcttggtggatgggccatggaggtccgtgagctggaactgggcacacgccatcccagagggctcaggatgccccaggaaggaaagaagggcaacagactacacgattggacgtgtgtggttgactgggatgaagttggagggaggggcagggccttgcaggggattggtactgatcccagggaggaagtgttggggcttcatgaactaggatgaaaggaggcccctgagccatgacaaggggcacatccaggatttccgccaccctgaatttagtagagctagtaggccctggtcgtcactctgggcagggatgccgtcagccttgagggtcgccacccacctgtgtgttgccctctgtcctggcggggaaacatacaccccttgtctcaccaccaaccttgcttgtgtagtcagcagggctggccctgccccaaggactcactgcatgtacccggacccctaggcctggcctttgcagcatagttgggagcttctggattccatctgcacctgtgagccccatgctggctgtgcactgcgcgggcctgagactgctggatacaatgttgggcaacaactcagccagcctgatggcagcctcagaggcttactctaacccatcccagaataaatggagacttcatgtgttcattgtttcattc

SEQ ID NO: 71710 - DNA, 1173 bp, Homo Sapiens
  misc_feature (193)..(193): n is a, c, g, or t
ctttctgatttatcacttttctagttgataagtaggattcaaaacgtttgatatgtaagtatttatataagactaatgtaatttaaagttctgtattattgtgattaatcatacagaaattcaggaactgatcagaagtgagattcttttccacatctggttaatgtagtgagttgacaccctgtgggtggtnaaagcattataaacatttcatcttgaaccatgatttatacacatctgtgttataagggaggcttgagtacatataccaatgaagagatattcagcatttgtctatttgataaggaattaaatgtcctagtgattataaagtaaaaccacagaccaatttgcaaatgatcttcaatgttaagcacttgctctaagattaaaattccttttctttttaaggttaagggtgtgtacgtatggcagtgatgtctatgttgagattaacttatgtattgaggaaaatttgaagtttattttttcgatgaataaggctgtcaaatgatttagtatagattaatgacatcttttttagaaatattaaagtgagtattcctcattatgtcatcatttctgataattagagtgctaatttgaatgttagataatgtttccacatctatacctatttctttctagggcacttctgaccctggggcttggggatggcctttaggccacagtagtgtctgtgttaagttcactaaatgtgtatttaatgagaaacattcctatgtaaaaatgtgtgtatgtgaacgtatgcatacatttttattgtgcacctgtacattgtgaagaagtagtttggaaatttgtaaagcacaaaccataaaagagtgtggagttattaaatgatgtagcacaaatgtaatgtttagcttataaaaggtcctttctattttctatggcaaagactttgacacttgaaaaataaaaccaatatttgatttatttttgtaagtatttaggatattattttaaataaatgattgtccattatcaatataatagttgtgaaatgatttaagtaaataaactttatgcttctgtgtctgttgattttgatgggtttttagtgggcataaatgcatgtttatttgctgcattaaatagaggagtgaaaatatgtaggtttgtaaagaaaaagtaattgcattcttctaa

SEQ ID NO: 71711 - DNA, 1382 bp, Homo Sapiens
tttttttggttaaataactttaattacaccactgtaagtagattctgcctctgaccctcccacaggacacaaccggatgtgattcttgtcacttctattttaaacatgcatactgggaaaaacagaaacacaagagtgctatgggtacacgcgacgtgtgagaagaaaggaaccccctggagacacggacgcggtgtgcggtgacagccaggcctcactgacaacagggcagcgaatcgcagccgggacgcctctgaggcggaagcagtcttgggatttcctgtcacgctctcgatgcttctgcccactctggtttgtcacggggatgcttcattttggacagtataaaaccggtgattaatgcatatcttgctcttcagcaaaatactattcaagtagttttaacttaaatattttaaaagtaatctttacattattgaagattgttaaaaaatacagaatctgacaacttttcactcaatctgatgctctgaaactcttcacttctgttttatcataatttagaaggcaatccctggcctctataaaactctctgcaggattagcttcaagatccatctttcccccactggttcgagtttaaaaggctttcagaaccttttgccactgcattataaagagaacatgaaccccttcccattacttcctttagctacacatgctatgactgagagtgtgctggaagctaaacaagccccagctgatttctgccacataaaagggcgccgtgaagaatttccctgttgaaaccttaatgaagacgatgatcccaagtgaagctttatgaagagacggcacagcagagtgaaatgtttggcaatcaacagttaattagaattacatccttgatcagggatgatgctatctccgcgaactcagtcgttagaaaagttggtttctgctgtgacgaggctcacagtggccactcgaggaagtccagcctcgtcagcctccggtcccgggccccaggcccctccaggccctcagtagatatctgggcagtcggagaaattccgctcaaagtaatcccctgcatacaaccagtcgggggtcccagtgtaggggttattgcctgggtagaaccacctcgtctgccactctgcctcctccttggcccgctccctccgtgcttctctctgcttctcctccagccgctccttctcctggctggccagatccatgttgccattctccatgccgcggatgtcagggcgcaggcggcagtccgtgggtggcagggtcttctccatgcctgtctccagctcgttgaggctcacagtgaaactggtgaaattatacatctgggcagagttggggggccgggtgttgatcctccagagcagcttgctgtcaagaatgac

SEQ ID NO: 71712 - DNA, 1214 bp, Homo Sapiens
  misc_feature (117)..(141): n is a, c, g, or t
  misc_feature (193)..(207): n is a, c, g, or t
  misc_feature (480)..(488): n is a, c, g, or t
  misc_feature (625)..(642): n is a, c, g, or t
  misc_feature (690)..(1164): n is a, c, g, or t
cttctcaaacagtttaatagcaaataaacaaaggaaggtaccacacttggcagatacaaaatgactttttgtccatgtgtctgtgcaattaaaacagatttaggttccccattgggnnnnnnnnnnnnnnnnnnnnnnnnnggaaggagattcctttgaaacacatactcccttgctccaaacttataacaannnnnnnnnnnnnnnaaattcactacacaaactctgtgattaggtaagaaaagcgacaagggctctccttgcctttttttaaaccattaaagtaaaatccataattttctacagagtacaacacaagttcacacaaaaaagacattttcttttgcaaatcaaaacaggaaagaaaggaaaagctcaaacaagataaaggaaaagcatttctacggctgaatcacgactgagttgattgaatcccgttgttgctgcagaacagactgtgcgtttggtcatagtggcaannnnnnnnnctcttcacattgtgaaatcactttacattgttttctagtagaaaaggcaaaaaactgtacaaaacccctagtgttaaatacaacgtttgtaccaataaaaaactcacacaggtttgtctccaaaatgtaaagtttcnnnnnnnnnnnnnnnnnnaaattattcaaaaaaagcctacagccgcggcctcgtgccgaattcttnnnnnnnnnnnnnnnnnnnnnnnnnnnnnnnnnnnnnnnnnnnnnnnnnnnnnnnnnnnnnnnnnnnnnnnnnnnnnnnnnnnnnnnnnnnnnnnnnnnnnnnnnnnnnnnnnnnnnnnnnnnnnnnnnnnnnnnnnnnnnnnnnnnnnnnnnnnnnnnnnnnnnnnnnnnnnnnnnnnnnnnnnnnnnnnnnnnnnnnnnnnnnnnnnnnnnnnnnnnnnnnnnnnnnnnnnnnnnnnnnnnnnnnnnnnnnnnnnnnnnnnnnnnnnnnnnnnnnnnnnnnnnnnnnnnnnnnnnnnnnnnnnnnnnnnnnnnnnnnnnnnnnnnnnnnnnnnnnnnnnnnnnnnnnnnnnnnnnnnnnnnnnnnnnnnnnnnnnnnnnnnnnnnnnnnnnnnnnnnnnnnnnnnnnnnnnnnnnnnnnnnnnnnnnnnnnnnnnnnnnnnnnnnnnnnnnnnnnnnnnnnnnnnnnnnnnnncacaaatcgagctcagtcagaggtgcgaaccgacagactataagaacagg

SEQ ID NO: 71713 - DNA, 741 bp, Homo Sapiens
  misc_feature (123)..(147): n is a, c, g, or t
  misc_feature (199)..(213): n is a, c, g, or t
  misc_feature (647)..(664): n is a, c, g, or t
  misc_feature (723)..(723): n is a, c, g, or t
cagttcttctcaaacagtttaatagcaaataaacaaaggaaggtaccacacttgggcagatacaaaatgactttttgtccatgtgtctgtgcaattaaaacagatttaggttccccattgggnnnnnnnnnnnnnnnnnnnnnnnnnggaaggagattcctttgaaacacatactcccttgctccaaacttataacaannnnnnnnnnnnnnnaaattcactacacaaactctgtgattaggtaagaaaagcgacaagggctctccttgcctttttttaaaccattaaagtaaaatccataattttctacagagtacaacacaagttcacacaaaaaagacattttcttttgcaaatcaaaacaggaaagaaaggaaaagctcaaacaagataaaggaaaagcatttctacggctgaatcacgactgagttgattgaatcccgttgttgctgcagaacagactgtgcgtttggtcatagtggcaattttttttctcttcacattgtgaaatcactttacattgttttctagtagaaaaggcaaaaaactgtacaaaacccctattggtacaaacgttgtatttaacactaggggttttgtaccaataaaaaactcacacaggtttgtctccaaaatgtaaagtttcnnnnnnnnnnnnnnnnnnaaattattcacaaaaagcagctggaaatcagaaaggcagctgccgctccagggtctcanatccattaaaaccaccac

SEQ ID NO: 71714 - DNA, 1486 bp, Homo Sapiens
gcacagttccacaagtcttgtcacccacgcgaggggcctcccattaggaacctttccgctgaatccgcggtggtgaacccttgtgccccgacaactgcccttgtcaaaggcaatcttgttctgctgaccctggaaaccgcggaccgtgttttagtagaaagcccaaactgtcccaaccccttagtggtaaaaccaccgcttgtgacccctgaaaaactcacaccagggttgtctccaaatgtaaagctcttttgtttttctgttttaaattaaggtcacaaaaagcagctggaaatcagaaaggcagctgccgctccagggtctcaaatccattaaaaccaccacagaacaattaaaacaatcagagagagaaaaggaaaaggaaacaacgtccaacatttggcatttggttttatccacaggttttcccagagctcctcttggaattgaaagcaaaatatattggcaaacactgcttctcaatacacaggaaggggagcctcagtgcctcctgccaacagaggcggctctgtgcagtcagactgtggggtgcacagcagtctctcaggctggggtttctggcctctttccatccaatcaccccttccaggaaattcagcagcctaccagacactgggcctctgcctggctgccctttcccccaggcagagcggccttgggcataataccaggcaacctgccagccccagagcagaaaccctgctgggatcccttccttcatcaaccttggtgtggaggatgctcaatagcgcttccacctccccctccccagcccctagctacatctctccacccttccctggacagtcctacttcccagctcacccacccaccagcagcttaagtctgggtgggatctatcatcagctcctccccctgtaacctcttccctccacagatccaccctgtgctcctctcctcacctctccccctccactcacattcttactcaagtctccaagaccctgaggctggatggtgccacaagagaggagggtcagtttccctcagggaaccaaaaaactggcttgcttggcacccagggacagtagctgtttggctctccacccaattaaaaaaacaaatccctgccctttcccccaccccactagctaagcaagagcagagctgtgatgaagagccagtgccgggtggctggtgcccagggctgtaaacagtgtgaagactgtagtattgtgcttgtcacctaggaaaagcgccagcaggtgaattgccgcttggtgtgcagatggcctcctacgggtgattgggagcgccctccttcctccaggtgctcactgcccctaatgtgctaaataagcctcttacccacctgctgccaccttctaggctctacctctgcttctcgtgtctctccaggcccccttcccaccctctctgagcaaagcagccagcctcccggaagccccggcctcgtgccgattcaccacccagcctctactta

SEQ ID NO: 71715 - DNA, 523 bp, Homo Sapiens
aggcttcactactttctgtgagcagtaaggactggtatctttctgtgagcaataaggactggataaagactgcatatccttgtgtcgtgtcagcaccaatacaataaggagggttttaatgtgaagcaggcaatcttccagccccttctggtcttggatgaaatagttgcacagagtattgcaccaaaaatacacaatggaggctgaaaagttcaacatattttaagtcaattaatcaaatcgcattgattcttgatgctttcttagaggcctacatgatttcttagattgctctgataaactatcataaggggtccacctcccctcatttagctcccccaaggatttcttttcccccatgtcatacacccagtcctaaatcaacccccaaggctatccttccatcccttctgcagagggaacttttgtcagactctgcaacaaactcctagctctatccagagtgtcctctgctgctaagattggtatctttctcctcaaaagcctggatggtgaatggggg

SEQ ID NO: 71716 - DNA, 851 bp, Homo Sapiens
ctggagcttcctttgctggctttatagctgctgccagtcacaagaccaggtgaagccaggtggaaaggaactgatacccagcatttgtcatgtgtttttaacagtctggctttgtgggggcggccacagtgggggaggccctgcctggtggtggaagccagaggtgcccacaggaggcacacctcatggtgcaggcttggaggatggcaaggtaggcagaggggtctggacacagtgaggtgcagccccctcccaccaggtcagacccaggagatggtgcaggtgcacagagcaggtccctggcccaggcaggaaggcagctgcaccctccctgcagcacaggatgtctggatgtgtactagggcagagaggacaggagcctagggaggctccacttccaaactgtccgtcccacaggggacggggcttgcgtcttgctgcgagcactggagcccctggaaggtctggagaccatgcgtcagcttcgcagcaccctccggaaaggcaccgccagccgtgtcctcaaggaccgcgagctctgcagttggcccctccaagctgtgccagggccctggccatcaacaagagctttgaccagagggacctggcacaggatgaagctgtatggctggagcgtggtcccctggagcccagtgagccggctgtagtggcagcagaccgggtgggcgatcggccatgcaggggagtgggcccggaaacccctccgcttctatgtccggggcagcccctgggtcagtgtggtcgacagagtggctgagcaggacacacaggcctgagcaaagggcctgcccagacaagattttttaattgtttaaaaaccgaataaatgt

SEQ ID NO: 71717 - DNA, 1987 bp, Homo Sapiens
  misc_feature (1050)..(1051): n is a, c, g, or t
  misc_feature (1056)..(1057): n is a, c, g, or t
  misc_feature (1234)..(1244): n is a, c, g, or t
  misc_feature (1434)..(1469): n is a, c, g, or t
  misc_feature (1537)..(1545): n is a, c, g, or t
  misc_feature (1554)..(1562): n is a, c, g, or t
  misc_feature (1670)..(1670): n is a, c, g, or t
  misc_feature (1799)..(1799): n is a, c, g, or t
taggggtgcttccgtggtcggcggctgctgggctccgcgccggggtccgagtcccacgaagccccggcccgagccgccggatgcccgcgcgcagcggggcccagttttgccgacggatggggcaaaagaagcagcgaccagctagagcagggcagccacacagctcgtccgacgcagcccaggcacctgcagagcagccacacagctcgtccgatgcagcccaggcaccttgccccagggagcgctgcttgggaccgcccaccactccgggcccataccgcagcatctatttctcaagcccaaagggccaccttacccgactggggttggagttcttcgaccagccggcagtccccctggcccgggcatttctgggacaggtcctagtccggcgacttcctaatggcacagaactccgaggccgcatcgtggagaccgaggcatacctggggccagaggatgaagccgcccactcaaggggtggccggcagaccccccgcaaccgaggcatgttcatgaagccggggaccctgtacgtgtacatcatttacggcatgtacttctgcatgaacatctccagccagggggacggggcttgcgtcttgctgcgagcactggagcccctggaaggtctggagaccatgcgtcagcttcgcagcaccctccggaaaggcaccgccagccgtgtcctcaaggaccgcgagctctgcagtggcccctccaagctgtgccaggccctggccatcaacaagagctttgaccagagggacctggcacaggatgaagctgtatggctggagcgtggtcccctggagcccagtgagccggctgtagtggcagcagcccgggtgggcgtcggccatgcaggggagtgggcccggaaacccctccgcttctatgtccggggcagcccctgggtcagtgtggtcgacagagtggctgagcaggacacacaggcctgagcaaagggcctgcccagacaagattttttaattgtttaaaaaccgaataaatgttttattttctcgaaaaaaaacactccatctcacnnaccannaaacctgtccgcgccgcccccgccccttcaaaaagcctttctagcaccatttcgtttgggccgcgcggggccccagcaagggaaacgggaaccatgggccataagctcgtttccccaaaagaaaataccctgggccccttgaacctaaatggccttgggaatttccttcccaccacnnnnnnnnnnnccgcccccgcgcggcggaaccacccgcagccgtattccttccgaaacacaaaattctccccgaattgggagaagttctctctcgcaagaggtcgcccctctatacttcgggggaatctcttcctatcccccacccacgagggagggtcttcctcacatacgcgcgcaagcgtctctcctcaaattatttnnnnnnnnnnnnnnnnnnnnnnnnnnnnnnnnnnnnacgcgcgcgcacttggtggtcacacacatctctctaactgtcattcgcgagaataaacaaaggggtcnnnnnnnnnaacaatttnnnnnnnnntatattaaacgcgcctattttctctggtgcgcggcccacacaccttgtgggcgcaaatactcccccttctcttcccccaccaatcccgggagcgccgtcattcaccgncgagacacacccctcataaacacatttgcgcctccactagcggctgtcgtcatctctcaccaccctccctctattgtcctcccctgcctctggtgcggcccgatataaacagaataatctattttcccnccccctctgtgcgcgcggtacatataacacacggcgcggggcggcgcacgcaaaaccaaacacacatttgtgcctcctctcacaatattatcgtgcgcgcgcccaccctctctcttataaaatatcttccacaaccaccggtgtggccgagaaaaacacccccactccccacgccccgcgagcccgcg

SEQ ID NO: 71718 - DNA, 696 bp, Homo Sapiens
  misc_feature (34)..(34): n is a, c, g, or t
ggggtggggcggtgtgacagggtagaggaggtgngagatgagatcttccgcacaggaacacgccagtccccctttctccagggctgccttccccttgcatcctgggagccccactgccctgccatccccagtactgccgggaagtgtcggccgtccttgtcattagtggtcatatgaaaatggccccaagaaggagatgattctttcaagggacacaggcagcttctctccttgtcctctggggaggtgctgacccctcagaaaccccttcccccaacttgaccccaggctgaacagaccactgcatctcactgggccagcagcccccccagcccccagccttggtggggaccaagcagcctttcccgtcccctcctcgacccgtacagttgagagccaggggctggtgtgtgggagctgctacctggcagtttctcgaggggtcaccgagcctctggtgggacacctgggcaggagtgctctcaccacgaggctgcttccgcagggaaccctggcctgcccgcgacttcgcatcagggaccgcatgctgatttgtactgctctctgctgggttttctatgttcttttcgagtgtgggaaaagggttttagtagaagggtgaatcgtattttacacagcggtcttatttatataaatgtcttggtttttacaattaaaatgaccaaaaactgaaaa

SEQ ID NO: 71719 - DNA, 3305 bp, Homo Sapiens
  misc_feature (2279)..(2350): n is a, c, g, or t
  misc_feature (2352)..(2434): n is a, c, g, or t
  misc_feature (3191)..(3234): n is a, c, g, or t
cactgcagcaccagccgtctgcagctccggccgccacttgcgcctctccagcctccgcaggcccaaccgccgccagcaccatggccagcaccatttccgcctacaaggagaagatgaaggagctgtcggtgctgtcgctcatctgctcctgcttctacacacagccgcaccccaataccgtctaccagtacggggacatggaggtgaagcagctggacaagcgggcctcaggccagagcttcgaggtcatcctcaagtccccttctgacctgtccccagagagccctatgctctcctccccacccaagaagaaggacacctccctggaggagctgcaaaagcggctggaggcagccgaggagcggaggaagacgcaggaggcgcaggtgctgaagcagctggcggagcggcgcgagcacgagcgcgaggtgctgcacaaggcgctggaggagaataacaacttcagccgccaggcggaggagaagctcaactacaagatggagctcagcaaggagatccgcgaggcacacctggccgcactgcgcgagcggctgcgcgagaaggagctgcacgcggccgaggtgcgcaggaacaaggagcagcgagaagagatgtcgggctaagggcccgggacgggcggcgcccatcctgcgacggaacacgttcgggtttttggtttggtttcgttcacctctgtctagatgcaacttttggttcctcctcccccaccccagcccccagctttcatgcttctcttccgcactcagccgccctgccctgtcctcgtggtgagtcgctgaccacggcttcccctgcaggagccgccgggcgtgagacgcggtccctcggtgcagacaccaggccgggcgcggctgggtcccccgggggccctgtgagagaggtgccggtgaccgtggtaaacccagggcggtggcgtgggatcgcgggatccttacgctgggctgtctggtcagcacgtgcaggtcagggcaggtcctctgagccggagcccctggccagcaaggcgaggctacagtacctgactgtcttaccagggggaacggggctccccatgagggaggggcgacgcggggaggcgcgtgatggtgcctgggagcctgcgtgtgcagccggtgcttgttgaactggcaggcgggtgggtgggggctgcagctttccttaatgtggttgcacaggggtcctctgagaccacctggcgtgaggtggacaccctgggccttcctggaagcctgcagttgggggcctgccctgagtctgctggggagtgggcattctctgccagggacccatgagcaggctgcatggtctagaggttgtgggcagcatggacagtcccccactcagaagtgcaagagttccaaagagcctctggcccaggcccctccgtgggacagccccgccgccctccccaccagggctttgcagatgtccttgaaagacccacctagagccctttggagtgctggcccctcctgtgccctctgccctggtggaagcggcagacacaagtcctcctcagggagccccaagggggattttgtgggaccgctgcccacagatccaggtgttggaagggcagcgggtaaggttcccaagccagccccaacacccttcccacttggcacccagagggggctgtgggtggaggcctgactccaggcctctcctgcccacaccctctgggctgagttccttctttcccttggacgcccagtgctggccttggaggacggtcagctggaggatggcggtgggggaggctgtctttgtaccactgcagcatcccccacttctccacggaagccccatcccaaagctgctgcctggccccttgctgtaaagtgtgaagggggcggctgagttctcttaggacccagagccagggccctcaacttccatcctgcgggaggccttggccgggcactgccagtgtcttccagagccacacccagggaccacgggaggatcctgacccctgcagggctcaggggtcagcagggacccactgccccatctccctctccccaccaagacagccccagaaggagcagccagctgggatgggaacccaaggctgtccacatctggcttttgtgggactcagaaagggaagcagaactgagggctgggatattcctcatggtggcagcgctcatagcgaaagcctactgtaatatgcacccatctcatccacgtagtaaagtgaacttaaaaattcaatcaaatgaacaattaaataaacacctgtgtgtttaagnnnnnnnnnnnnnnnnnnnnnnnnnnnnnnnnnnnnnnnnnnnnnnnnnnnnnnnnnnnnnnnnnnnnnnnntnnnnnnnnnnnnnnnnnnnnnnnnnnnnnnnnnnnnnnnnnnnnnnnnnnnnnnnnnnnnnnnnnnnnnnnnnnnnnnnnnnntaaatctatagctcctcgcccgacgctactgatagtatatcacacatcattactccctaatcactccattttcaagactataaaacatctataatcatgtgacatacatctaatgacaacacatatattatttaaaaaaaacaatatcaacgctacgacatcacaccaatatagtcgcattctgtaaacaatcaccaaccaccatcatgccgcgcaggccgacggctgcgtggcggagcccacgaagccacgcgggactgggagcgcgtgagggtgagggcgtcgagggtatgacagggagtgtgcccgacgctgcagccgcaaagataacacagagggacggtgagacggggatcagcaccgccacgtaaagcagaggctcaggggtcgaggcggttacgagggacgcgggaggaagtggggctctcgcacgcttatcaccaaacagaataaccaatcaaccatgatcactaatccacacactcacccgccactgtatcgcaaatctccgtacaaccaagcacataaacagaacgataagcccacccatcacactgcgccgacacaaaacaacatacaagactctaccatagacctatgcaccctgctacccagcctaggcgtcacacccccacgacccagcatagaatatcaacaccaccagactctcccactacacagcgaggagaggaacacgtgaagatacgtcatcattgattccaacttcactcgtttccgctgacctacccaaccccannnnnnnnnnnnnnnnnnnnnnnnnnnnnnnnnnnnnnnnnnnnatcagcctctttctgtcgtgatgtgttgttgttgtcatctatctcacatacaccacccacaacacacaacc

SEQ ID NO: 71720 - DNA, 1870 bp, Homo Sapiens
ggcctgggtggcgaattcggcacgagggtggagcgccgttcgccggtatgtgcgcatgcgttgaggtctcttgacgccgattggggggtcacgagtcacgggcggcgtgcggcggttggtgggggcgtgtccggcggagcgggcgcggcgttacgaggtccgctggtttggccagcgctagtcacgtggttcctggccgcaagcgacgcgcgccggtgcgacgtcaacgcagccgggcgagttttaccgatctgtgttccgcggcccggccgcggctgagtcttcccagggtcagggtcaggcgctttgctgagtccctttgtggccgccatggacaattccgggaaggaagcggaggcgatggcgctgttggccgaggcggagcgcaaagtgaagaactcgcagtccttcttctctggcctctttggaggctcatccaaaatagaggaagcatgcgaaatctacgccagagcagcaaacatgttcaaaatggccaaaaactggagtgctgctggaaacgcgttctgccaggctgcacagctgcacctgcagctccagagcaagcacgacgcagccacctgctttgtggacgctggcaacgcattcaagaaagccgacccccaagaggccattaactgtttgatgcgagcaatcgagatctacacagacatgggccgattcacgattgcggccaagcaccacatctccattgctgagatctatgagacagagttggtggacatcgagaaggccattgcccactacgagcagtctgcagactactacaaaggcgaggagtccaacagctcagccaacaagtgtctgctgaaggtggctggttacgctgcgctgctggagcagtatcagaaggccattgacatctacgaacaggtggggaccaatgccatggacagccccctcctcaagtacagcgccaaagactacttcttcaaggcggccctctgccacttctgcatcgacatgctcaacgccaagctggctgtccaaaagtatgaggagctgttcccagctttctctgattcccgggaatgcaagttgatgaaaaaattgctagaggcccacgaggagcagaatgtggacagctacaccgagtcggtgaaggaatacgactccatctcccggctggaccagtggctcaccaccatgctgctgcgcatcaagaagaccatccagggcgatgaggaggacctgcgctaagccccacccagccccccagtgcccgtcttcctgtcccatctgctcagagagaggtggggccgagacttgctggagagcttccctcctttcccatctggggagtcccgcgggccacagtgggcaggtggcaccgggggtcagcatgcaggggcgccagaggcccaggctgctggccggacagtcaccctctgttctcgctacatcccttgccccctgtccatttatttaagcccccataggtgcccttcacccccaaaaccagctgtacagaatctttgatacagacctatttgctaggggtgctgccggggatttggggtcagcatctggccccctatctcctgaccagctgagtcatgaggccggtttctctctctctcccacttttgtcccccagccaagctctaaagcacatgtagccgctgagacctgctgtttctgctgggggcaggctcctcttcccccagccccgggagcctcccccagcttcctgcagccccgacctctcaggttagaccctgggccctggagcttaggggattctccccaccccagccccacacctgctccttccctaatgctttgaggttttcttggttggaagctgcagctggcccaagaaagaaaataaaaaacaacacttttgcctggg

SEQ ID NO: 71721 - DNA, 478 bp, Homo Sapiens
cgaggagcagtgaggggaagtggtggcggtccctgcggggctgtggcagtcaggaagggggctaccgtgttggactcctcgcctttgtaggtagtctgcagacggctcggagtgggcaagggccttctcgatgtccaccaactctgtctcatagatctcagcaatggagatgtggtgcttggccgcaatcgtgaatcggcccatgtctgtgtagatctcgatcgctcgcatcaaacagttaatggcctcgggagagaaagggaggggggaggagacatgagaaagtgaagtcgtatcagcagaagctgaggagaggaggcggacgcaggcgcacctggctgccagcagagagatcaataggcgctcagagctgccagcgctgccacacactctcaaggggctgggaagaaggggacggaatccctgagccccaggaaatctggtgagagggctgactctgcagactgtgacttgctgg

SEQ ID NO: 71722 - DNA, 1736 bp, Homo Sapiens
  misc_feature (1634)..(1672): n is a, c, g, or t
ggaattcccgggatatcaggaaggagtttcgacccgcgctggcgagtcatgagcgccaagtttcccactggcgcgcaaacttgagttacttttgaggcgtggatactggcgaagaggctgcgggcggtattagcgtttgcagcgacttggctcgggcagctgacccaagtgtcctgtcttccttcctctgcttgtctctaggctctgaaactgcggagcggccaccggacgccttctggagcaggtagcagcatgcagccgcctccaagtctgtgcggacgcgccctggttgcgctggttcttgcctgcggcctgtcgcggatctggggagaggagagaggcttcccgcctgacagggccactccgcttttgcaaaccgcagagataatgacgccacccactaagaccttatggcccaagggttccaacgccagtctggcgcggtcgttggcacctgcggaggtgcctaaaggagacaggacggcaggatctccgccacgcaccatctcccctcccccgtgccaaggacccatcgagatcaaggagactttcaaatacatcaacacggttgtgtcctgccttgtgttcgtgctggggatcatcgggaactccacacttctgagaattatctacaagaacaagtgcatgcgaaacggtcccaatatcttgatcgccagcttggctctgggagacctgctgcacatcgtcattgacatccctatcaatgtctacaagctgctggcagaggactggccatttggagctgagatgtgtaagctggtgcctttcatacagaaagcctccgtgggaatcactgtgctgagtctatgtgctctgagtattgacagatatcgagctgttgcttcttggagtagaataaaaggaattggggttccaaaatggacagcagtagaaattgttttgatttgggtggtctctgtggttctggctgtccctgaagccataggttttgatataattacgatggactacaaaggaagttatctgcgaatctgcttgcttcatcccgttcagaagacagctttcatgcagttttacaagacagcaaaagattggtggctattcagtttctatttctgcttgccattggccatcactgcatttttttatacactaatgacctgtgaaatgttgagaaagaaaagtggcatgcagattgctttaaatgatcacctaaagcagagacgggaagtggccaaaaccgtcttttgcctggtccttgtctttgccctctgctggcttccccttcacctcagcaggattctgaagctcactctttataatcagaatgatcccaatagatgtgaacttttgagctttctgttggtattggactatattggtatcaacatggcttcactgaattcctgcattaacccaattgctctgtatttggtgagcaaaagattcaaaaactgctttaagtcatgcttatgctgctggtgccagtcatttgaagaaaaacagtccttggaggaaaagcagtcgtgcttaaagttcaaagctaatgatcacggatatgacaacttccgttccagtaataaatacagctcatcttgaaagaagaactattcactgtatttcattttctttatattggaccgaagtcattnnnnnnnnnnnnnnnnnnnnnnnnnnnnnnnnnnnnnnntatgtatttgcacagcacactattaaaatattaagtgtaattattttaacactcacagctaaaa

SEQ ID NO: 71723 - DNA, 1752 bp, Homo Sapiens
  misc_feature (149)..(167): n is a, c, g, or t
  misc_feature (418)..(445): n is a, c, g, or t
  misc_feature (1174)..(1202): n is a, c, g, or t
tctgttgaagtaaagtaacatcggccttctgttcacttaggcagcatttatagaaacaaaagaagaaagaaacaacctactgtctggagtcataacacaactttcctggattggaaaccaagtgggggaaaaaatacagaaactttaannnnnnnnnnnnnnnnnnnagaagggaaaagccagccctttgtatagaaattttgcttttttttccctcattctactttagaactgcaagcttgtgcactgtggatgcgtgaatattttagtgtgaaacgtgtttttgtcatagtattgaaataaaacttcaacatagtttggttgtggaaggtatagcagatagttcagaaaaaatattcaggaaacaaaaatcactcaaacggaatcgaagccttttaacaaagaaaatgaaatacannnnnnnnnnnnnnnnnnnnnnnnnnnnctaagtaaacagaaatcagtactccgcatgcgctcctctcctaaggtacaaagcagcaagaggttagggtggcaaggctgcctctgggtccattctgtgggccactctccccaacgttctgacacttctgcagtctgatcagtggcgatgctagattataatttcaaactgtgaagaataatggtcttgtcatttgctcaatgtggggttatgttgcattttctcagctcctggggatggaaatggaggatcccagaacacacagccctggcccctttgattctagggcctgcacagatctctggttcaaatgcacaggccctcagaatagaggaacatgaagagagatcttagagcacacagtagaatgtgagagcctgggtgtctgagaccgggagggcccagcagtgaggggcaggctcttctggtcaccaggctgttcagtggactcagttcttcatcttgtaatgtcgatggctttgccacaccaggccaagcccatgccataccttgtcaagactgtcaaagtggttgtggttaggtcaaactggttttggttctgatggttaggaagaaacaggtcagccctcagatcacctggcccgggacagctgaccccctagaaccctggctctgccattagctaggacctaagactctgcccacattttggtctgttctctcccattacacataggtttgtctcagcatgcaagagtttttcctctnnnnnnnnnnnnnnnnnnnnnnnnnnnnngcaatgctttctctaaaatcaaagagggagtcattttattccaagatgttttatcttttatgttaagagatcaaagcttataattttcttttttaatttttgaaggagggatcaactccagtttccaatgtctatgtgtctatgtgtgtatgtgccatacatatgtattcacatgaagaccggcatggccaagttctgctggaggagcactcaagtgtgacgagcagggccactggaccctgcagggctgtggtgtatatagtgcagctttggaggtggaactctattttcacacttttctatggagccttccgagtcccaggttttcacttgaggctgtctgtctggatggcggttttcagacctccattaacatccctacccagcattctgtacttcgggggccttctctcttgttataaaactttttaccaagtgaaacatcgataccacctttgtttccattctcactggtgtaaatactgagtactaactgagaattttgactttgcattctgtcggaatacttgtgttcaataaaaattgaaag

SEQ ID NO: 71724 - DNA, 926 bp, Homo Sapiens
  misc_feature (266)..(284): n is a, c, g, or t
catgctgtagtttcgtgttctttgtttccaggcttcgattccgtttgagtgatttgttggttcctggctattgtgttctgacctatctggctatacgcttccacgttccgactatgttgaagttgtattgtcaatactatgaccgtgacacgtttcacactgcagatattcacgcatcctcagtgcacaagcttgcagttctaaagtagaatgagggaaaaacatagcaatatttctatacaaagggctggcttgttcccttcgtnnnnnnnnnnnnnnnnnnnttaaagtttctgtattttttcccccacttggtttccaatccaggaaagttgtgttatgactccagacagtaggttgtttctttcttcttttgtttctataaatgctgcctaagtgaacagaaggccgatgttactttacttcaacagatttccaaaaaaagacactaattccctgaagcacacatgctcttccgctcaaatctagattctgggctcaaaaggaaatggtatgtatagattttatttggctttctacacaaaggggatgtgtggggtaataatgtgtgttcaccaagaccagccccaactatacaatcttctctgcttcattcaacaaagcctaaggagtccttcaaaagaagggtgagaacgcctgggagcagatcccttttcacagatgcaggcaggtggcggctaatcagaaagtggtctaacccccaaagaaacacaaaaataaccaaaaattcaaaagcaaaaccattccagaatgagatggattttcacctgagtgggacccaggcaaaaactgcagatcagaaaagaggggaagagcagctgtaaacaatcatgttttgtaaagttgtcctgtgctaaagcaagcgtgggatgatcctacctacctctaggtggtatttgttacct

SEQ ID NO: 71725 - DNA, 491 bp, Homo Sapiens
acagcacagacagcgagcgctggaaggccatcaatgcctgagggcagctgccagggcctgtggaggacaggtcagagaggaggccagcaggcccagagtccccaggggaggaggaccaggtcaagggacgttctgtgggcagtagccctgtgtggccctgttcccaccatgagtctggaggccccacctccctggggctcccaatcccctttgccatctctgctctcactggggaccctcctccccttcccacctgctctcatactgctcagtgacatggcccaggctttccttccagggccatgcttggcaaggttggctgagggcaccctccttctctgcacccttggcacgagggcagggctggctctcccaatgcctccatcccatccccatggtgctttggcctcctcaaagcatccaccatggtggatggactgaagtgtgtatattttcttgatctattttttaataaaaaggaaaaggagcaa

SEQ ID NO: 71726 - DNA, 1523 bp, Homo Sapiens
  misc_feature (1198)..(1198): n is a, c, g, or t
  misc_feature (1217)..(1226): n is a, c, g, or t
tatagaaaacataaaggaactttaatatccaaacattcagggtaaagaatactggattaatcacccattaagtgtaaatcacttcaggttctttacagtaccagaaagtaaaatctaaattttgcatattgcagagaatgaaaccattttaaaaactttaatttccttacctgatactaataccagtatgatttttagacggaaaaactaagagtaagatttaaaccaaagatagaggtgttcctgaaatgtgaatttgttcagtagtaaccttttcatcatgagtactgataccactttcttctcagaaagtagtcaatgtacattttaagatttgtgcaataagccaatatgctggataataaaaactgttattactggagatagtcaaaatgaaagaaaactatttaaattatttatgcccaaataatttaccctgcagtccatgagatgcacaggaaataattttttttaataagagaacaatgagggtcctaaagtagaaacataagccagaagaaatctaaaaatagcttcctgatattttattttaaaatatttcatttaagctgcttttggttgcatgccctgatctgtagaagttaacaaggaaataaaatttccaagtatttaaaaaatttactcatcttccataaagcgacttttaatgtatcaacacttaaaaatacacagtgacttaatgaaatatcagcacaactgcatagaattgagctccagagaattatacactcgagctgtctttcctgggctctggtttataagggtattggcttagagaccagcttggagtcatttgcccctacccgggaaatgcaggccaggaaacttaagattttgcgggccttttctgtttctaggtaaaatgcagggagctccctgaaggtcttgaaaaccatcaaccattcaaatatgtatactgggacctttcctcttgagtaaaggaagaaggaggtttgtgatcttcactgaaaacaaagtgaaacttcccacacaagtcttctaagagactctgaaatatactagaaatttcaaaactagaacaatgccatcaaagattaaacctcttaatgcttggagccaccccaaaataataaaatcgggaactccaggaaaacaggtaccaaacgaatcaaaataatgattgcactgaggattctcttatctgaaggctgtttanagaggtaggattttaaggnnnnnnnnnngtttatcttttggcctctgaacatttaaaagatgctttgcccagctggtccttcaggcaaaatttggaggtcacaatgaactccaagcctgacacaaagatattctacagtttcacagctatcatttgtacatattaagttgattcactctttttgagcaaatctacctagaaaacggcaaattaatatattcctttacatacaactttgtgtctcaaaattcttgaaaaacaagagcagatgactttgtattcaaagactaccaaagtatgtatttgattttcacatgcaaacaac

SEQ ID NO: 71727 - DNA, 729 bp, Homo Sapiens
  misc_feature (19)..(19): n is a, c, g, or t
agtcggaagtccaacctantcagacatcagaggacacactcaggatagaaactttatgtgtatagggaatgtggtacagcctttagccaggagtcatacttcatcagacaccagaggacacacacagtgctgtggctttttcagccattgctagataccaaagtggagacattctgtgtgtgattatgcatgagactgtactggtaagacttgtatctccatccacctgaaggagaattgctggctcattttcaggagccctgcccttcctcactgtggatggtgggttgtggaaacccggtcaggtaatgatagtggcaggaggcagtcaaatgcccaggcagataggggtgggtacctggtgaaacccaaccttaaagctgaagacagtcccggctaaatcctcatactgaattgagaacctgtcttcccatttggtgtgctttcctccgattgatcccaacccttcacctattttacgtatacctgccctttcctaattggtttttacactgctgtgcccaccttttgagtggtgcctttgcatacttacaaatcagtcaacgtgtattcccctattctgagcccataaaagacccagactcagctgcagtgaggagagaaatcaccctgctgtgggggttggggaccactccctgcatcccctctcccactgagagctgttcttttgctcaataaaattcttttctacccatcctcaccccttcc

SEQ ID NO: 71728 - DNA, 945 bp, Homo Sapiens
  misc_feature (21)..(21): n is a, c, g, or t
cagcgacagcgagcgccaggncaccgcaggcacactggatgcccagtccgccggcccagccgccctcggaccctggaccgtgcgtcgtgggcaccagaaacgagactcggccaaatcctgcctcaccagcaggtagatgaaactcaagagaaaaggtgtggataaatgaaactagcccatgatgaacctgttttctccgtgaccacaatattaaccaggatgaatggcggtggcagtgggcctgcatcacaggttgcagcagatgttctcaatatttctattaaaatttccttatttccatatgcaagaggagccccagagctgcatccttatggtagctaccatgccgtgatgtaagctgccattcactggggagctttggcaatagaattggctagatcaggaagcctatgtcaactatggaacaacaacttgcagctcatctctattgatgatacactgcctctaggactgggacagatagccactgagtacctgcttcaaatcaccctgcacgttttctctttggaaagataagcactggagaaccatctcgttaccttcagcagaaatggaaacaaatcaagacattaagaatgccgcagtggacagcagttatgcaaggttcagcagaggaagttttcaagatggtgtgcctcactagccagaaatcagaaaagatcgaagctagccttttcatctcagctgctccttaaatcagtgcaacccctccaaattaatgtgaattgaaacttgcattgcttttcaacttaattgaatacttactatatgtgaaccactgcacaaaataggggaagaagatgtgggagacaaagatgtggagcctgtcttcaataaatttacagttagtttcagggtacattgtttttcttctgctgttaattaggtgtatccccaagacaataaatacatgaatggaaaagt

SEQ ID NO: 71729 - DNA, 688 bp, Homo Sapiens
  misc_feature (19)..(19): n is a, c, g, or t
aatgaatatcctctattcntataatattaaaacccataagtaaatataggacatacaagagaaatgagttaaatgactatgtaagggagagtttattaaaatttgatgaaatttactgtaggaactaaactatgccataaaacaatagctttctagttcatttccagtaactgttcccatctcctttaccacttgttaagaaaattaaattcttcagtcacgctgctttaaaatgggacaaaatctattaagttgaaccatatataattgtggatatttggctgtttttaatctgacaagcagtaacttcatatggtttgccttaatatatatttgttttagtcatgaactcataatccattgatgctctttcatgagaagagatatcacccatatttccttattgatattattggtacaggcagacaaccctggtaggagagatggattctggggtcatgacctttcgtgattatccgcaaatgcaaacagtttcagatctaatggtttaatttagggagtaattatattaatcagagtgttctgttattctcaatctttatagaaacgattctgctggttttgaagaacagatgtattacactaactgtaaaagtagttcaagagtgagaaagaataaattgttattaagagcaaaagaaaaataaagtgattgatgataaaaaaa

SEQ ID NO: 71730 - DNA, 1298 bp, Homo Sapiens
  misc_feature (92)..(93): n is a, c, g, or t
  misc_feature (217)..(217): n is a, c, g, or t
  misc_feature (227)..(227): n is a, c, g, or t
  misc_feature (239)..(239): n is a, c, g, or t
  misc_feature (262)..(262): n is a, c, g, or t
  misc_feature (275)..(275): n is a, c, g, or t
  misc_feature (1184)..(1194): n is a, c, g, or t
catagccccagctacactatctcgctgttgtgttgatgtgacgatacattcaacagaacgttgactgatagaattatcgatcattaggattnngcctcgagccagaatcgcacgagcgcgccttcctcacggagttgtcagcagcaggcagcagtgtcctccgtcccacagcactcagtgtgatgaatgattgaaggatggatggtggatgattttntctgtaactntaaaaaaagtcnttgaaaagtaagtttcttatgtngtaacagtgacanccatgagtggaaaaaactaattatggttcagcactgccgtgagacagtatgcgagaaaattcaaaacgactgtagagaccctccggattactggacaatacatggactatggcccgataaaagtgaaggatgtaatagatcgtggcccttcaatttagaagagattaaggatcttttgccagaaatgagggcatactggcctgacgtaattcactcgtttcccaatcgcagccgcttctggaagcatgagtgggaaaagcatgggacctgcgccgcccaggtggatgcgctcaactcccagaagaagtactttggcagaagcctggaactctacagggagctggacctcaacagtgtgcttctaaaattggggataaaaccatccatcaattactaccaagttgcagattttaaagatgcccttgccagagtatatggagtgatacccaaaatccagtgccttccaccaagccaggatgaggaagtacagacaattggtcagatagaactgtgcctcactaagcaagaccagcagctgcaaaactgcaccgagccgggggagcagccgtcccccaagcaggaagtctggctggcaaatggggccgccgagagccggggtctgagagtctgtgaagatggcccagtcttctatcccccacctaaaaagaccaagcattgatgcccaagttttggaaatattctgttttaaaaagcaagagaaattcacaaactgcagctttctaaaaaacaactccaaagtgaagtctgtttattttgctgtttcccctccatgcctgtgaatgggatgtgtggtccctgtagagtgagtgcatgtggcgtacacggggagaacaggagctctcccacgcctgagtggctgtttgtgcttgggataaagctcacagatgnnnnnnnnnnnctctattaaagctcttcagtgccctggtagatcaggcaggcatacttggaatttagacagatggcacgattcaggggactctcttgctcgagttttccccttgg

SEQ ID NO: 71731 - DNA, 813 bp, Homo Sapiens
cagtcgacggtaccggacatatgcccgggaattcggccattacggccgggggagcaacgcgactgaccgtggtcgtgggcggacggcggctgcagcgcggaggagctggggtcgctgtgggtcgcgaagcagagcccgggacgtgcgcgcttggtgcacgatcctgaaggggagctccgaggggcccgggtctccagggctgctgcggccattcccggagcccggcgcggggcccgcgagatactggtttaggccgtcccagggctccgggcgcacccggtggccgctgctgcagcggagggagcgcggcggcgcgggggctcggagacagcgtttctcccggaagtcttcctcgggcagcaggtgggaagtgggagccggagcggcagctggcagcgttctctccgcaggtcggcaccatgcgccctgcagccctgcgcggggccctgctgggctgcctctgcctggcgttgctttgcctgggcggtgcggacaagcgcctgcgtgacaaccatgagtgggaaaaaactaattatggttcagcactggcctgagacagtatgcgagaaaattcaaaacgactgtagagaccctccggattactggacaatacatggactattggcccgataaaagtgaagggattgtaatagatcggtggcccttcaatttagaagagaataaggatctttggccagaaatgagggcatatgggctgacgtaattcatcgttcccaatcggagcgtactggagcttgattgggacaagcttgggactgcgccgccaagtggatgcgctcaatccagaaaatg

SEQ ID NO: 71732 - DNA, 2980 bp, Homo Sapiens
ggcaccccggcttggcgctgtctctccccctcggctcggagaggcccttcggcctgagggagcctcgccgcccgtccccggcacacgcgcagccccggcctctcggcctctgccggagaaacagcaggatggcccaatggaatcagctacagcagcttgacacacggtacctggagcagctccatcagctctacagtgacagcttcccaatggagctgcggcagtttctggccccttggattgagagtcaagattgggcatatgcggccagcaaagaatcacatgccactttggtgtttcataatctcctgggagagattgaccagcagtatagccgcttcctgcaagagtcgaatgttctctatcagcacaatctacgaagaatcaagcagtttcttcagagcaggtatcttgagaagccaatggagattgcccggattgtggcccggtgcctgtgggaagaatcacgccttctacagactgcagccactgcggcccagcaagggggccaggccaaccaacccacagcagccgtggtgacggagaagcagcagatgctggagcagcaccttcaggatgtccggaagagagtgcaggatctagaacagaaaatgaaagtggtagagaatctccaggatgactttgatttcaactataaaaccctcaagagtcaaggagacatgcaagatctgaatggaaacaaccagtcagtgaccaggcagaagatgcagcagctggaacagatgctcactgcgctggaccagatgcggagaagcatcgtgagtgagctggcggggcttttgtcagcgatggagtacgtgcagaaaactctcacggacgaggagctggctgactggaagaggcggcaacagattgcctgcattggaggcccgcccaacatctgcctagatcggctagaaaactggataacgtcattagcagaatctcaacttcagacccgtcaacaaattaagaaactggaggagttgcagcaaaaagtttcctacaaaggggaccccattgtacagcaccggccgatgctggaggagagaatcgtggagctgtttagaaacttaatgaaaagtgcctttgtggtggagcggcagccctgcatgcccatgcatcctgaccggcccctcgtcatcaagaccggcgtccagttcactactaaagtcaggttgctggtcaaattccctgagttgaattatcagcttaaaattaaagtgtgcattgacaaagactctgggggacgttgcagctctcagaggatcccggaaatttaacattctgggcacaaacacaaaagtgatgaacatggaaggaaatccaacaacggcagccctctctgcagaattcaaacacttgaccctgagggagcagagatgtgggaatgggggccgagccaattgtgatgcttccctgattgtgactgaggagctgcacctgatcacctttgagaccgaggtgtatcaccaaggcctcaagattgacctagagacccactccttgccagttgtggtgatctccaacatctgtcagatgccaaatgcctgggcgtccatcctgtggtacaacatgctgaccaacaatcccaagaatgtaaacttttttaccaagcccccaattggaacctgggatcaagtggccgaggtcctgagctggcagttctcctccaccaccaagcgaggactgagcatcgagcagctgactacactggcagagaaactcttgggacctggtgtgaattattcagggtgtcagatcacatgggctaaattttgcaaagaaaacatggctggcaagggcttctccttctgggtctggctggacaatatcattgaccttgtgaaaaagtacatcctggccctttggaacgaagggtacatcatgggctttatcagtaaggagcgggagcgggccatcttgagcactaagcctccaggcaccttcctgctaagattcagtgaaagcagcaaagaaggaggcgtcactttcacttgggtggagaaggacatcagcggtaagacccagatccagtccgtggaaccatacacaaagcagcagctgaacaacatgtcatttgctgaaatcatcatgggctataagatcatggatgctaccaatatcctggtgtctccactggtctatctctatcctgacattcccaaggaggaggcattcggaaagtattgtcggccagagagccaggagcatcctgaagctgacccaggtagcgctgccccatacctgaagaccaagtttatctgtgtgacaccattcattgatgcagtttggaaataatggtgaaggtgctgaaccctcagcaggagggcagtttgagtccctcacctttgacatggagttgacctcggagtgcgctacctcccccatgtgaggagctgagaacggaagctgcagaaagatacgactgaggcgcctacctgcattctgccacccctcacacagccaaaccccagatcatctgaaactactaactttgtggttccagattttttttaatctcctacttctgctatctttgagcaatctgggcacttttaaaaatagagaaatgagtgaatgtgggtgatctgcttttatctaaatgcaaataaggatgtgttctctgagacccatgatcaggggatgtggcggggggtggctagagggagaaaaaggaaatgtcttgtgttgttttgttcccctgccctcctttctcagcagctttttgttattgttgttgttgttcttagacaagtgcctcctggtgcctgcggcatccttctgcctgtttctgtaagcaaatgccacaggccacctatagctacatactcctggcattgcactttttaaccttgctgacatccaaatagaagataggactatctaagccctaggtttctttttaaattaagaaataataacaattaaagggcaaaaaacactgtatcagcatagcctttctgtatttaagaaactt

SEQ ID NO: 71733 - DNA, 701 bp, Homo Sapiens
aagattcagtgaaagcagcaaagaaggaggcgtcactttcacttgggtggagaaggacatcagcggtaagacccagatccagtccgtggaaccatacacaaagcagcagctgaacaacatgtcatttgctgaaatcatcatgggctataagatcatggatgctaccaatatcctggtgtctccactggtctatctctatcctgacattcccaaggaggaggcattcggaaagtattgtcggccagagagccaggagcatcctgaagctgacccaggtagcgctgccccatacctgaagaccaagtttatctgtgtgacaccaacgacctgcagcaataccattgacctgccgatgtccccccgcactttagattcattgatgcagtttggaaataatggtgaaggtgctgaaccctcagcaggagggcagtttgagtccctcacctttgacatggagttgacctcggagtgcgctacctcccccatgtgaggagctgagaacggaagctgcagaaagatacgactgaggcgcctacctgcattctgccacccctcacacagccaaaccccagatcatctgaaactactaactttgtggttccagattttttttaatctcctacttctgctatctttgagcaatctgggcacttttaaaaatagagaaatgagtgaatgtgggtgatctgcttagatctaaa

SEQ ID NO: 71734 - DNA, 614 bp, Homo Sapiens
accctgaggggcagatggagctttccagacaatcttgccatgaggatgagtgagtttcaaatcagtcctgccgaggcagatggcttcctccagctctgcttactgaatgcgaagtcacagtcagtaagaaaactggttttcttcttcccaggcgctgccccatacctgaagaccaagtttatctgtgtgacaccaacgacctgcagcaataccattgacctgccgatgtccccccgcactttagattcattgatgcagtttggaaataatggtgaaggtgctgaaccctcagcaggagggcagtttgagtccctcacctttgacatggagttgacctcggagtgcgctacctcccccatgtgaggagctgaaaacggaagctgcagaaagatacgactgaggcgcctacctgcattctgccacccctcacacagccaaaccccagatcatctgaaactactaactttgtggttccagatttttttaatctcctacttctgctatctttgagcaatctgggcacttttaaaaatagagaaatgagtgaatgtgggtgatctgctctatctacatgcaaataaggatggttctctgccatcatcaggttacgacct

SEQ ID NO: 71735 - DNA, 715 bp, Homo Sapiens
  misc_feature (353)..(361): n is a, c, g, or t
agatgcaagctcctcaaagccagttgtaaaataggtcccctgcctggtacaaagaaaagcaaaaagaatttacgaagattgtgatctcttattaaatcaattgttactgatcatgaatgttagttagaaaatgttaggttttaacttaaaaaaaattgtattgtgattttcaattttatgttgaaatcggtgtagtatcctgaggtttttttccccccagaagataaagaggatagacaacctcttaaaatatttttacaatttaatgagaaaaagtttaaaattctcaatacaaatcaaacaatttaaatattttaagaaaaaaggaaaagtagatagtgatactgagggtnnnnnnnnnttgattcaattttatggtaaaggaaacccatgcaattttacctagacagtcttaaatatgtctggttttccatctgttagcatttcagacattttatgttcctcttactcaattgataccaacagaaatatcaacttctggagtctattaaatgtgttgtcacctttctaaagctttttttcattgtgtgtatttcccaagaaagtatcctttgtaaaaacttgcttgttttccttatttctgaaatctgttttaatatttttgtatacatgtaaatatttctgtattttttatatgtcaaagaatatgtctcttgtatgtacatataaaaataaattttgctcaataaaatcg

SEQ ID NO: 71736 - DNA, 975 bp, Homo Sapiens
  misc_feature (91)..(151): n is a, c, g, or t
  misc_feature (856)..(856): n is a, c, g, or t
gcagttgtcacacagcagttgtaaacgacggcagtaactataacggtcctaaggtagcgaggcctgggtggcgctgagaagcaggtcccannnnnnnnnnnnnnnnnnnnnnnnnnnnnnnnnnnnnnnnnnnnnnnnnnnnnnnnnnnnntggacgtggtgccggaggggaagaaaataaagaaaacgaacgcccttcggccggatcgaaggcaaacaaagaatttggggatagcctgagtttggagattcttcagattattaaggaatcccagcagcagcatggtttacggcatggagattttcagaggtacaggggctactgttcccgtagacaaagacgtcttcgaaaaacactcaacttcaagatgggtaacagacacaaattcacagggaagaaagtgactgaagagcttctgaccgataatagatacttgcttctggttctgatggatgctgaaagagcctggagctacgccatgcagctgaaacaggaagccaacactgaaccccgaaaacggtttcacttgttatctcgcctacgcaaagccgtgaagcatgcagaggaattggaacgcttgtgtgagagcaatcgcgtggatgccaagaccaaattagaggctcaggcttacacagcttacctctcaggaatgctacgttttgaacatcaagaatggaaagctgccattgaggcttttaacaaatgcaaaactatctatgagaagctagccagtgctttcacagaggagcaggctgtgctgtataaccaacgtgtggcaagagatttcacccaacatccgctattgtgcatataatattgggggaccagtcagccatcaatgaactcatgcagatngagattgaggtctgggggcctgaggtctctggtgaaaattggggttgatcatcagatcgagcaaaaggcagtacatgaatgaagggggggagggaaggtcccgaatggacaggcttctt

SEQ ID NO: 71737 - DNA, 2573 bp, Homo Sapiens
aaggagcgaggcctgggtggcgaattcggcacgaggcaaagacgtcttcgaaaaacactcaacttcaagatgggtaacagacacaaattcacagggaagaaagtgactgaagagcttctgaccgataatagatacttgcttctggttctgatggatgctgaaagagcctggagctacgccatgcagctgaaacaggaagccaacactgaaccccgaaaacggtttcacttgttatctcgcctacgcaaagccgtgaagcatgcagaggaattggaacgcttgtgtgagagcaatcgcgtggatgccaagaccaaattagaggctcaggcttacacagcttacctctcaggaatgctacgttttgaacatcaagaatggaaagctgccattgaggcttttaacaaatgcaaaactatctatgagaagctagccagtgctttcacagaggagcaggctgtgctgtataaccaacgtgtggaagagatttcacccaacatccgctattgtgcatataatattggggaccagtcagccatcaatgaactcatgcagatgagattgaggtctgggggcactgagggtctcttggctgaaaaattggaggctttgatcactcagactcgagccaaacaggcagctaccatgagtgaagtggagtggagagggagaacggttccagtgaagattgacaaagtgcgcattttcttattaggactggctgataacgaagcagctattgtccaggctgaaagcgaagaaactaaggagcgcctgtttgaatcaatgctcagcgagtgtcgggacgccatccaggtggttcgggaggagctcaagccagatcagaaacagagagattatatccttgaaggagagccagggaaggtgtctaatcttcaatacttgcatagctacctgacttacatcaagctatcaacggcaatcaagcgtaatgagaacatggccaaaggtctgcagagggctctgctgcagcagcagccagaggatgacagcaagcgctcaccccggccccaggacctgatccgactctatgacatcatcttacagaatctggtggaattgctccagcttcctggtttagaggaagacaaagccttccagaaagagataggcctcaagactctggtgttcaaagcttacaggtgttttttcattgctcagtcctatgtgctggtgaagaagtggagcgaagcccttgtcctgtatgacagagtcctgaaatatgcaaatgaagtaaattctgatgctggcgccttcaagaacagcctaaaggacctgcctgatgtgcaagagctcatcactcaagtgcggtcagagaagtgctccctgcaggccgcagccatccttgatgcaaacgacgctcatcaaacagagacctcctcctcccaagtcaaggacaataagcctctggttgaacggtttgagacattctgcctggacccttcccttgtcaccaagcaagccaaccttgtgcacttcccaccaggcttccagcccattccctgcaagcctttgttctttgacctggccctcaaccatgtggctttcccaccccttgaggacaagttggaacagaagaccaagagtggcctcactggatacatcaagggcatctttggattcaggagctaaccaggctcttcctcgggggcgggggagattctgactcttaatctgtattgtgagaaaatcccagcaagttccatgatattaaatccaggtctgcattggcccggggcaagagtttaacatcttcggccctgcattcctacatcttgtgtctgtacacgttcttaagcagcgtgtcaggagagcaccctgttgtcttctggtaaatgtgtgcagggtcatcctgtctcctgtacctcctgggaagggggccgctgctgtctggtgccctgtgagctgtgattgattgcctttggtcagtaatgcgttcaggagtccacaccaggcacagatggggccttgaaacgctttgtcatgcttcttcagtaccatggatttgaaatgaactcatccttgctgtgagcatccaggagcccttgagaagtttatctatgactatgaaactggcaacgtcaccccagaattacggtcagccttattccccttcacctcccagtgaacgctaagaagtttcagacaagcagagagctctatttttagaagaaatatgttacactcagaaatgatgaaaccaaatcttatattaaaaggcaaagatgacggagactgtgcccatttcttatatgccctccctcatgtccagtccccgttctctcctcgggagcctagttgcgtgaagccggtgaggtcaagtgtaacctgacttaccggcaactaggtgaggctgatgccagatacacatgttagaggcactatttttcaggacttcccaatgtgtaatttttagatgccattatattttaatccccttcgttaccccccgtttttccttagtcatcccttttcacttctattataacatcaataatagaagtcacaaaaacaatgtaagaaagcaaggaataaaagtgatttgagacatgaaa

SEQ ID NO: 71738 - DNA, 2244 bp, Homo Sapiens
  misc_feature (1518)..(1621): n is a, c, g, or t
  misc_feature (1627)..(1629): n is a, c, g, or t
  misc_feature (1795)..(1804): n is a, c, g, or t
  misc_feature (1834)..(1842): n is a, c, g, or t
  misc_feature (2022)..(2022): n is a, c, g, or t
  misc_feature (2056)..(2068): n is a, c, g, or t
ggcacgagggaagaaatgatttcccttggggatggagacatcaggaccatgtgcccccttctgtctatgaaacctggagaatattcttatttcagtcctcggaccatgtcgatgtgggctggcccggatcactggcgctttaggcctcgacgcaaacaagatgctccttcccaatcagaaaacaaaaagaagagtacaaaaaaagattttgaaattgactttgaagatgatattgactttgatgtatattttagaaaaacaaaggctgctactattctgaccaagtccactttggagaaccagaattggagagctaccacccttcctacagatttcaactacaatgttgacactctggtccagcttcacctcaaaccaggcaccaggttacttaagatggcccagggccatagggtagagactgagcattatgaagaaattgaagactatgattacaacaaccctaacgacacctccaacttttgccctggattacaggctgctgacagtgatgatgaagatttggatgacttatttgtgggacctgttgggaactctgacctctcaccttatccttgccatccacctaagacagcacaacagaatggtgacactccagaagcccaaggattagacatcacaacatatggggagtcaaacttggtagctgagcctcagaaggtaaataaaattgaaattcactatgccaagactgccaaaaagatggacatgaagaaactgaagcagagcatgtggagtctgctgacagcgctctccggaaaggaggcagatgcagaggcaaaccacagggaagctggaaaagaagcggccctggcagaagtggctgacgagaagatgcttagcgggctcacgaaggacctgcagaggagcctgccccctgtcatggctcagaacctctccatacctctggcttttgcctgtctcctacatttagccaatgaaaagaatctaaaactggaaggaacagaggacctctctgatgttcttgtgaggcaaggagattgagttcactatggagaagtcagcagcaggaggcccatcccttactcagttgccgggacatccccagtctcgggggaagaagatgccatgggcttatacccaggctgtagccaactaccaacgtgcctgtttgtttgttgctctttccttctctccatcatagtctgggtgccagcgccctgaagctccgtgctcaactgattaaactttactgccctatggtgaccatctaggagaggggagggcagagggggtgagggtactattctggattgagaaaacctatatccattctttatatcaatgtatagttttagtctcctaaattgatctgttattttccaaactattctcttgtagaaaattttccagtgggcacttaatggtgcccttgaagaacttcctaatccatgtacataaaatacatcatatgtacacttataaatgtatatagaatgctcaaaaataaaattcttaataatagaactggcaaannnnnnnnnnnnnnnnnnnnnnnnnnnnnnnnnnnnnnnnnnnnnnnnnnnnnnnnnnnnnnnnnnnnnnnnnnnnnnnnnnnnnnnnnnnnnnnnnnnnnnnnacgggnnngggggacggggccccacaaaaaaactttctgaaccccttcgttgggcgcccgcgcgccccccaaagggaaggagcgcacccgccacataaagtgtctccccctacgagaaacctcccggccaattcacaatgagggggttgaagattccccacccataaaaaaaannnnnnnnnnacgggggcaaacacaaaatggtgttttttnnnnnnnnntcctcctcggaggggcggttgttgtggagggcccaattacttgggggaatgtacttcaaacaggggatccctccccagggggaagtcccgtaaaactcataacataatttccccccgtgccgcccttttgacccccttaataaaaaggagaaaaatggtgtgggcaacaattcactatanaacatactcttgtggcagcaaccagtgcagaggnnnnnnnnnnnnnagatgggggttttagtttgcacaccctctatattaccacccacaggggaggtgttgcccgcaacgccctgtggtcgcgcctgttggggcaaagacacaatatttcgcccaccgcgtgggcgagagacctgggggcacgaaaagaaagtctgcctgctataatgttcaccgccccct

SEQ ID NO: 71739 - DNA, 881 bp, Homo Sapiens
tgaatgtatttaattttatgaattatttatgattaaaccacatccagaatcttcgttttctgtgaaaaggaagaactagaaaattgctttaaatcttgaaaatacaaggaatgttttaaaatataaaacaaagccaagttaaactgtttacactgatgtgctataaaagcaccaaaaagaaactttactgtagagttacaagtacatttatatatatatgttgctgcatcacttgtgtagttaaattgtatttcaaaacagtgaaaaaattgacatgtatatactgttcattcttgtttatattaagtcttgttttaaatatgtattatgtgtatatattgtttgcagacattattgttcatgccttagaggattgtagcattttattttcgtctgaaggtaatgatagctatacagtctgtacagtaattatcctctaccaacactgtggcgtctccttaatcttggtagtgcctgcctttgaaacagggtgtaggggatattagttttccatttttctattttgttatataattttaagccaccagggcctaaattaaagtataatcatttgtatccatgtggaataaaattgtgacaatttcctacgcacacagtattttttcatagaaacatttccctcccatttgccttgcctcagaaataaatttaaaagacgtttgtaaccactgtgttttatctactgtgtgttgtggtggcctgttggaggcaaatagatcagattttttttgtacctacgtaagagtacttgaagttttatttaaaataaaatgttgtggaaaaggtagcattctttttttaggagtgttatttttcactatgtgtggcacggatacaataaaagacttttacaaactaaa

SEQ ID NO: 71740 - DNA, 472 bp, Homo Sapiens
gattccttaactgtgtaataatggtagcatatgttataatgctattctaataatttccagaaaaggccatttgtaacattttcctctctttcaggaaaaatgccagctgtgggacaaggagtgcaggccgcacaacctcggcaggcaccggggggatgtggcgattctacacagaagattcacctgggctcaaagttggccctgttccagtattggttatgagtcttctgttcatcgcttctgtatttatgttgcacatttggggcaagtacactcgttcgtagattcagttacatccatctgtcatctgaagaaggaggaaaaaacccaacatttcttggaccaaaagtatagtgactatctgttcatgagagaaattttctgtaagcttgctgttttacaggggatttatcaataattgattttgaggaatcagtttttttctatggctaataaactttttaattcactt

SEQ ID NO: 71741 - DNA, 1121 bp, Homo Sapiens
  misc_feature (582)..(745): n is a, c, g, or t
gggggggcggggcctgagtcagtctcgccagctgccggtctttcgggggctccgtaactttctatccgtccgcgtcagcgccttgccaccctcatctccaatatgcctggtccgacccccagtggcactaacgtgggatcctcagggcgctctcccagcaaagcagtggccgcccgggcggcgggatccactgtccggcagaggaaaaatgccagctgtgggacaaggagtgcaggccgcacaacctcggcaggcaccggggggatgtggcgattctacacagaagattcacctgggctcaaagttggccctgttccagtattggttatgagtcttctgttcatcgcttctgtatttatgttgcacatttggggcaagtacactcgttcgtagattcagttacatccatctgtcatctgaagaaggaggaaaaaacccaacatttcttggaccaaaagtatagtgactatctgttcatgagagaaattttctgtaagcttgctgttttacaggggatttatcaataattgattttgaggaatcagtttttttctatggctaataaactttttaattcacttnnnnnnnnnnnnnnnnnnnnnnnnnnnnnnnnnnnnnnnnnnnnnnnnnnnnnnnnnnnnnnnnnnnnnnnnnnnnnnnnnnnnnnnnnnnnnnnnnnnnnnnnnnnnnnnnnnnnnnnnnnnnnnnnnnnnnnnnnnnnnnnnnnnnnnnnnnnnnnnnnnnntcgaaacaatttttctcgcgttttcttcctgggggtggcgccccctctctcacccaaaaaaaccccttttacccacctgttttccccgggcggcggcccccccatagacaccacgggcgtgcgccccccctacttcttctcacaaacccacctggtgtacccgcatccccctcgtccttaaagactcccgcccaaggaagaaaccgcccgccggtgttcccgccgatcccttattacgacgcacgctaccaagggaggggcctttgcattacatcaaagcgcgggccgccctatcacacgggctatccacgaaaaggcgtcaccaataaatcttacccactcccgccgccgcgggggtaattgccgcgccgtgagg

SEQ ID NO: 71742 - DNA, 817 bp, Homo Sapiens
gtctttggtggggtgagatgagtgggagacttgggttcgagtcccacccctctcggtccctctatttccttctttgttctacaggagaaatcgccggtgcgcgacctggtgtgggctgggcaagtcccttgaggcccggcccgcgcccgtgccctccctctccctgcgccggggccgcggagctgcagagtccgcagaggggtggaggcaagagaggggggcagtgtgtccaggaccgagcgggtggggcgtctgcagagggtgagagcagcgagtggtctcagggcgcccaggactggtcccgatgccatcacagttcccaactcggtaaagacccggggggcaacaatcccaaaagaaggcactagcactcggggcgcgcctggacatgtgtccaggttccctctcagagcgcttacgtccacggggacgggggagagaagtcgcccaatcacgccacgagcgtaggcctccagggatgcggctcgcgcgtgagcttgagggtataggtgcgcaggcgcgggcagtgcgcgcggaaggcgtccagcaccgagtggctcaccacgcagaaacaatgcacctcgcgcagggccgcgcagcgcgccgccagctcctccagcgcggcgttcagctcggccgaagcggctgcgcgcacctcgagcgcgcacagggttgcggcgtagtggtgtgctgcgaagcgcactgggcctacggtgtcgcctgagaggttgaggcgcagcgcagccacggggacggctggctgcaggacgcgcgtcacgctctcagcgggcagcgcgggctccagctccagctccac

SEQ ID NO: 71743 - DNA, 824 bp, Homo Sapiens
gtcggacctattcctgctagtgcaggcctccaggtgacctcactcggacggaagaatcttcccgaggctgggctgttccctctcctgcccggactgtggcctcgccggggagagcgggcgggggagctcgcgccgaggactggaccatctgtacagaccagcgggagtgcgcgcgcccgcctcgcacagggccggggcctggaccaaaccacatgaactggactgagagggggaagaagcggggaggaagaaatcccgccccaaacgtccgctttccttttctctactttgtaatttattgatcagtttctgttgggagacgggtgtcctttacccgcgggaagggggcggggcttccctcccgggccgcatgcggggagaggctgctccctcccctttttcctgcccagtcgcggggcccaagtcttccttcttcgtccgaaaggaggggaggggggactcgctgctacaagcctcgccccctgtgccactcagctccgccccgccgcgtccggtcgccggtcccccgggtcatctgcgggcgggttcccctctccctcccccgtgtctcgtgtccccggggcctcaccgccccccgtgctgtggccgtgtccgtgccccgggggtagggggcgcagaatggcgcttccccttctcctctggctccggggtttgcatgggagaatcctctttccacgatgccgctgggcgacgtggcgtgggggcagggggacggtgggggagccctcgcccccgactctcggtcggcctccccgccccaggcgtcactcagtgatcacgggtaaagagaactgtttcaaaaa

SEQ ID NO: 71744 - DNA, 1223 bp, Homo Sapiens
  misc_feature (694)..(735): n is a, c, g, or t
  misc_feature (1058)..(1107): n is a, c, g, or t
gcaggtacgaggctgggtttaaattcggcacgagggctgcccttccacgaggcccatgacctcgcccgctgccactgtgagaacagggggtcctaggaagtcagctgctgcacccctcgacggccgctggccgcgagtccccaggagctgagctcctgtgacggccacgacgggctgcggaggcaggactccagccgcaagccccgcgccttcagcaagcagcccagcacgggggactactaccggcagctgggccgctgccccggcgagacgctggccgcacgcccgggcatggcgcacagcgaggaggcaccaagtctttcaacatgatgtccccgacgggcgacaactcggagctactggctgagattaaggcaggcaagagcctgaagccgacgccccagagcaaggggctgaccacagtgttctcaggcatcgggcagccggccttccagcccgattcgccgctgccttctgtgtcacctgcactgtcaccagtccggagccccacaccgccagctgcggggtttcagccgctgctcaatggaagcttggttcccgtgccgcccactactcctgcgccgggagtgcagctggacgtggaggctctcatccccacgcacgatgagcagggccggcccatccccgagtggaagcgccaggtgatggtgcgcaagatgcagctgaagatgcnnnnnnnnnnnnnnnnnnnnnnnnnnnnnnnnnnnnnnnnnncccggctggccagcatgcccgcctggaggcgggacctcctgcggaagaagctggaagaagagagggagcagaagcggaaagaggaggaccgacagaagcaggaggagctgcggcgggagaaggaacagtcagagaagctgcggacgctgggctacgatgagagcaagctggcgccctggcagcgacaggtcatcctgaagaagggggacatcgctaagtactagaggccgcagactcctgtccgcagcctcgcagctccgtggggccctccgccccagccccagccagccaggccctggtggaaaggctgggagccgcacagnnnnnnnnnnnnnnnnnnnnnnnnnnnnnnnnnnnnnnnnnnnnnnnnnngtatccccagcccttggcaacactggagtgcacacgccgccacggttgcccagaaaaagtgcccaagctgctgacgcaaacaacaacaaatgctgcttatttgcatgccgacttac

SEQ ID NO: 71745 - DNA, 2559 bp, Homo Sapiens
  misc_feature (120)..(120): n is a, c, g, or t
  misc_feature (133)..(133): n is a, c, g, or t
  misc_feature (148)..(148): n is a, c, g, or t
  misc_feature (157)..(157): n is a, c, g, or t
  misc_feature (181)..(182): n is a, c, g, or t
  misc_feature (189)..(189): n is a, c, g, or t
  misc_feature (191)..(191): n is a, c, g, or t
  misc_feature (198)..(198): n is a, c, g, or t
  misc_feature (204)..(204): n is a, c, g, or t
  misc_feature (210)..(210): n is a, c, g, or t
  misc_feature (216)..(216): n is a, c, g, or t
  misc_feature (263)..(263): n is a, c, g, or t
  misc_feature (508)..(549): n is a, c, g, or t
  misc_feature (1921)..(2349): n is a, c, g, or t
  misc_feature (2371)..(2371): n is a, c, g, or t
  misc_feature (2391)..(2391): n is a, c, g, or t
  misc_feature (2393)..(2393): n is a, c, g, or t
  misc_feature (2406)..(2406): n is a, c, g, or t
cagcgcgtgggcaccatatgtggtgtcatcatagccccagctacattatgtccgtgtatgtgttggatgtggcgatacattcacacagaacagtatgcatgatcgaattatcgactcatntagggattgcctncgagccagaatcgcnacgagtccncgacggcgacactcggagtactgnntgagatnangcagcanggagcntgagcngacgcnccagagcaagggctgaccacagtgtctcaggcatcgggcagccgccnttccagcccgattcgccgctgccttctgtgtcacctgcactgtcaccagtccggagccccacaccgccagctgcggggtgtcagccgctgctcaatggaagcttggttcccgtgccgcccactactcctgcgccgggagtgcagctggacgtggaggctctcatccccacgcacgatgagcagggccggcccatccccgagtggaagcgccaggtgatggtgcgcaagatgcagctgaagatgcnnnnnnnnnnnnnnnnnnnnnnnnnnnnnnnnnnnnnnnnnncccggctggccagcatgcccgcctggaggcgggacctcctgcggaagaagctggaagaagagagggagcagaagcggaaagaggaggagcgacagaagcaggaggagctgcggcgggagaaggaacagtcagagaagctgcggacgctgggctacgatgagagcaacgctggcgccctggcagcgacaggtcatcctgaagaagggggacatcgctaagtactagaggccgcagactcctgtccgcagcctcgcagctccgtggggccctccgccccagccccagccagccaggccctggtggaaaggctgggagccgcacagccctcccctcctgcgctggaaacccttccctgacccccaccctggccccccgtatccccagcccttggcaacactggagtgcacacgccgccacggttgcccagaaaaagtgcccaagctgctgacgcaaacaacaacaaatgctgcttatttgcatgccgacttacatatatttgcatgttcgttgactatcaaagagtgcagagctctccccagccccgtgggtggtgactttgttttcctgcggggctcagccccctccaggatgcagccccctcccccgcaccccggaaccggcgtcgctggcgcatcctgggtggaggcaggccccgagctcggggaaggggttttcccttcctctctgacccagatctgcgcgcggcctagcccgggcctcatttcttatccccgccaagggtttcctctcagtcatttgtttaccagaaacatgaaaactgcctgtctggccgggccgcacttgtggcccccgggaccccacctctggccccacctccctcaagtctgcgccccgtccccagccagacccactcgctgccgggaccctttcactgccccggtggagtgaatagaggatgaggggccctgaccctgtgtctccaactgctgcaccccatcccgaccctgtctccgccacctcgcagccccattaaagcgctctcatctgggctccggttcactcactcgctgtggccgcgacttgctctctccttctcgggatttaataccgcgatctcagccaaactccggccgagaagttgagaaatgtcttcaccccctctcgacattcgttcgtgcttcttcgccttggctggagcgataggggcgagcaggggtggggccggctggtgctgctacgcagggccgtgccagcggcttaataagtgacataaaatgtctacacgcataagtaaccgtacttagggcttctgcaagggccaccagagcgcctaggtggcaagtgggcgccgtgtcacgggccgcgctgcaggcggctgcgcaagtcttccacgcctcgtgccgaattcttnnnnnnnnnnnnnnnnnnnnnnnnnnnnnnnnnnnnnnnnnnnnnnnnnnnnnnnnnnnnnnnnnnnnnnnnnnnnnnnnnnnnnnnnnnnnnnnnnnnnnnnnnnnnnnnnnnnnnnnnnnnnnnnnnnnnnnnnnnnnnnnnnnnnnnnnnnnnnnnnnnnnnnnnnnnnnnnnnnnnnnnnnnnnnnnnnnnnnnnnnnnnnnnnnnnnnnnnnnnnnnnnnnnnnnnnnnnnnnnnnnnnnnnnnnnnnnnnnnnnnnnnnnnnnnnnnnnnnnnnnnnnnnnnnnnnnnnnnnnnnnnnnnnnnnnnnnnnnnnnnnnnnnnnnnnnnnnnnnnnnnnnnnnnnnnnnnnnnnnnnnnnnnnnnnnnnnnnnnnnnnnnnnnnnnnnnnnnnnnnnnnnnnnnnnnnnnnnnnnnnnnnnnnnnggcgcgtgctgggttttcatangtccgcccctgacagcacananatcgagtcaatcnaggggcgaaccgacagacataagaacagcgttccctggagtcctctggctctgtcgactgcgtacgaactgcgctctctcggacgtggtccaatcacgagaccatcggagctcgcactgtgtgacaccgtacgcggctacgaacgtgtcacgg

SEQ ID NO: 71746 - DNA, 928 bp, Homo Sapiens
  misc_feature (275)..(275): n is a, c, g, or t
agtgttctgggtccaggtgctcctggctggccttgtggtccccctcctgcttggggccaccctgacctacacataccgccactgctggcctcacaagcccctggttactgatgaagctgggatggaggctctgaccccaccaccggccacccatctgtcacccttggacagcgcccacacccttctagcacctcctgacagcagtgagaagatctgcaccgtccagttggtgggtaacagctggacccctggctaccccgagacccagaaggcgnctctgcccgcaggtgacatggtcctggcaccagtgccccagcagagctcttggccccgctgctgcgcccacactctcgccagagtccccagccggctcgccagccatgatgctgcagccgggcccgcagctctacgacgtgatggacgcggtcccagcgcggcgctggaaggagttcgtgcgcacgctggggctgcgcgaggcagagatcgaagccgtggagctggagatcgcccgcttccgagaccagcagtacgagatgctcaagcgctggcgccagcagcagcccgcgggcctcggagccgtttacgcggccctggagcgcatggggctggacggctgcgtggaagacttgcgcagccgcctgcagcgcggcccgtgacacggcgcccacttgccacctaggcgctctggtggcccttgcagaagccctaagtacggttacttatgcgtgtagacattttatgtcacttattaagccgctggcacggccctgcgtagcagcaccagccggccccacccctgctcgcccctatcgctccagccaaggcgaagaagcacgaacgaatgtcgagagggggtgaagacatttctcaacttctcggccggagtttggctgagatcgcggtattaaatctgtgaaagaaaacaaaa

SEQ ID NO: 71747 - DNA, 1476 bp, Homo Sapiens
  misc_feature (61)..(61): n is a, c, g, or t
  misc_feature (81)..(81): n is a, c, g, or t
  misc_feature (94)..(94): n is a, c, g, or t
  misc_feature (117)..(117): n is a, c, g, or t
  misc_feature (140)..(141): n is a, c, g, or t
  misc_feature (148)..(149): n is a, c, g, or t
  misc_feature (154)..(154): n is a, c, g, or t
  misc_feature (156)..(156): n is a, c, g, or t
  misc_feature (164)..(164): n is a, c, g, or t
  misc_feature (166)..(166): n is a, c, g, or t
  misc_feature (182)..(183): n is a, c, g, or t
  misc_feature (192)..(567): n is a, c, g, or t
  misc_feature (1011)..(1022): n is a, c, g, or t
  misc_feature (1064)..(1084): n is a, c, g, or t
  misc_feature (1137)..(1154): n is a, c, g, or t
  misc_feature (1186)..(1201): n is a, c, g, or t
  misc_feature (1315)..(1346): n is a, c, g, or t
caagagagcgcagttcgtacgcagtcgacaggaccagaggactccagggaacgctgttctntatctgtcggtcgccacctngattgactcgatntgtgtgctgtcaggggcggagcntatgaaaagccagcacgcgcctnntacgtcnntgccntntgctgccntntgctcacatgtcttcnntgcgtatcnnnnnnnnnnnnnnnnnnnnnnnnnnnnnnnnnnnnnnnnnnnnnnnnnnnnnnnnnnnnnnnnnnnnnnnnnnnnnnnnnnnnnnnnnnnnnnnnnnnnnnnnnnnnnnnnnnnnnnnnnnnnnnnnnnnnnnnnnnnnnnnnnnnnnnnnnnnnnnnnnnnnnnnnnnnnnnnnnnnnnnnnnnnnnnnnnnnnnnnnnnnnnnnnnnnnnnnnnnnnnnnnnnnnnnnnnnnnnnnnnnnnnnnnnnnnnnnnnnnnnnnnnnnnnnnnnnnnnnnnnnnnnnnnnnnnnnnnnnnnnnnnnnnnnnnnnnnnnnnnnnnnnnnnnnnnnnnnnnnnnnnnnnnnnnnnnnnnnnnnnnnnnnnnnnnnnnnnaagaattcggcacgagggctgcccaggagacagaccacttgccacgctgttgtaaaaacccaagtccctgtcatttgaacctggatccagcactggtgaactgagctgggcaggaagggagaacttgaaacagattcaggccagcccagccaggccaacagcacctccccgctgggaagagaagagggcccagcccagagccacctggatctatccctgcggcctccacacctgaacttgcctaactaactggcaggggagacaggagcctagcggagcccagcctgggagcccagagggtggcaagaacagtgggcgttgggagcctagctcctgccacatggagccccctctgccggtcgggcagccagcagagggggagtagccaagctgcttgtcctgggcctgcccctgtgtattcaccaccaataaatcagaccatgnnnnnnnnnnnncacaccccaaaaaccccaccgccgggggcggcaccgaagggnnnnnnnnnnnnnnnnnnnnncgaggcgcccgggaacaaaaactgcataagaaagaagggtgctcgggggcggnnnnnnnnnnnnnnnnnngaaaaaacttttctcaaaaccaatttccgttnnnnnnnnnnnnnnnncccccctgggaggtgaaagggggaaaccggggggccctaagaggcgggttctccacagaggagaaaaaccccgggggcagaagggacacaaaagggggctttggggggcctctnnnnnnnnnnnnnnnnnnnnnnnnnnnnnnnngggcgggggaaacacccgagaggcttttgtggaacaaacaaccccccagaaggggaggttctcgtggggggcccattttgcgggggacccaacacccacgggggagggcccaagaggggggcctccaaat

SEQ ID NO: 71748 - DNA, 1397 bp, Homo Sapiens
  misc_feature (1082)..(1082): n is a, c, g, or t
  misc_feature (1162)..(1162): n is a, c, g, or t
  misc_feature (1275)..(1275): n is a, c, g, or t
  misc_feature (1362)..(1362): n is a, c, g, or t
ctaggggggagagagtatgaagtcgacggcgcgccgaattcggcacgagggctccctgctgccggtcataccacagccttcatctgcgccctggggccaggactgctgctgtcactgccatccattggagcccagcaccccctccccgcccatccttcggacagcaactccagcccagccccgcgtccctgtgtccacttctcctgacccctcggccgccaccccagaaggctggagcagggacgccgtcgctccggccgcctgctcccctcgggtccccgtgcgagcccacgccggccccggtgcccgcccgcagccctgccactggacacaggataaggcccagcgcacaggcccccacgtggacagcatggaccgcggcacgctccctctggctgttgccctgctgctggccagctgcagcctcagccccacaagtcttgcagaaacagtccattgtgaccttcagcctgtgggccccgagaggggcgaggtgacatataccactagccaggtctcgaagggctgcgtggctcaggcccccaatgccatccttgaagtccatgtcctcttcctggagttcccaacgggcccgtcacagctggagctgactctccaggcatccaagcaaaatggcacctggccccgagaggtgcttctggtcctcagtgtaaacagcagtgtcttcctgcatctccaggccctgggaatcccactgcacttggcctacaattccagcctggtcaccttccaagagcccccgggggtcaacaccacagagctgccatccttccccaagacccagatccttgagtgggcagctgagaagggccccatcacctctgctgctgagcggaatgacccccagagcatcctcctccgaactgggccaagcccaggggtcactgtccttctgcatgctggaagacagccaggacatgggccgcacgctcgagtggcggccgcgtactccagccttggtccggggctgccacttggaaggcgtggccggccacaaggaggcgcacatcctgagggtcctgccgggccactcggccgggccccggacggtgacggtgaangtggactgagctgcgcaccggggatctcgatgccgtctcatcctgcaggggtcccctacgtgtcctgctcatcgacgccnaccacacatgcagatctggacactggagatactctttcagatctttcaggagaaacattcgtgcttcagcttcaaacacactcaaggctctggggggagcccgatgccatgcnacatgtggcatcttctgaactccgtggccacttgtcacttatgctccgctgcggggagtgtaaatccccgccctatcaacattcccnagactttgaccggatgttttctttctaaaaagtgc

SEQ ID NO: 71749 - DNA, 3237 bp, Homo Sapiens
ggggagagagtatgaagtcgacggcgcgccgaattcggcacgaggagcaactccagcccagccccgcgtccctgtgtccacttctcctgacccctcggccgccaccccagaaggctggagcagggacgccgtcgctccggccgcctgctcccctcgggtccccgtgcgagcccacgccggccccggtgcccgcccgcagccctgccactggacacaggataaggcccagcgcacaggcccccacgtggacagcatggaccgcggcacgctccctctggctgttgccctgctgctggccagctgcagcctcagccccacaagtcttgcagaaacagtccattgtgaccttcagcctgtgggccccgagaggggcgaggtgacatataccactagccaggtctcgaagggctgcgtggctcaggcccccaatgccatccttgaagtccatgtcctcttcctggagttcccaacgggcccgtcacagctggagctgactctccaggcatccaagcaaaatggcacctggccccgagaggtgcttctggtcctcagtgtaaacagcagtgtcttcctgcatctccaggccctgggaatcccactgcacttggcctacaattccagcctggtcaccttccaagagcccccgggggtcaacaccacagagctgccatccttccccaagacccagatccttgagtgggcagctgagaggggccccatcacctctgctgctgagctgaatgacccccagagcatcctcctccgactgggccaagcccaggggtcactgtccttctgcatgctggaagccagccaggacatgggccgcacgctcgagtggcggccgcgtactccagccttggtccggggctgccacttggaaggcgtggccggccacaaggaggcgcacatcctgagggtcctgccgggccactcggccgggccccggacggtgacggtgaaggtggaactgagctgcgcacccggggatctcgatgccgtcctcatcctgcagggtcccccctacgtgtcctggctcatcgacgccaaccacaacatgcagatctggaccactggagaatactccttcaagatctttccagagaaaaacattcgtggcttcaagctcccagacacacctcaaggcctcctgggggaggcccggatgctcaatgccagcattgtggcatccttcgtggagctaccgctggccagcattgtctcacttcatgcctccagctgcggtggtaggctgcagacctcacccgcaccgatccagaccactcctcccaaggacacttgtagcccggagctgctcatgtccttgatccagacaaagtgtgccgacgacgccatgaccctggtactaaagaaagagcttgttgcgcatttgaagtgcaccatcacgggcctgaccttctgggaccccagctgtgaggcagaggacaggggtgacaagtttgtcttgcgcagtgcttactccagctgtggcatgcaggtgtcagcaagtatgatcagcaatgaggcggtggtcaatatcctgtcgagctcatcaccacagcggaaaaaggtgcactgcctcaacatggacagcctctctttccagctgggcctctacctcagcccacacttcctccaggcctccaacaccatcgagccggggcagcagagctttgtgcaggtcagagtgtccccatccgtctccgagttcctgctccagttagacagctgccacctggacttggggcctgagggaggcaccgtggaactcatccagggccgggcggccaagggcaactgtgtgagcctgctgtccccaagccccgagggtgacccgcgcttcagcttcctcctccacttctacacagtacccatacccaaaaccggcaccctcagctgcacggtagccctgcgtcccaagaccgggtctcaagaccaggaagtccataggactgtcttcatgcgcttgaacatcatcagccctgacctgtctggttgcacaagcaaaggcctcgtcctgcccgccgtgctgggcatcacctttggtgccttcctcatcggggccctgctcactgctgcactctggtacatctactcgcacacgcgttcccccagcaagcgggagcccgtggtggcggtggctgccccggcctcctcggagagcagcagcaccaaccacagcatcgggagcacccagagcaccccctgctccaccagcagcatggcatagccccggccccccgcgctcgcccagcaggagagactgagcagccgccagctgggagcactggtgtgaactcaccctgggagccagtcctccactcgacccagaatggagcctgctctccgcgcctacccttcccgcctccctctcagaggcctgctgccagtgcagccactggcttggaacaccttggggtccctccaccccacagaaccttcaacccagtgggtctgggatatggctgcccaggagacagaccacttgccacgctgttgtaaaaacccaagtccctgtcatttgaacctggatccagcactggtgaactgagctgggcaggaagggagaacttgaaacagattcaggccagcccagccaggccaacagcacctccccgctgggaagagaagagggcccagcccagagccacctggatctatccctgcggcctccacacctgaacttgcctaactaactggcaggggagacaggagcctagcggagcccagcctgggagcccagagggtggcaagaacagtgggcgttgggagcctagctcctgccacatggagccccctctgccggtcgggcagccagcagagggggagtagccaagctgcttgtcctgggcctgcccctgtgtattcaccaccaataaatcagaccatgaaacccgaatagaaaatattccgataataataaaaaattggccttatcgcggccgctcgctaccttaggaccgtaaaagtaaggcccctttagtgaggggtaattaaaatgaaaaaggaaaagttgaataatcacatttccatgtcgccatattcccttttagcggatattgccctcttgttatgctcaccgaaacccggtaacgtatagagctgaaatcctgggtcacagaggttcacaacagaccacaacgaaaacttggattcgcccaaaagttacagagacacttaatccgaaggtaaaaccctaaccgtaaaactacccactcctaaatcaaacataactaa

SEQ ID NO: 71750 - DNA, 586 bp, Homo Sapiens
gcccccctcagagtgcacaatacgagtttgttcctgcctccactctcccaccccgttctggcctccctgtctcaagatactgagcctctcacctcccagccctcagccacccccatccctgccccttttgagactcacagcacccctttccttcctctcctcccacctcctccctcagcccctcattctccttgggaatctgcagagggctctgggactcactgccggatgtgaaatccaggcgtcagctgtttcctaggcaagggcaggaaagtggtctccagcccttgctccactcatgcctgggggcctggggctgagtggtatccctacctggcctccccctggcctctgggcctccagcgctgggtttgtcgagtgagagagagagaggagcttgggttgcttccctgtccccgccccctctgtggcattgtccctcccactcttatttttctaccaattgctatttttccgaacaatccttgtagagtatgtaccatccaaaggcaggagggcctcgccgtggccggctctggttggagatggtacagttttattgtacaggtgctaaaacaacaacaac

SEQ ID NO: 71751 - DNA, 1298 bp, Homo Sapiens
  misc_feature (169)..(169): n is a, c, g, or t
  misc_feature (262)..(262): n is a, c, g, or t
  misc_feature (642)..(748): n is a, c, g, or t
gtgaagcacctgcgggtgcacacgggtgagaagccctacctctgcccagagtgcggcaaaggtttcgcggacagctccgcccgagtcaaacacctccgcacccacagtggcgagaggccccatgcctgcccggaatgcgaccgtaccttcagcctcagctccacccttnttcgccaccgcctcactcacatggagccccaggacttcagcttcccaggctatcccctacccgctctgatccccagcccacccccacctcctntgggcaccagccccccgctgacacctcgaagtccctcacactcgggagggtggaggcccaggagaccaaagggaggggctctgccgcttagcagagaagaaaggccctgggaggtggtgggagggagaaggaagggaagaaaggggaggaagaatagatagaaatagggattggagacagtaaccttgaagctcaggaaactgtcctggctgggctgagtcaggaccttgccaggacgggctgtacccctggcttctagaagactgcctagcacacagtaggcattcaatacttgttgaataaataaactggctttcacctaaggactcaaccctaaattcctgctgcctcatctgttaagaactgacactttccccttnnnnnnnnnnnnnnnnnnnnnnnnnnnnnnnnnnnnnnnnnnnnnnnnnnnnnnnnnnnnnnnnnnnnnnnnnnnnnnnnnnnnnnnnnnnnnnnnnnnnnnnnnnnatgcctcccaaccttgctctgggagaccaatgcctgaaccagggtttgtttaccttctgagctgcagagatggggcttctggaatttaaggtaacaggatgaggcaggggtatcttgatcatccggatggggcaaatactgctgtgtggcatggtggtacccacccctatggaggggcactcttggacagagcccagacctttgtgccctggagggagccaacccaccctgacacggagacactggcagaatagaccagagacagaaggtgctctcatggtatccagcctggatgccaagcccaagtcctggtggatagcagaggccagctgtttgggaaaagggcaggatgctctgaggcctggcagccacatttccatgtgtctttttaccaataaacggcttctcttctgaggcttggacagtgtgtgtgtacacacaggcatgaaaaaggtggagaggggtctctgcgcgcaaaactcagactgtaaattttgtgtggttcccttgctctctgagcccattaaataaagaggttgtcttggcctaa

SEQ ID NO: 71752 - DNA, 885 bp, Homo Sapiens
  misc_feature (286)..(297): n is a, c, g, or t
ggccgcggctgtaggccattattttgattttttgaatgagatatataatcaaagtactgctgaactgtgagtgcagtattctaaacatttcagctaggaacaccactgatttagaaacaaaactgtttgtctctggtttctgaatttaaaatgttgggattacctgtttaaatctgtcttgggggatgtagagattaagtctgtacatgtgcgtgcacatatattcatgcaccctctgattttggttttcttgtttctgagttcttagaaagtacccacatactcnnnnnnnnnnnnggtagaagtagctgtcatagagtgaagaaaaggataagactttaaacagttgattctttttgtgttttctacaaactattttttgaaatttaaatcacaaactcattttctggtttttagaaagtagatgatgatttcagaggagtaaggcatgccaagcagcatgctcagtggggttttaggctgtcacatgcagctgagaaaaggtatgttcaagtcataagtaggtaattgatagggtatgaactagtcaaaatatgaaccattatgattcaagttagattttcctctggagagacagatctgaatgttcagttctagccaaggtagattttactttcaactttttaatcagtatcactttctgtgcttaactatttggtgttaccttgtctgttttcatttgtctaaaattctgcagagatgactaaaatttgacataatggtgtaaatggattgttaaggtaactttcagttgaagattaaagcaagatgccattttccccatgactttggttttgtttacatttttccctttcagttagtatacactacacgtactgtaataaaatacaataaaaaaacaaa

SEQ ID NO: 71753 - DNA, 612 bp, Homo Sapiens
cttaaaaattgacacagagtttactaatagaggagtagagattgttgaccatttttaaaaaacgatagccactctttttcttttatgtttaaaactgaagttttgccaaatgggaaaattactgttacctctaccatcttaatgtagtaactttagaatttaaatttttatattactattttcctttttgttgttcacatagtcttaaggcacctatacttttaaattgactttttcatttgatattatctatatgtatgtagttgtgataatgattattttaattatattactttatactcttaatttatttagagtatttctctattgctgaatacttaagtagttttaaattttattatgataaattcctgggagggggattatttagtgaaataatatgaagaactttatgacttatgtttgccttattgcattcccaaagagttgtaacattttacagtgttaccatttgagtaggggttttatatgttgttgctaatttagtaaacataggagagaaatcaaagtttttctgatttgcttttatgtgatttatctgtatactttgttcatttatataaataaatgtcttaatggtttctatacaaa

SEQ ID NO: 71754 - DNA, 975 bp, Homo Sapiens
ataaagctgtctacaagtcattgtgctttttatcatcactatgcccagacaatgtgaaacatcagagatgaatgctcttcccacagaggtggactgatccttctccccactcccttggtgtgtctctgaatgcaatgttgtcttggaaaacagctttccaagcatttcactcctgagcacttgccagtttcctcacttgttcttcacatatccaggcaaagacatcctgtttgctatatgaagcattgtatcccgtataaaaggaaggaaagagagaaatatatttttacactcatcactcctcaggggctgtacaatcatgtagaaattgtttaatgtgcctgtcaaatagccaaagagtgttaaaccctgagttcccacccatgtgtgtggtatggttaggattcatccagatacacagagagaggcacaacaggaggagaaaggataggggtgtggggacagcgggcccccaatatggtgtaatcgtggcaggtctctgcctgaagtgctatgtggggtttttcttgttttaattttgactttaacccctgatttgtaagtttttcataaaataaacagaatcataactcatgtagatggctataagtgccgtagtgttctgtgggtctctggtgtctgccagtgataagtgtggcaccccaggaaggctgtggaccccatcaaggtgctatgtgagggccatgcttggggtggtggtgggcccagtagaccctgcagccatccatccagcctgcccactcacactgcccttgtgtactcctgctttgctacgttatcattgatcaatgtccctggttacctatgtgtttgaattatcttcgtgttacaggtgtttaatgattttgctccttctagcttatttgtatttcacctgtttttctttaaatcaacatggttacactctgtttcagcaactgtataaattaaacacaaattattactactgctaaa

SEQ ID NO: 71755 - DNA, 1002 bp, Homo Sapiens
  misc_feature (847)..(847): n is a, c, g, or t
  misc_feature (886)..(887): n is a, c, g, or t
  misc_feature (970)..(970): n is a, c, g, or t
gacatctgatatgagcatatattattagtctattcaagcacagttttgaagttagcaaacatctaaatcctcacatctctacaaggtaggtcaaagtatgattcttctcagttgtacaagataaatggctgtataacatgtctagtcatagttaagacaacaattggggacagtgctttggtctgattgccatgccagcatcatattttatctgtgaagggtggcttggttgtggaaaactataaaaactggatgcaaaagtaaaatgcaaccttgtttggtgacgtccagttcctctggaattaggaaaaaccacttgtgtttaagaacaggagtcaaatcaatttttaaggaaacagattctaatacaaaaaccttttctgttgggtctagtaggtctggacaaaacatctccctcttttccttttatattttcctcatcctcttcttgcagcgctggttgaaaacaggggaggaccccatgaggctgtcagtggagtgggaaccatagctgctatctgagtcatcagggctctgaggaatcccagcttcactcatgcctgacataggctcctcgaagacatcactgcccagcacaccatgcccagagacattgccttcttcactttcttgaggctccattttcacatgggccagattccaaagaggagaagcatttactctgcacttgaagcctgtggtgaagcttcaacctccaggttagatgggaagcgttcgctctgagccccaagcactcccataggcagtgactggtctcaagagcaggtcagctccagctctcactgacaggaaagtgatgtcctacaagttctccctgatctcacangttagcgtctctgtggcttctcaagatgacatctttcannatctcagagagttgctactatctgtagaagtactgtgatatccttatggctcgtgccgatcttggctccaggcaatccctaangagtcgataatcgtataagtcaaacgttctgg

SEQ ID NO: 71756 - DNA, 687 bp, Homo Sapiens
tttcatcactctggcagttgtcagctaaatagccctaaatctgcatagtgaaggaaacaactcttagtgaaaaatcagatagcaaaatttacatctcaaggtactgaaagaaaaagtctggtagagctggagagagattaaagatggatgtcaagcacaaaattatacaaatctaccataggactgtaagaggagaccagttttatttagatagggactacttgtcttttaactggatctgagctctgggcagagcccacattgaatcctgggtctccaaaaaaggagaattattatgaggctagaccatgtgatgcttttacagtgcactttaaaaaagggttttttaaacaaagacttttctgagtgtctaaactacactctccctaaaaacccgagagtagcctctgttgcaataattattttagtcaataaatcagataacaaaatacaaaagcaaatagtttaagagttgagatgaactggtctgtttatgctcttgggattccataaggaaaaaccggtttctcccccaaagggagtctggcactttctctgttttctttaaggctgttataaactattttaggttcctcattcagcagagggtgcaagagaaagaagagacagaagaagtaaatgaagaaaacagaattcagtcaactgagaagaaaaaaacttttgctc

SEQ ID NO: 71757 - DNA, 1804 bp, Homo Sapiens
  misc_feature (1520)..(1529): n is a, c, g, or t
  misc_feature (1631)..(1652): n is a, c, g, or t
aagcatagtgacatatagaacacgtgcgttaaaaaagcaggctggatacggtccggatttcccgggatatcgtcgacccacgcgtccgcccacgcgctcgcatggatcgcgtgggctccgagatcgagcgcatgggcctggtcatggaccgcatgggctccgtggagcgcatgggctccggcattgagcgcatgggcccgctgggcctcgaccacatggcctccagcattgagcgcatgggccagaccatggagcgcattggctctggcgtggagcgcatgggtgccggcatgggcttcggccttgagcgcatggccgctcccatcgaccgtgtgggccagaccattgagcgcatgggctctggcgtggagcgcatgggccctgccatcgagcgcatgggcctgagcatggagcgcatggtgcccgcaggtatgggagctggcctggagcgcatgggccccgtgatggatcgcatggccaccggcctggagcgcatgggcgccaacaatctggagcggatgggcctggagcgcatgggcgccaacagcctcgagcgcatgggcctggagcgcatgggtgccaacagcctcgagcgcatgggccccgccatgggcccggccctgggcgctggcattgagcgcatgggcctggccatgggtggcggtggcggtgccagctttgaccgtgccatcgagatggagcgtggcaacttcggaggaagcttcgcaggttcctttggtggagctggaggccatgctcctggggtggccaggaaggcctgccagatatttgtgagaaatctgccattcgatttcacatggaagatgctaaaggacaaattcaacgagtgcggccacgtgctgtacgccgacatcaagatggagaatgggaagtccaaggggtgtggtgtggttaagttcgagtcgccagaggtggccgagagagcctgccggatgatgaatggcatgaagctgagtggccgagagattgacgttcgaattgatagaaacgcttaagcagttgccttttttaaacatcgatacgagacctctgaatttgtattttttcttgttaaccattttaatttgttggctggatgtataaagatgtttaaaaaattcagttgctttttggggtaatttgaattacttttttaatgactggggttccatttgactgtttgcattgagattgcaatgtgcgcaattttttttgtagttgtggcatcttgttgacatcgaatatgactttgataataaataccggttcctgaaaaattaaatcttaaaaataaccccgctaagagtaatataaaaaacacccctgtgaaaaagtccacccaatcctttttcccgcgagaaagaaaacaacaaatgaaaacttggttttgggggccgccccgcggcctccagaaattttttaaaccttttctttgggccgcgggcccccgagggaaagagaagtgggccatactgttttccaaagaaaccccggccataaatagggttgggatccccccnnnnnnnnnnccccgggggggaacgagtggttttaaaaaattccagatgggcctccaggggcttttggggttcttctaccggggacccaggggccctttaatcctatttaannnnnnnnnnnnnnnnnnnnnngcggaggggggaaaatcctgaacgactttcccccgctcggacaacccttccaaaacgggggggtgaaaaccgatccccccccgggagttttaccctctgtgtcccccctcgcggatagaattttcgcgtacggggggggaaacccgggagcg

SEQ ID NO: 71758 - DNA, 1044 bp, Homo Sapiens
ggaccggtccggatttccgggatatcgtcgaccacgcgtccggtgacaactgcagccgcacgtgggctcggcgcgatggaggaggagatgcatactgacgccaaaatccgtgctgaaaatggaacagggtccagccctcggggtcctggctgcagcctccggcactttgcctgcgaacagaacctgctgtcgcggccagatggctctgcttccttcctgcaaggtgacacctctgtcctggcgggtgtgtacgggccggccgaggtgaaggtcagcaaagagattttcaacaaggccacactcgaagtgatcctgaggccgaagattgggctgcctggtgttgcagagaagagccgggagcggctgatcaggaacacgtgcgaggcggtggtgctgggcacgttgcacccccgcacctccatcaccgtggtgctgcaggttgtcagcgatgccggctctctcctggcctgttgtctgaatgccgcctgcatggcattggtggatgcaggtgtgcccatgcgggctctcttctgtggggtcgcctgcgccctggactctgatgggaccctcgtgctggatcctacatccaagcaagaaaaggaggcccgggcagtcctgacctttgccctggacagcgtggaacggaagctgctgatgtccagcaccaaggggctctactcagacactgagctccagcagtgcctggctgcggcccaggccgcttcgcaacacgtcttccgtttctaccgggaatcgctgcagaggcgttactccaagagctgaggcaagctggggcaaggggccgctcccattgcctccacccactcaccccctacagcctgaagcaaaccagcagcccagccttgcctctctgacccatgggctccttgagcctgcagctctgtaaccacagggctcctgtggggaggccttggcctgtgacagcccccaggcctgggggcacagatccccccagcaaggataacattcaaaggagctcacatttatggaatggatgaatcaataaattaattcactttaaaa

SEQ ID NO: 71759 - DNA, 859 bp, Homo Sapiens
tcggtctaaggtagcgaggctgggtgtcgaattcggcacgagggtgggctcggcgcgatggaggaggagatgcatactgacgccaaaatccgtgctgaaaatggaacaggggtccagccctcggggtcctggctgtcagcctccggcactttgcctgcgaacagaacctgctgtcgcggccagatggctctgcttccttcctgcaaggtgttgcagagaagagccgggagcggctgatcaggaacacgtgcgaggcggtggtgctgggcacgttgcacccccgcacctccatcaccgtggtgctgcaggttgtcagcgatgccggctctctcctggcctgttgtctgaatgccgcctgcatggcattggtggatgcaggtgtgcccatgcgggctctcttctgtggggtcgcctgcgccctggactctgatgggaccctcgtgctggatcctactatccaagcaagaaaaggaggcccgggcagtcctgacctttgccctggacagcgtggaacggaagctgctgatgtccagcaccaaggggctctactcagacactgagctccagcagtgcctggctgcggcccaggccgcttcgcaacacgtcttccgtttctaccgggaatcgctgcagaggcgttactccaagagctgaggcaagctggggcaaggggccgctcccattgcctccacccaatcaccccctacagcctgaagcaaaccagcaagcccagccttgcctctctgacccatgggctccttgagcctgcagctctgtaacacagggctcctgtggggaggcttgggcctgtgacagcccccaggcctgggggcacagatcccccagaagggtaacatca

SEQ ID NO: 71760 - DNA, 825 bp, Homo Sapiens
ttgggtgacaactaattatgaacccccgcggggtgtttatataaaagcaggctggtaccggtccgggtattcccgggatatcgtcgacccacgcgtcgcgcacgtgggctcggcgcgatggaggaggagatgcatactgacgccaaaatccgtgctgaaaatggaacagggtccagccctcggggtcctggctgcagcctccggcactttgcctgcgaacagaacctgctgtcgcggccagatggctctgcttccttcctgcaaggtgacacctctgtcctggcgggtgtgtacgggccggccgaggtgaaggtcagcaaagagattttcaacaaggccacactcgaagtgatcctgaggccgaagattgggctgcctggtgttgcagagaagagccgggagcggctgatcaggaacacgtgcgaggcggtggtgctgggcacgttgcacccccgcacctccatcaccgtggtgctgcaggttgtcagcgatgccggctctctcctggcctgttgtctgaatgccgcctgcatggcattggtggatgcaggtgtgcccatgcgggctctcttctgtggggtcgcctgcgccctggactctgatgggaccctcgtgctggatcctacatccaagcaagaaaaggaggcccgggcagtcctgacctttgccctggacagcgtggaacggaagctgtgatgtccagcaccaaggggctctactcagacactgagctccagcagtgcctggctgcggccaggcgttcgcaacacgtcttccgtttctaccgggaatcgtgcagaggcgtactcaagagctgaggaagct

SEQ ID NO: 71761 - DNA, 1917 bp, Homo Sapiens
  misc_feature (93)..(121): n is a, c, g, or t
  misc_feature (709)..(709): n is a, c, g, or t
  misc_feature (1817)..(1817): n is a, c, g, or t
gcgggggacaggggcaatccaagggtggcggcaagatgaatgaggagatctccagcgactctgagagcgagagcctagctccaaggaagcctnnnnnnnnnnnnnnnnnnnnnnnnnnnnnaactgcacaggaaaagaagctgcgcttggccaagctctacctagagcagctccgtcagcaagaggaggagaaggctgaggcccgtgcatttgaggaggaccaggtggcggggcgcctgaaggaggatgtgcttgagcagaggggcaggctgcagaagttggtggcaaaagagatccaggccccagcctcagctgacattcgcgttttacgggggcaccagctctctatcacatgtttggtcgtcacccccgatgactcagccatcttctctgctgccaaagactgcagcatcattaagttagcttctcccccacccccaactgcagggagcgtggagagtggacggaagctgcatgtgattcctcgagccaagaagggtgccgagggaaagccccctggccacagcagccacgtcctctgcatggccatctcctccgacggcaagtaccttgcctctggtgaccgcagcaagctcattctcatttgggaggcccagagctgccagcacttgtacaccttcacaggacaccgggatgcagtgtcgggtctggcattccgcagaggcaccaccagctctacagcacatcncacgatcgctccgtgaaggtgtggaatgtggcagagaactcctacgtggagacgctcttcggacaccaggacgctgtggctgcactggatgccttgagccgggagtgctgtgtgacggctgggggccgggatgggactgtacgtgtgtggaagatccccgaggagtcccagcttgtcttctatggccaccagggctccatcgactgcatccacctaatcaatgaggagcacatggtgtccggcgcggacgatggctctgtggccttgtggggtctctccaagaagcgaccacttgccctgcagcgtgaagctcacgggctgcggggagagccaggcctggagcagcccttctggatatcgtcggtggcagccctcctcaacacagaccttgtggccacaggctcccacagctcctgtgtgcggctttggcagtgtggggaaggcttccggcagcttgaccttctctgtgacatccccctggtgggttttatcaacagcctcaagttctccagctctggggacttcctggtggctggggtagggcaggagcacaggcttggccgatggtggagaatcaaagaggctcggaattctgtctgcatcatcccactccgcagggtccctgtacccccagctgctggttcctgacactcttatcctccttatttaagtccttcccaggctatgccccaccctctttgtattaaaagcctcctcctttaaaaaaataatcattttgatatattcagcaccgcccttaagcccgccggctggaacgcgcctacggacccccacccacattcagcccctaaaagtattctgcgctcgcatcgatacacctgtctcccgtacggcaccccccccaacacacatgtacagccctccgctcccggtggaacccttttcccatagttggtagagaggtctaccaacttcatccaccccctcgactctttcctacaccctcaatcctgtacggacgatatttgtttgtaaaaccactctacttgttctcgcacaccgaacctacccttaaggcggtggggacgcacgagagacacacctacgtatctcccgcgagcggccactggaccacacgaccatcatnccgctagcacgggtcatgcatttctcaccactacctcctcctacccctattctccgcagtcgaacgctatcatcgatgctcgtacacgcgaactcatggc

SEQ ID NO: 71762 - DNA, 350 bp, Homo Sapiens
aatgagcttgctgcggtcaccagaggcaaggtacttgccgtcggaggagatggccatgcagaggacgtggctgctgtggccagggggctttccctcggcacccttcttggctcgaggaatcacatgcagcttccgtccactctccacgctccacttaatgatgctgcagtctttggcagcagagaagatggctgagtcatcgggggtgacgaccaaacatgtgatagagagctggtgcccccgtaaaacgcgaatgtcagctgaagctggggcctgaatctcttttgccaccaacttctgcagcctgcccctctgctcaagcacatcctccttcaagcaccccctcatgc

SEQ ID NO: 71763 - DNA, 1090 bp, Homo Sapiens
  misc_feature (75)..(109): n is a, c, g, or t
  misc_feature (944)..(990): n is a, c, g, or t
atgatagatcatatagggcgctactcgcgcagcgaacgacgagcgcagcgaagtagtgagcgaggaagcggccgnnnnnnnnnnnnnnnnnnnnnnnnnnnnnnnnnnncagtcgacggtaccggacatatgcccgggaattcggccattacggccggggagatcgccgaagcgtcggactaccgttggtttccgcaacttcctggattatcctcgccaaggactttgcaatatatttttccgccttttctggaaggatttcgctgcttcccgaaggtcttggacgagcgctctagctctgtgggaaggttttgggctctctggctcggattttgcaatttctccctggggactgccgtggagccgcatccactgtggattataattgcaacatgacgctggaagagctcgtggcgtgcgacaacgcggcgcagaagatgcagacggtgaccgccgcggtggaggagcttttggtggccgctcagcgccaggatcgcctcacagtgggggtgtacgagtcggccaagttgatgaatgtggacccagacagcgtggtcctctgcctcttggccattgacgaggaggaggaggatgacatcgccctgcaaatccacttcacgctcatccagtccttctgctgtgacaacgacatcaacatcgtgcgggtgtcgggcatgcagcgcctggcgcagctcctgggagagccggccgagacccagggcaccaccgaggcccgagacctgcattgtctcctggtcacgaaccctcacacggacgcctggaagagccacggcttggtggaggtggccagctactgcgaagaaagccggggcaacaaccagtgggtcccctacatctctcttcaggaacgctgaggcccttcccagcagcagaatctgttgagttgctgccacaaacaaaaaatacaattaaatattttgaannnnnnnnnnnnnnnnnnnnnnnnnnnnnnnnnnnnnnnnnnnnnnnaccgagggaccatccggggcgccaaagtcccttggggcgacctggaagaaggcaacaaggaaggaagggaaaaaacgggggaagctgtatgccgtgccca

SEQ ID NO: 71764 - DNA, 754 bp, Homo Sapiens
  misc_feature (161)..(187): n is a, c, g, or t
cagtcgacggtaccggacatatgcccgggaattcggccattacggccggggcaacaaccagtgggtcccctacatctctcttcaggaacgctgaggcccttcccagcagcagaatctgtgagttgctgccacaaacaaaaaaatacaataaatatttgaannnnnnnnnnnnnnnnnnnnnnnnnnnaaaacaaccagaccacgaggaccatcgggggcagagtcgttggagactgaagaggaagaggaggaggagaaggggagtgagcggccgcccccagggcggagatccaggagctggcggccgccgatccgatggagaaggggggacccaggccagcaggagacaggacccccgaagctgaggccttgggatggagcagaagccggagtggcggggcacgctgccgccttccccatcacggagggtccagactgtccactcgggggtggagtgagactgactgcaagccccaccctccttgagactggagctggcgtctgcatacgagagacttggttgaacttggttggtccttgtctgcaccctcgacaagaccacactttgggacttgggagctggggctgaagttgctctgtacccatgaactcccagtttgcgaattatagagacaatctattttgttacttgcacttgttattcgaaccactgagagcgagatgggaagcatagatatctatatttttatttctactatgagggccttgtaataaatttctaaagcctcaaata

SEQ ID NO: 71765 - DNA, 974 bp, Homo Sapiens
aaactggtacccacacttgccctttctccctctctccagcacactcccctctaagaaagtaaaagcaaagctttcttaatggcaacactttgggcctgttctgttgctcctgccttatttctctttcaaccctgtacatgactcgtgttcaccatccccttgatcagtgtccatccgcgctaatttgcatcatgaactgaacagtgtgtgagtggtcacctactaaacccagctctgggggcagagctgtcttccccatctctggtgctcctaacacctgtgagatggtcctgtcgagaggactaggaaccgataggaggagagtccttctcggcagagctcactgcaaacaactggaattgaggttgcacactgtgatttttacaccgaaaagccaaaaggagctggccatccagggcctagggagaccagccttcctcagctatgcttgccgaaaccagcatgatgcttcaaagagccctgctccacccctcatggcatggatccttttcctggtgtggactctgaagggtcagtcttcggggaagagaggtggggtggggctactagcatcccaatttagaaaatagaggagtttgtagccagcagcctgtaaactggaaacactggtctcagccaacctcctcagggcgccctggcttctccccaaggagatgaggagcggtgatgccagcaccgggatgcgcagagcactggaagggctggtgcagatctacttcccatgcagaagagaagtcacatcttccagggaatcgcaatgttgtggcgtctgacttgtatgtcacatttgtgtaaaatggtatattctttaaaatagtgttgataactggaatattgtatgtatgcttggagatgctttgtgtgaacctaagactgtcactcaacagatgttggattggggaaaatccaaagcacaacttcaaaataaaatacatttttaggtttcaaaaaaa

SEQ ID NO: 71766 - DNA, 1392 bp, Homo Sapiens
ggcctgggtggcgaattcggcacgagggcacagcgaggcgctagggggaacgctggcctctgaaactagctctgggaccggggtctgcggccggcccctagctggccccgtctcccatccccagaagggtattcactggggattctgagctttggctactccagtttcccacgacacgatgttccctttctacagctgctggaggactggactgctactactactcctggctgtggcagtgagagaatcctggcagacagaagaaaaaacttgcgacttggtaggagaaaagggtaaagagtcagagaaagagttggctctagtgaagaggctgaaaccactgtttaataaaagctttgagagcactgtgggccagggttcagacacatacatctacatcttcagggtgtgccgggaagctggcaaccacacttctggggcaggcctggtgcaaatcaacaaaagtaatgggaaggagacagtggtagggagactcaacgagactcacatcttcaacggaagtaattggatcatgctgatctataaagggggtgatgaatatgacaaccactgtggcaaggagcagcgtcgtgcagtggtgatgatctcctgcaatcgacacaccctagcggacaattttaaccctgtgtctgaggagcgtggcaaagtccaagattgtttctacctctttgagatggatagcagcctggcctgttcaccagagatctcccacctcagtgtgggttccatcttacttgtcacgtttgcatcactggttgctgtttatgttgttggggggttcctataccagcgactggtagtgggagccaaaggaatggagcagtttccccacttagccttctggcaggatcttggcaacctggtagcagatggctgtgactttgtctgccgttctaaacctcgaaatgtgcctgcagcatatcgtggtgtgggggatgaccagctgggggaggagtcagaagaaagggatgaccatttattaccaatgtagattgcactttatatgtccagcctcttcctcagtcccccaaaccaaagctacacagccagatttctcaagcagtctcaactccagtccctcatctcacccttactattgctcttgctttccagtttgcttttgatttgcatcttctcactagtaaaactgccttccctttgttccttattttctgttttttctctagagaggtacagttgtaagtcagagttaatataatagggcctgtgaaaacagaggcttttgcattgtctcttgacatcagaagttacaataggcatatgggcaaaatggtgtagcaggctcactggccgtttgttttttaaacacattttcacaagtttttgagacactggatttctttaattaaa

SEQ ID NO: 71767 - DNA, 967 bp, Homo Sapiens
  misc_feature (73)..(73): n is a, c, g, or t
  misc_feature (178)..(178): n is a, c, g, or t
  misc_feature (180)..(180): n is a, c, g, or t
  misc_feature (329)..(329): n is a, c, g, or t
tgctggtgtgtccacaccctttgcagatgtaatcctcagtctgttcgccgcagatacagagagacttggactngtggcatcagcaattttatgtgaggacaagccagggccgtcagtctggctgatgtgccgagactagtgcctctcccgctctgagcagtgagtccagctgggactngnaagacttcaggagagggagagtaagagggagcctcaggatgaaggtggctcctggtgttgcttcccaagtggactcagatttttcttcccccgaggggctgaaagtgattctcacttcccaactccatccacggatccccccctcaccnatagatctccaacatcttcgggcctgagtgtttgtgaaagatgttgccaccgcgagacatcaagtccagcacagccaggcaggagaagttgcggtggccatcctctctgtcagccgtgctgttgaatgtggctgtggcctcctgcggagcaggggctgccttcccgaaggtctcatagtgcagagtctcattgccacggaacaggaagagggtgaggctgtccaggggctccacggtgggcaccctgcactcaatggtgaaggacttgcccacagccaccaaagtgggttgcagtgtcaggatgacctgccttggaggctctgcaggggacaaaggagggaggtctggtcaggatgggggtgcagtcccagcagcctccccctggccagggccatctcctgtcaccatggtgttccacggttggggaggaggtggcctggccggctccagtgcagagaggaagagggcggcagttgaggatggaggctggactgtgtggtagttttacagacatgatggtttccggtgaccaggtgtctacaaggacaaggttcagaaattgtacagccaactggaaagatataaaagtttgggtctgtctcctctccttcagaaatgaaatataaatttcaaacatt

SEQ ID NO: 71768 - DNA, 1245 bp, Homo Sapiens
  misc_feature (42)..(84): n is a, c, g, or t
  misc_feature (88)..(122): n is a, c, g, or t
tcagactgtatacgactcactatagggcgctagctcgtcttnnnnnnnnnnnnnnnnnnnnnnnnnnnnnnnnnnnnnnnnnnnccgnnnnnnnnnnnnnnnnnnnnnnnnnnnnnnnnnnncagtcgacggtaccggacatatgcccgggaattcggccattacggccgggagggattctgggccatagctcagacctgcgcccaccatctccctccaggcagcccttggctggtccctgcgagcccgtggagactgccagagatgtcctctttcggttacaggaccctgactgtggccctcttcaccctgatctgctgtccaggatcggatgagaaggtattcgaggtacacgtgaggccaaagaagctggcggttgagcccaaagggtccctcgaggtcaactgcagcaccacctgtaaccagcctgaagtgggtggtctggagacctctctagataagattctgctggacgaacaggctcagtggaaacattacttggtctcaaacatctcccatgacacggtcctccaatgccacttcacctgctccgggaagcaggagtcaatgaattccaacgtcagcgtgtaccagcctccaaggcaggtcatcctgacactgcaacccactttggtggctgtgggcaagtccttcaccattgagtgcagggtgcccaccgtggagcccctggacagcctcaccctcttcctgttccgtggcaatgagactctgcactatgagaccttcgggaaggcagcccctgctccgcaggaggccacagccacattcaacagcacggctgacagagaggatggccaccgcaacttctcctgcctggctgtgctggacttgatgtctcgcggtggcaacatctttcacaaacactcagccccgaagatgttggagatctatgagcctgtgtcggacagccagatggtcatcatagtcacggtggtgtcggtgttgctgtccctgttcgtgacatctgtcctgctctgcttcatcttcggccagcacttgcgccagcagcggatgggcacctacggggtgcgagcggcttggaggaggctgccccaggccttccggccatagcaaccatgagtggcatggccaccaccacggtggtcactggaactcagtgtgactcctcagggttgaggtccagccctggctgaaggactgtgacaggcagcagagacttgggacattgccttttctagcccgaatacaaacacctggacttag

SEQ ID NO: 71769 - DNA, 1264 bp, Homo Sapiens
  misc_feature (543)..(543): n is a, c, g, or t
  misc_feature (545)..(545): n is a, c, g, or t
  misc_feature (577)..(577): n is a, c, g, or t
  misc_feature (1117)..(1118): n is a, c, g, or t
  misc_feature (1126)..(1127): n is a, c, g, or t
  misc_feature (1141)..(1141): n is a, c, g, or t
ggcagtggatacttcatattggcaacaaacagcagctgggatgggccacagggctggacaggaatggctgaggcccagccccagcactgctcctccatcacagccgcccttcctgctgtcccactctggccacccaggaggcccccaagccccaccccaccgtctgtgtctggcaggcatcgctgaccatataaggtgcctctggcctccctgcccagcccttcagtgctcccagctccctggtgccctgggaggcggccccctagcctggggtcttggtggcgaaggtcaggtagccggtgtggcccacggcctccttcatgggcgtgccgctgcggaaggggctggtgtcggagccggcagggccatctgtgcctgtgcccaggtcgggcggtggcaggctgacagtgcgcacgttgtagacctgtggcagcacctccagggtgctcagctctgagaagccgcgcgctgccagcgcctggcatgtgcgttgcacctgctcgatgcacggtgagaaggagcagaagcgcccgccttcgaccntnaagggcgtcccaggcgtggcccacggcctccncagggtgatggatgtccaggaagacggcgtcggccacgtggctcacgccaaagccactgcggcacacgtcctgggtgcgcacagtcacccagcggcccacacggtgctcctggaactcctcccgggccttctctgcccgctgctggtggaactccaccgtgtgcaggtgacccgtgggtgcaatggtgcggatgatggcgtgggacacagagccactgccggtgccagactcacagaccacagagccgggccgaagctccaacatcatggtgatgagggcgatgtctgtggagtagaggatctgcgtgcggtgcggcaggttcagcgtccagagctcgggcgtggggtgcagcacatacacccagccacctcggccgcacgtcaccttggagccgaaggggcggccgataaggtcaactgagtgccgcaggacaccatgccgggtctgggtctgtgccccacgctgcacacgcactgccaccattgcaccatggcccagtgacaggatggccgtgtcaccctccttgatcagctcctcgnntatgccannccagaagcgtcatnggtgctaatgtctggcaagggccaaggacctgcgacgctcctgctgccggggctccacacgtgcctccgcgacgcgcggcggcggcggccacaacacttccggatcccgggaattccggaccc

SEQ ID NO: 71770 - DNA, 963 bp, Homo Sapiens
cagtacgaggctggtgttgaatcggcacgaggcaggagcgtcgcagtgtctggccctgccagacattagcaccatgagcttcgtggcatacgaggagctgatcaaggagggtgacacggccatcctgtcactgggccatggtgcaatggtggcagtgcgtgtgcagcgtggggcacagacccagacccggcatggtgtcctgcggcactcagttgaccttatcggccgccccttcggctccaaggtgacgtgcggccgaggtggctgggtgtatgtgctgcaccccacgcccgagctctggacgctgaacctgccgcaccgcacgcagatcctctactccacagacatcgccctcatcaccatgatgttggagcttcggcccggctctgtggtctgtgagtctggcaccggcagtggctctgtgtcccacgccatcatccgcaccattgcacccacgggtcacctgcacacggtggagttccaccagcagcgggcagagaaggcccgggaggagttccaggagcaccgtgtgggccgctgggtgactgtgcgcacccaggacgtgtgccgcagtggctttggcgtgagccacgtggccgacgccgtcttcctggacatcccatcaccctgggaggccgtgggccacgcctgggacgccctcaaggtcgaaggcgggcgcttctgctcttcctcaccgtgcatcgagcaggtgcaacgcacatgtccaggcgcttggcagcgcgggggttctcagagctgaggcaccctggaggtgctgcccaggtcttcaacggtgcgccctgtcagcctggcaccgcccggacctgggacaggccccgatgggcctgcgcggtccgacaccagccctttccggggggcgccctgtagggggccggggcccacgggtctggacttgcccagaaccccggttggggccctcccgggccggggcggggctctccg

SEQ ID NO: 71771 - DNA, 682 bp, Homo Sapiens
gaactattgtgatttaactttattaatattttaaaatatgaaaactgtaaaacatagtatttatgtaaacaacctgacggactgttcaagtgggtacagcatcttcatacaaacaatttgaaagaagaccaagtttaagtaagaatcttatgacatgtaaggaataacattgatgaagctattctttaaatagttgcattcatgtctaaagtacatttggctttctaaaaagaaaaggtacattcttgcatctggtgaacattttcttgacattacagcaaatagctaatggtgatagcaccaattctcatagctcgtaaaccttatatttgttacacaatgtaataacaaagttataaatttataacaaaataatagtgttgaacatgtttcccttgaaagttctaacttacaaaataaagcccccaaagattagtctgaattaatgtatcattcaaagtgtagcaggattaatggctcagaattaagcaaattaattagaaacattgcataggacggagaacttccctgtatggaaaccaatctacagattgtttcttgtcctctaaaaagtaagttgagaggtactaatgatggcaaataatccatttatattttacaaaataaaacatttcactaatatatggctcatcctacctctgtggcaatacaaaatgccatt

SEQ ID NO: 71772 - DNA, 686 bp, Homo Sapiens
  misc_feature (183)..(235): n is a, c, g, or t
tgtccccttgacattgacaaaagcacagtgactgtcagcagattcctttacttttgtttgtgggaggtaggaattgttttaatgcattgtaaacagtgtttctgaaattggatggctggctaatagacactgaatcacccggagtgcttatcttaaaattgcagatttagggagcctgccaannnnnnnnnnnnnnnnnnnnnnnnnnnnnnnnnnnnnnnnnnnnnnnnnnnnnggttaaattgtgggaaagggtccagattttaaaggtgctttaaggttgccctctgccgatactgtttgtctttctactgtttcatcccctaacttcccccaaccctcaaattaaaactagaactatagatccacatgaacgcacgcctgagatttggccactcacctatgttttgggtggattgcctaggaaagcaagtcatatggccattgatagttctcatgtaattagttttgctcaccactagtacagatgacccgtttacacgtggcttccctcggaagccctcctcaacagtagctggtgtgaaagactaaatcagtagagttggaaaagctttataaccggtgtgtcatatgcttgctatttaaagctgtgtgttggttttgtttttctgccacattcactagttttttaataaatattttccaaaaatggatattgtgcttca

SEQ ID NO: 71773 - DNA, 668 bp, Homo Sapiens
  misc_feature (174)..(226): n is a, c, g, or t
gacattgacaaaagcacagtgactgtcagcagattcctttacttttgtttgtgggaggtaggaattgttttaatgcattgtaaacagtgtttctgaaattggatggctggctaatagacactgaatcacccggagtgcttatcttaaaattgcagatttagggagcctgccaannnnnnnnnnnnnnnnnnnnnnnnnnnnnnnnnnnnnnnnnnnnnnnnnnnnnggttaaattgtgggaaagggtccagattttaaaggtgctttaaggttgccctctgccgatactgtttgtctttctactgtttcatcccctaacttcccccaaccctcaaattaaaactagaactatagatccacatgaacgcacgcctgagatttggccactcacctatgttttgggtggattgcctaggaaagcaagtcatatggccattgatagttctcatgtaattagttttgctcaccactagtacagatgacccgtttacacagtggcttccctcggaagccctcctcaacagtagctggtgtgaaagactaaatcagtagagttggaaaagctttataacaggtgtgtcatatgcttgctatttaaagctgtgtgttggttttgtttttctgccacattcactagttttttaataaatattttccacaaaatggat

SEQ ID NO: 71774 - DNA, 759 bp, Homo Sapiens
  misc_feature (277)..(329): n is a, c, g, or t
actccctaaacaacacttgacaggctgttgcacagggcttctatagatcagtgtgttaggaatgggaggccccttcctgcctgccttcccatattggtcccttgacattgacaaaagcacagtgactgtcagcagattcctttacttttgtttgtgggaggtaggaattgttttaatgcattttaaacagtgtttctgaaattggatggctggctaatagacactgaatcacccggagtgcttatcttaaaattgcagatttagggagcctgccaannnnnnnnnnnnnnnnnnnnnnnnnnnnnnnnnnnnnnnnnnnnnnnnnnnnnggttaaattgtgggaaagggtccagattttaaaggtgctttaaggttgccctctgccgatactgtttgtctttctactgtttcatcccctaacttcccccaaccctcaaattaaaactagaactatagatccacatgaacgcacgcctgagatttggccactcacctatgttttgggtggattgcctaggaaagcaagtcatatggccattgatagttctcatgtaattagttttgctcaccactagtacagatgacccgtttacacgtggcttccctcggaagccctcctcaacagtagctggtgtgaaagactaaatcagtagagttggaaaagctttataaccggtgtgtcatatgcttgctatttaaagctgtgtgttggttttgtttttctgccacattcactagttttttaataaatattttcc

SEQ ID NO: 71775 - DNA, 490 bp, Homo Sapiens
cagtctcatcaggtgattcttttcaacagtaatgtttgagaattactgggttaaattgtgggaaagggtccagattttaaaggtgctttaaggttgccctctgccgatactgtttgtctttctactgtttcatcccctaacttccccccaaccctcaaattaaaactagaactatagatccacatgaacgcacgcctgagatttggccactcacctatgttttgggtggattgcctaggaaagcaagtcatatggccattgatagttctcatgtaattagttttgctcaccactagtacagatgacccgtttacacgtggcttccctcggaagccctcctcaacagtagctggtgtgaaagactaaatcagtagagttggaaaagctttataaccggtgtgtcatatgcttgctatttaaagctgtgtgttggttttgtttttctgccacattcactagttttttaataaatattttccaaaaatgaaaa

SEQ ID NO: 71776 - DNA, 974 bp, Homo Sapiens
  misc_feature (23)..(23): n is a, c, g, or t
  misc_feature (40)..(40): n is a, c, g, or t
  misc_feature (49)..(49): n is a, c, g, or t
  misc_feature (66)..(66): n is a, c, g, or t
  misc_feature (107)..(107): n is a, c, g, or t
  misc_feature (176)..(176): n is a, c, g, or t
cccaattccttagtggaaccagnatccttgaatcatgggntggaaattntgtgtatctgggctttnatgggatgccataaaattttccaagttggtaagtaagcagntgccaagggtctggatcagaaaaaaaggcaggcagccgggttcccactcgccttccatgagctctccgnagctcaccggccatcacttgaagcaaacactcctgagggagctggttgaggaagggcagacatccggcttcttgccctggtacaactggcagacaagggtaaggagctgggtctgatcttccaagggtttcccattgacggtgacccagggcacatactcgtgtggtggctggagagcatctgtccgctgggcgttggcgtgcatgagctgcatgccgcgctcccccattgcacactccatgatagtgtctggcgacagccctggggcgtagagctgcaggcatagtggcagacttctctccatgtcctcaaactcttccatgcagacaatggtcaggaaggctagctccatgtcaagttcatccaacacgcaggcctccaccttgttgaatttgcactcctcttctccatgctggcacttgaactcccacctgccactgacattttgttcctgtgcgtttccgtagggcaccagcgtgacattgaggatctccatgaccaacagccatgttgggaagagctcccggatcaggaaggctcggcagccaccgcacagtgcttcatagtagagggtcacattgacaagcggtgcattggacttcttcaggggcccccgcaggtatagattgcctgtcttgtagttaactggtggcccattcccaaagaagtctaacgcttgcagaggggacgcctgcaccgccgccgtggggacgtccagcagcagcagcagcggtggcaggaacagcaggaagtgcctcgtgccgaattcacacacccaggcctcgtacctagccgtaa

SEQ ID NO: 71777 - DNA, 1386 bp, Homo Sapiens
  misc_feature (1042)..(1065): n is a, c, g, or t
  misc_feature (1085)..(1085): n is a, c, g, or t
  misc_feature (1242)..(1242): n is a, c, g, or t
cagtcgacggtaccggacatatgcccgggaattcggccattacggccggggcagtcgccacacctttgcccctgctgcgatgaccctgtcgccacttctgctgttcctgccaccgctgctgctgctgctggacgtccccacggcggcggtgcaggcgtcccctctgcaagcgttagacttctttgggaatgggccaccagttaactacaagacaggcaatctatacctgcgggggcccctgaagaagtccaatgcaccgcttgtcaatgtgaccctctactatgaagcactgtgcggtggctgccaagccttcctgatccgggagctcttcccaacatggctgttggtcatggagatcctcaatgtcacgctggtgccctacggaaacgcacaggaacaaaatgtcagtggcaggtgggagttcaagtgccagcatggagaagaggagtgcaaattcaacaaggtggaggcctgcgtgttggatgaacttgacatggagctagccttcctgaccattgtctgcatggaagagtttgaggacatggagagaagtctgccactatgcctgcagctctacgccccagggctgtcgccagacactatcatggagtgtgcaatgggggaccgcggcatgcagctcatgcacgccaacgcccagcggacagatgctctccagccaccacacgagtatgtgccctgggtcaccgtcaatgggaaacccttggaagatcagacccagctccttacccttgtctgccagttgtaccagggcaagaagccggatgtctgcccttcctcaaccagctccctcaggagtgtttgcttcaagtgatggccggtgagctgcggagagctcatggaaggcgagtgggaacccggctgcctgcctttttttctgatccagaccctcggcacctgctacttaccaactggaaaattttatgcatcccatgaagcccagatacacaaaattccaccccatgatcaagaatcctgctccactaagaatggtgctaaagtaaaactagtttaataagcaaannnnnnnnnnnnnnnnnnnnnnnnacatgtccggccgcctcggnccctccaagaagggcggcccgctctagagttatccctcaagggggcccaaagtttaccgcgaccccaagctttttttggacaaaagggggcccctaaaagggagcccgtatttataaacttagggcacctggcccggtccctttttaccaacctccntggactgggggaaaaactggctaactttgggggatcttttggtgaaagggaacctttaccttcgtgggggtggggaaacttaatttgggaacaaaacttaccttaccagaagatttaaaaagcctcttaaagggaaaaattata

SEQ ID NO: 71778 - DNA, 1111 bp, Homo Sapiens
  misc_feature (86)..(120): n is a, c, g, or t
cgaagtatgtatagatcatataggggctatcgcttatagccgaacggacgagcgcagcgaagtcatgtgagcgaggaagcggacgnnnnnnnnnnnnnnnnnnnnnnnnnnnnnnnnnnncagtcgacggtaccggacatatgcccgggaattcggccattacggccgggggcagtcgccacacctttgcccctgctgcgatgaccctgtcgccacttctgctgttcctgccaccgctgctgctgctgctggacgtccccacggcggcggtgcaggcgtcccctctgcaagcgttagacttctttgggaatgggccaccagttaactacaagacaggcaatctatacctgcgggggcccctgaagaagtccaatgcaccgcttgtcaatgtgaccctctactatgaagcactgtgcggtggctgccgagccttcctgatccgggagctcttcccaacatggctgttggtcatggagatcctcaatgtcacgctggtgccctacggaaacgcacaggaacaaaatgtcagtggcaggtgggagttcaagtgccagcatggagaagaggagtgcaaattcaacaaggtggaggcctgcgtgttggatgaacttgacatggagctagccttcctgaccattgtctgcatggaagagtttgaggacatggagagaagtctgccactatgcctgcagctctacgccccagggctgtcgccagacactatcatggagtgtgcaatgggggaccgcggcatgcagctcatgcacgccaacgcccagcggacagatgctctccagccaccacacgagtatgtgccctgggtcaccgtcaatgggaaacccttggaagatcagacccagctccttacccttgttctgccagttgtaccagggcaagaagccggatgtctgcccttcctcaacagctcctcaggagtgtttgcttcaagtgatggccggtgagctgcggagaagctcatggaaggcgagtgggaaccccggtgcctgccttttttctgatccagaacctcggacctgctaattaccaactggaaattttatgctcccatgaagccagatcacaaatttcacccatgatcagaacctgtcca

SEQ ID NO: 71779 - DNA, 761 bp, Homo Sapiens
tggctaggtacgaggctgggtggcgaattcggcacgaggaggacatggagagaagtctgccactatgcctgcagctctacgccccaggctgtcgccagacactatcatggagtgtgcaatgggggaccgcggcatgcagctcatgcacgccaacgcccagcggacagatgctctccagccaccacacgagtatgtgccctgggtcaccgtcaatgggaaacccttggaagatcagacccagctccttacccttgtctgccagttgtaccagggcaagaagccggatgtctgcccttcctcaaccagctccctcaggagtgtttgcttcaagtgatggccggtgagctgcggagagctcatggaaggcgagtgggaacccggctgcctgcctttttttctgatccagaccctcggcacctgctacttaccaactggaaaattttatgcatcccatgaagcccagatacacaaaattccaccccatgatcaatgaatcctgctccactaagaatggtgctaacagtaaaactagtttaataagcccttagtcaaaaaactatagcaactgaaataaccactaaacaaaactccggacgccactcaaatgccggggcgcgggagaaaaggtgttcgcaaactgtggcctgtggccacatagggtggatcccggggccacacgttttcttggaccaacagtgggaaaaccggccggagcacccaaatgagggccccgataacttcgaaaagccgttacccgctaa

SEQ ID NO: 71780 - DNA, 821 bp, Homo Sapiens
  misc_feature (612)..(628): n is a, c, g, or t
ggggcagtcgccacacctttgcccctgctgctatgaccctgtcgccacttctgctgttcctgccaccgctgctgctgctgctggacgtccccacggcggcggtgcaggcgtcccctctgcaagcgttagacttctttgggaatgggccaccagttaactacaagacaggcaatctatacctgcgggggcccctgaagaagtccaatgcaccgcttgtcaatgtgaccctctactatgaagcactgtgcggtggctgccgagccttcctgatccgggagctcttcccaacatggctgttggtcatggagatcctcaatgtcacgctggtgccctacggaaacgcacaggaacaaaatgtcagtggcaggtgggagttcaagtgccagcatgggagaagaggagtgcaaatttcaacaaggttggaggccctgcgtgtttggattgaacttggacatgggagcttagcctttccttgaccattgttctggcatgggaaaaaaatttggaagggaccatgggaaaaagaaaattcttgcccccttattggcctgggaagctttcttacccccccaaggggtttgtcccccccaaaaaccttattcattggaaaannnnnnnnnnnnnnnnnaaacccgcggggaatggaaagcttctatgggacagccccaaaacgccccaaagggggaacaaaaaaggtttttctccaagccacacccggaaagaaaatattttggggccccctggggtcaccccggccctatagggggaaaacccctctttggggaaaaaaatataaacccccggtttctccctttaccccc

SEQ ID NO: 71781 - DNA, 603 bp, Homo Sapiens
ctgttaagtaacaacagatcttcctgctttactaaatctattcttcccccaagccctcgagaagccctggcaggacccaggctggctactgagctctgggcgggggtaggggggtctggcctgctgcgggccaagttggggcaggacatacagcccattccatggggaggatgaggcccctgggggtcagtgaggcacggctctgcctcaaggccaccccctcctaaggacacagggtgaagccccctcggccacatccggggcagccatgccagagctgagacctcctacgagtggtactggggccttcccacgaagaggcctggggaggctctcgggcctccgtctgccctccctcctcgatggggggcctgatccagctctgacagggagcgccactgccctctggctctgtccacggggaactcccagcgccaggacactatgcaggctatgcccgcactgcctacagagctatgctcaggacgggtgggcgccggtctcagctgtcgggcactcagttcacctgccggcagccgcagggctcctgggcccacaactcaagtggccctggagcaggggtctgacccccatgctgctcca

SEQ ID NO: 71782 - DNA, 812 bp, Homo Sapiens
  misc_feature (94)..(94): n is a, c, g, or t
tagaacaataacagtggtaaaaagcggcggacggccggaatcccgggatatcgtcgacccacgcgtcgacaaacagcattgtaatccattctcngcaccttcttcttcttatcttgtatacggtttattaatttgtagagggacaggggagtgggcaaggggaagaagcagcttatttgactaaccagcccctctgtggtccaccagcgtcttggcttggtgggagggctctcaatcagcagggccccaggagggaagaagaagtggggcaaagcctggcctcgccgctcgggagctttgccatctgagccacgcctcctccaggccatgctccttgaacttggaaatgtcaaccggagcccttacaccagccctccagcatctaatagacttgaatctactctaaacgaatatttaatccaacctcactacattgtagctcagtccaacgactaaccctgaaatgggggtgttccagccttcagcgagatggccaagcggtcccctgggggctgtggcagcggacttatccttctctgttgccaaccttgccgtccgacctcctccgcccccatgcggtgaccccgtccgtgtctgtgtctgtccatacgtgtgagtccagctaaaaagacaaaacagaacccgtgggcccagctcggaaggtgcgtggagaaggctccgacgtctccgaagtgcagcccttgggatggcattccgttgtgtgccttattcctggagaatctgtatacggctcgcctatagaaatatagcctcttcatgctgtattaaaaggacttttaaaagcaaaaaaa

SEQ ID NO: 71783 - DNA, 629 bp, Homo Sapiens
gagagtctgggtgggttggggtgagagagaggcatctggcttgagagcagttcccagggctgcatccaggccgtgggcatctggcagaggcttccccagtggggctgctcccctgctggccagcctggccccgggagtggtgctggccacaggctcccgagatttcctgtgcccagggcaacagatgtgtgttcagcctgtgccgcggctgctgcaagaagcgagcctccaaagagactgcagactgcccaggtcacggattgctttttaaaaccaaattggagaagtctctggcctggaaagaggcccagcctgagctgcaggagcctcagccagcagcacctggaacaccaggtggcttctccgaagtcatgggcagtgccctggcctgaaggcccacaacccccacccccaggactgctgctggagcctggacacgtcctacttaagaaaatgccttttactcagggaatctcctgctacttaatgtggaaagacacgcccatgtcccccttcggcccactctgggggcctggaaatgctgcagtggggagcaggccccaggctggacctgccctgtcctcagcacgcgtgtgcaaaagtgaacaataaatcatttcaaagatgcg

SEQ ID NO: 71784 - DNA, 910 bp, Homo Sapiens
ggagcgaggcctgggtggcgaattcggcacgaggagcacccctgccccctgtcctacgtccgggcccacctcttcaagctgtggcaccacacgctgcaggtgcaccaggagctgcgagaggagctggccaaggtgaagaccctggagggcatcgctgctgtgagccaggagctgaagctgcggtgtcaggaggagatatccaggcaggagggagcgaagcccaccggcgacttgcccttccactggatctgccagccctacatccggccggggcccagggaggggagcaaggagaaggcaggtgcgcgcagcaagcgggccctggaggaagaggagggtggcacggaggtcctgtccaagaacaagcaaaagaagcagctgaggaacccccacaagaccttcgacccctctctgaagccaaaatatgcaaagtgtgaccagtgtggaaacccaaagggcaacagatgtgtgttcagcctgtgccgcggctgctgcaagaagcgagcctccaaagagactgcagactgcccaggtcacggattgctttttaaaaccaaattggagaagtctctggcctggaaagaggcccagcctgagctgcaggagcctcagccagcagcacctggaacaccaggtggcttctccgaagtcatgggcagtgccctggcctgaaggcccacaacccccacccccaggactgctgctggagcctggacacgtcctacttaagaaaatgccttttactcagggaatctcctgctacttaatgtggaaagacacgccccatgtcccccttcggcccactctggggggcctggaaatgctgcagtgggggagcaggccccaggctggacctgccctgtcctcagcacgcgtgtgcaaaagtgaacaataaatcatttcaaagatg

SEQ ID NO: 71785 - DNA, 974 bp, Homo Sapiens
  misc_feature (60)..(68): n is a, c, g, or t
ggggcccggagacccttacccggggggaaaattggcccgaggagttattttggaacattnnnnnnnnnaggcaccccctttcccccccttttcttaacgtccggggcccacctctttcaaggctttggccaccacacgtttgcagggtgccaccaggagcttgcgagaggaactggcccaaaggtgaagacccctggaggggcatcggctgccgtgaacccaggaagcgaaagctgcggggttcaggagggagatatccaggcaggagggagggaagcccccccggcgacttgcccttcccactggattcggccagccctacatccggccggggcccagggaggggagcaaggagaaggcaggtgcgcgcagcaagcgggccctggaggaagaggagggtggcacggaggtcctgtccaagaacaagcaaaagaagcagctgaggaacccccacaagaccttcgacccctctctgaagccaaaatatgcaaagtgtgaccagtgtggaaacccaaagggcaacagatgtgtgttcagcctgtgccgcggctgctgcaagaagcgagcctccaaagagactgcagactgcccaggtcacggattgctttttaaaaccaaattggagaagtctctggcctggaaagaggcccagcctgagctgcaggagcctcagccagcagcacctggaacaccaggtggcttctccgaagtcatgggcagtgccctggcctgaaggcccacaacccccacccccaggactgctgctggagcctggacacgtcctacttaagaaaatgccttttactcagggaatctcctgctacttaatgtggaaagacacgcccatgtcccccttcggcccactctgggggcctggaaatgctgcagtggggagcaggccccaggctggacctgccctgtcctcagcacgcgtgtgcaaaagtgaacaataaatcatttcaaagatgaaaaaa

SEQ ID NO: 71786 - DNA, 734 bp, Homo Sapiens
cggtcagccaccctgtccagaacttctcctgagcctgatgacccacagactgtgcctggcccctccctggtggggacagtgacactacgaagggagctggggtagttaaaggctcccggggcttctagaaggaagccaagcagctgccttccttttccctggggagaggtaggaaggaaccaggccctcacttaggtttggaggggcagataagagcactgctgaccatctgctttcctccaagggttgctgtgtctagggtgaagtaggcaaaacgttgcccttaaaactgggccctgaagacggttccagccttgtccttcctgtgtgctccctgagagccattcctgtcccttacacattccagggcagggtgggggtgggtagccctgggggttcccctccctcttgtgcaccattaggactttgctgctgctattgcacttcaccagaggttggctctggcctcagtaccctcagtctcctctccccacattgtgtcctgtgggggtggggtcagccgctgctctgtacagaaccacaggaactgatgtgtatataactatttaatgtgggatatgttcccctattcctgtatttcccttaattcctcctcccgaccttttttacccccccagttgcagtatttaactgggctgggtagggttgctcagtctttgggggaggttagggacttatcctgtgcttgtaaataaataaggtcatgactctaa

SEQ ID NO: 71787 - DNA, 1051 bp, Homo Sapiens
taactaataggctaggtacaggctgggtgttgaattcggcacgagggcgctgcggcacgagggaagatggcggacgaggagaagctgccgcccggctgggagaagcgcatgagccgcagctcaggccgagtgtactacttcaaccacatcactaacgccagccagtgggagcggcccagcggcaacagcagcagtggtggcaaaaacgggcagggggagcctgccagggtccgctgctcgcacctgctggtgaagcacagccagtcacggcggccctcgtcctggcggcaggagaagatcacccggaccaaggaggaggccctggagctgatcaacggctacatccagaagatcaagtcgggagaggaggactttgagtctctggcctcacagttcagcgactgcagctcagccaaggccaggggagacctgggtgccttcagcagaggtcagatgcagaagccatttgaagacgcctcgtttgcgctgcggacgggggagatgagcgggcccgtgttcacggattccggcatccacatcatcctccgcactgagtgagggtggggagcccaggcctggcctcggggcagggcagggcggctaggccggccagctcccccttgcccgccagccagtggccgaaccccccactccctgccaccgtcacacagtatttattgttcccacaatggctgggagggggcccttccagattgggggccctggggtccccactccctgtccatccccagttggggctgcgaccgccagattctcccttaaggaattgacttcagcaggggtgggaggctcccagacccagggcagtgtggtgggaggggtgttccaaagagaaggcctggtcagcagagccgccccgtgtccccccaggtgctggaggcagactcgagggccgaattgtttctagttaggccacgctcctctgttcagtcgcaaaggtgaacactcatgcggcccagccatgggccctctgagcaactgtgcagcaccctttcacccccaattaaacccagaacccatgctctgcaaa

SEQ ID NO: 71788 - DNA, 378 bp, Homo Sapiens
cacggtacattcaagaagatcagttcgggagaggaggactttgagtctctggcctcacagttcagcgactgcagctcagccaaggccaggggagacctgggtgccttcagcagaggtcagatgcagaagccatttgaagacgcctcgtttgcgctgcggacgggggagatgagcgggcccgtgttcacggattccggcatccacatcatcctccgcactgagtgagggtgctggaggcagactcgagggccgaattgtttctagttaggccacgctcctctgttcagtcgcaaaggtgaacactcatgcggcccagccatgggccctttgagcaaatgtgcagcaccctttcacccccaattaaacccagaaccactg

SEQ ID NO: 71789 - DNA, 930 bp, Homo Sapiens
  misc_feature (785)..(785): n is a, c, g, or t
gggaggagggaagatggcggacgaggagaagctgccgcccggctgggagaagcgcatgagccgcagctcaggccgagtgtactacttcaaccacatcactaacgccagccagtgggagcggcccagcggcaacagcagcagtggtggcaaaaacgggcagggggagcctgccagggtccgctgctcgcacctgctggtgaagcacagccagtcacggcggccctcgtcctggcggcaggagaagatcacccggaccaaggaggaggccctggagctgatcaacggctacatccagaagatcaagtcgggagaggaggactttgagtctctggcctcacagttcagcgactgcagctcagccaaggccaggggagacctgggtgccttcagcagaggtcagatgcagaagccatttgaagacgcctcgtttgcgctgcggacgggggagatgagcgggcccgtgttcacggattccggcatccacatcatcctccgcactgagtgagggtggggagcccaggcctggcctcggggcagggcagggcggctaggccggccagctcccccttgcccgccagccagtggccgaaccccccactccctgccaccgtcacacagtatttattgttcccacaatggcctgggagggggcccttcccagattggggggcccctgggggtccccactccctgtccatccccaggttgggggctgcgaaccgccaagattctccccttaaggaattgacttcagcaaggggtgggaaggctcccagacccagggncagtgtgggtggggaaagggtgtttccaaagaaaaaggccctgggccagcaaaagccgcccccgtggtccccccaaggtggctggaaggccaaactcgaaggggcccaaatttgtttccaagttaaggcccaccgcttcctctgc

SEQ ID NO: 71790 - DNA, 637 bp, Homo Sapiens
ctccccacgtgctccatgggcataagactgtgggcttcaagcaataacaagcagaggcctggagagaggacacaatgagggtgcgtgtgccctcacccctgcccagagcgagggggcaaggactctgcctccagggcatctggggttttcccctccctcacacaacacactcccattctctttaggtttgcaccagtggtgtgagcagttggactcagtttggacaagggggaaagggggacttccctgggaaggtccagctaaaagtggcaacatttgcccccagaattgggggcctgggaacactggacctgctccttctcccctctccttccccgtttttgtgcttctggtttgtttctttaattaatttaacaagtgctgcagtttgccctcccattcccatctatcccccaagtcctttgcaatttcttccctgccctacataggggcggtgggtgtgggatcccttcactggccccctcgggaggcctgggttggactcagggtctcctccagctgggggctggaccgcagcacctatctgagcagttagagcgtctttcttttcagattgtgtacagtagattatttattttgttattttggaataaaatttattttatggcttaggaaa

SEQ ID NO: 71791 - DNA, 942 bp, Homo Sapiens
cgcgatgtgcttcagcagagcagacgctgcggataactacccttttggaacatgtcaacagaggaaactttttcctcacttccatcccccgaatttgattgggaacaagtttgtccctcttaggggatcaccccacagagggcctgggtgttatttttcagatggatatggcttggcatacgacttatctaagatcccaaccagtataaaaggatatactttgggagccagaacagctgtgaggtttaagccaatacagaaggaaatgacacctcatgcaggcaggtaccagaaagtaagtcctcagcaggaaaaacacaaacaaaattttgctccatttaatgtcttggtgcctcgatttaagaactacccaaaggacacttactatcccagccctggtgcatacaacccagagaagaagccaccgccaaaaattgcctggccaatgaaatttggatctccagactgggctcaggttccatgtctacagaaaagaaccctaaaagctgagctgtccacagacaaagactttagaaagcatcggaaccgtgtggcctacctaagcctgtattataattgagcggctgtaactaccttcacgtgctcctcttatacacagactctccaggactgaggacagagctgctcttcttcttctacgttactgtggccctcttgtctggcagcctggagcccagggagggacaggggcttatagctgctgtatgagaacataaagactagtgcacagtgctatctccatctacgtgacttgtggtgtacaccgtgccatggttctgggatctgatggagttaccggaggggtgctgaagttgggtgatttcatttaagtgaaacaattgggggcccctggtctctaattcttaattcccaggaagacaaatcttatataatcttaaccactagccctggtcatacaag

SEQ ID NO: 71792 - DNA, 970 bp, Homo Sapiens
  misc_feature (98)..(162): n is a, c, g, or t
agcaatagtgacactcagttagaacacagggttgtttacacaagacaaaggcaggggctggtaccggtccggtatcccgggatatcgtcgaccacgcnnnnnnnnnnnnnnnnnnnnnnnnnnnnnnnnnnnnnnnnnnnnnnnnnnnnnnnnnnnnnnnnntaagaaataaaaagtgagtcttcatattcaaattagtatatgaggttaggcaacaattcttatatgggaccaggtatatttaatttgcctttctttgcagtcatcctagtaaatccttgtaaagggttattttatatacaattttgtagtatattctaaatcccctttggcaaataaagctgaagttatctagtgtcagcatactgtgatttgtatatttatataagacaagattgcatcattctgattaagttgcagcattttagttttatctgataggcctgtattgagtaatcagtagctatgtgcaaatattaagtcaacttaattaccagacccagaaggccagaggtaatcaaagagtactttcggaagatgaaatatttataatgagttatggaaacaatgttttagaaatgtttttcttggtgtaatttaatgcagatttttacctcaattttgttaaaaaacttgataatttgatccctccatctatttaatatttaatattttcagattctagagtatttaaaatttaaacacaattataaaattaattataattcctacttatgttagctatgatttagggccaaaactaccctggttttgtcttgcaacttgaaacattgtgtattttaaactatataatttgggaacattattttatagactgtggataaccaaatataagatttgtgatttttaatgcttcatttgtgtaaaatcatttgtatattctatttatagtatgcattttctagctcattaaaagtacagaaaaacctcaaatctgtccttatacaaa

SEQ ID NO: 71793 - DNA, 492 bp, Homo Sapiens
tgtgtttggtcatgtggtacttgagggatgcccgctgcctgcactggaacccacagacctcacacctgggggacagaggcagataagaaggtgcgagggccacagccctggggggggtcctgactcacacttactgcaaaggcttggctcccgaatgtcgcatttggtggacgagaaggtgcttccgctgcttgaaggtttgtccacattcgtcacagatatagttccgcacctctgagaggggagagtccagtgagtccaggcccctgatgctccaacctcccggggggacgacgatgacaatgtgaaaccatcacagctgggaagacatttctgcacatggttcaccatgcagtgggcccaagcaaggggcctatgagggcctcgtttattaagatctttaaactgctttatacactgtcacgtggcttcatcagctgtgtgcatttcaggatggtttttaaagaaacctcagaaagctatttccttaaa

SEQ ID NO: 71794 - DNA, 2060 bp, Homo Sapiens
ctgccccgggaactgcagaagctacaagaaggccggcagtttgccagcgactattggttttccttttcttcttctccttgatgggcctgctgtcgtcacatctgacctcaaatagcaccacagacctgccaaaggctttccacgtttgtgcagcaatcctcgagtgtttagagaagaggaagatatcctggctggcactctttcagttgacagagagtggtaagaaacacgctgctgaggcacaaatgcggagggccgctcttttcagaggcatcttgcaaatggttaagaacgagccctccttgaggttccttgctaagtaagtttataagctccattttagttgggacagattaagcacaaacttgtttaaagcaataagataatttactggctcactggtcaaccccaggaccaatgggcctatcatggggactgcctctctctgcaccacacccaccctcctgcaagaggtcgacccccccatcctctcccagctgctgacaggtacctgggtatcctcagctcaggctgttcgccccacactatccccacagccaggcctcccagggtacacgtcccgacccccaggggtgtccccagcactgataataggcagagatgtccagagttgcctgagccacttcttggtgttgcagacctcaggctggggcggctcctcctccgtgtggccccggatcagcacaccaggctgctgcctttcgctttttacaggtacctccacccacagggctggtcagggctgggcagtgtttcccagacccccatctcagcacctctgggtcccgccagatgggaagggttgcctgtgcctctgctccacagatgagcagtatcccttggcatcacctgctacctttccagcagtctgtagccatttgtcactatgtctttacctctagtcttctctcctacttccatgaagacgcggccatcagggaagaggccttcctgcatgttgctgtggacatgtacttgaagctggtccagctcttcgtggctggggatacaagcacagtttcacctccagctggcaggagcctggagctcaagggtcagggcaaccccgtggaactgataacaaaagctcgtctttttctgctgcagttaatacctcggtgcccgaaaaagagcttctcacacgtggcagagctgctggctgatcgtggggactgcgacccagaggtgagcgccgccctccagagcagacagcaggctgcccctgacgctgacctgtcccaggagcctcatctcttctgacgggacctgccactgcacaccagcccagctcccgtgtaaataatttattacaagcataacatggagctcttgttgcactaaaaagtggattacaaatctcctcgactgctttagtggggaaaggaatcaattatttatgaactgtccggccccaagtcactcagcgtttgcgggaaaataaaccactggtcccagagcagaggaaggctacttgagccggacaccaagcccgcctccagcaccaagggcgggcagcaccctccgaccctcccatgcgggtgcacacgaagggtgaggctgacacagccactgcggagtccaggctgctagaggtgctcatcctcactgccgtcctcaggtgggttcgggcttcaccgcctggccctctgtggtcacagaggggctcggtggcccaggtggtggttccgcctccaggggcagggccttgtcctgggtctgtgtcagcgggtgcaccatggacatgtgtacattgaggttgtgggccttctcaaaccgccggccacactggtcacaggcaaagtccagctcagtctcagccttgtgtttggtcatgtggtacttgagggatgcccgctgcctgcactggaacccacagacctcacactgcaaaggcttggctcccgaatgtcgcatttggtggacgagaaggtgcttccgctgcttgaaggtttgtccacattcgtcacagatatagttccgcacctctgtgtggatgagcttcacgtggcgctgcaggtagcggtcgatcatgaaaacct

SEQ ID NO: 71795 - DNA, 1945 bp, Homo Sapiens
  misc_feature (1491)..(1491): n is a, c, g, or t
  misc_feature (1493)..(1502): n is a, c, g, or t
  misc_feature (1723)..(1731): n is a, c, g, or t
ggctaggtacgaggctgggtgtgtgaatcggcacgaggcatggcggggtccaggtggaggtcttgaggctatcagatcggtatggcattggcgtccgggcccgcaaggcgggcgctagctggctccgggcagctcggccttgggggcttcggggccccgagacgcggggcgtatgagtggggcgtgcgctccacgcggaagtcggagcctcctcccctggatagggtgtacgagatccctggactggagcccatcacctttgcggggaagatgcacttcgtgccctggctggcgcggccgatctttccgccctgggaccgcggctacaaggacccaaggttctaccgctcgccccctcttcacgagcatccgctgtacaaagaccaggcctgctatatctttcaccaccgttgccgccttctcgagggtgtaaagcaggccctctggctcaccaagaccaagttaatagaaggccttcccgagaaagtgcttagccttgttgatgatccaaggaaccacatagagaaccaagacgagtgcgttctgaatgtgatctctcacgcccgtctctggcagaccactgaggaaatccccaagagagagacctactgcccggtcatcgtggacaacctaatacagctgtgtaaatctcagattctcaagcatccttctctggccaggaggatctgtgtccaaaactccacgttttctgctacctggaaccgagagtctcttctccttcaagtccgtggttctggtggagcccgactgagcactaaggatcctctgcccaccatcgcctccagagaggagattgaagctactaagaatcatgttctagagaccttctaccccatatcacccatcatcgatcttcatgaatgcaatatttatgatgtgaaaaatgacacaggattccaggaaggctatccttacccctatccccataccctgtacttactggacaaagccaatttacgaccacaccgccttcaaccagatcagctgcgggccaagatgatcctgtttgcttttggcagtgccctggctcaggcccggctcctctatgggaatgatgccaaggtcttggagcagcccgtggtggtgcagagcgtgggcacggatggacgtgtcttccatttcctagtgtttcaactgaataccacagacctggactctaacgagggtgtcaagaatttggcctgggtggactcagaccagctcctctatcagcatttttggtgtctcccagtgatcaaaaagagagtggttgtggaacctgttggcccagttggtttcaagccagagacattcagaaagtttttagctctatatttgcatggtgctgcgtgagcggaggacccctctgaatcctgaaacccctcttgcctctcttccacggaagagggcctgggccccgtggagcctcagtgcccgtttggcctgctgctctcgctgacaataaagagcccttgcgttgcactgacaccnannnnnnnnnngcagacaaatccccaagcaccccccattctaagggggggccgctctagactattccctcgaggggcccaagtttacggggacccaactttcttgggaaaagtgggtccctatagtgggtcgtattatagcctagggaactgggccggccgttttacaaccctccggattgggaaaactgcctacgtttggggatctttggggaaggaacccttacctcctnnnnnnnnnacataattgggaacaacttaccctacggaaattttaaaggctccaagggggaaaatataaaattttttaaggggaaaaaggggtaaaactaacccggatatgccttgcccgccttcgaacatttggccttcctgggggatggaccttttggaaaatttttctccccccgggagctaacggggtccccaaattgtcgcggggcactctctaaata

SEQ ID NO: 71796 - DNA, 1020 bp, Homo Sapiens
atgcgtctcaccgtaactgttcttgccgggtcggttccaacaagtgtttggcccatattgtaaccgggtctaatgcttccataatccgtatggatgggtagattccttctgatctggcctttgcccatcatatttgcatcataagatcgatgatggtgatatgggtaagaagtctctagaacatgattcttagtagcttcaatctcctctctggaggcgatggtgggcagaggatccttagtgctcagtcgggctccaccagaaccacggacttgaaggagaagagactctcggttccaggtagcagaaaacgtggagttttggacacagatcctcctggccagagaaggatgcttgagaatctgagatttacacagctgtattaggttgtccacgatgaccgggcagtaggtctctctcttggggatttcctcagtggtctgccagagacgggcgtgagagatcacattcagaacgcactcgtcttggttctctatgtggttccttggatcatcaacaaggctaagcactttctcgggaaggccttctattaacttggtcttggtgagccagagggcctgctttacaccctcgagaaggcggcaacggtggtgaaagatatagcaggcctggtctttgtacagcggatgctcgtgaagagggggcgagcggtagaaccttgggtccttgtagccgcggtcccagggcggaaagatcggccgcgccagccagggcacgaagtgcatcttccccgcaaaggtgatgggctccagtccagggatctcgtacaccctatccaggggaggaggctccgacttccgcgtggagcgcacgccccactcatacgccccgcgtctcggggccccgaagcccccaaggccgagctgcccggagccagctagcgcccgccttgcgggcccggacgccaatgccataccgatctgatagcctcaagacctccacctggaccccgccatgttgccgcctcgtgccgaattcgccacccaggcctcgctacct

SEQ ID NO: 71797 - DNA, 989 bp, Homo Sapiens
  misc_feature (74)..(297): n is a, c, g, or t
agttcacagatctagtaagttaccctcagtttgttttaaaaagtgaacaaagtccatgtaaacatgttcccagnnnnnnnnnnnnnnnnnnnnnnnnnnnnnnnnnnnnnnnnnnnnnnnnnnnnnnnnnnnnnnnnnnnnnnnnnnnnnnnnnnnnnnnnnnnnnnnnnnnnnnnnnnnnnnnnnnnnnnnnnnnnnnnnnnnnnnnnnnnnnnnnnnnnnnnnnnnnnnnnnnnnnnnnnnnnnnnnnnnnnnnnnnnnnnnnnnnnnnnnnnnnnnnnnnnnnnnnnnnnnnnnggacgtagccccatttctcttcccgggacaggtcctctgatagtcgggtaggttctcaatcaagcctctcattagttatttggtctgtcaatccatttcattcctgcagtcttccgccccgccctcttgagctcgcccctgataggctggcgcgtccgtcacttcaaaaaggtccgcattccttccgcctttctccaggacaccgagggcgaggagggtggtaccaagcggcgcccaccctcagagcactacttccatctctgattggcttcgctgggtgcccgtcgctactccactcgccgctgataggccattcaaccgccgctctgcgcggcgccggctccgcccccgtcgggtgtttgtggtggggctgcggagtcgccgatcccgccggaagcgccaggacaatggggacccgggacgacgagtacgactacctattcaaaggtgcggccggtggggcacagacgggcgaagtcgtggcggcgaggcggcgggcagacgggccaaggccgcgctccaggccgctgggcccaggccggagcccggggcttggggcccggcgggtcaggcagccgggaaggccggagccgaccgggcagcatcagcttcgggctaggatgcgcggctatacggagccggaggcccggagagaccctcgtgccgattcgccacccaggcctcgctacctt

SEQ ID NO: 71798 - DNA, 320 bp, Homo Sapiens
ccctctcccctcccctctcctgcacgcaacgcgccctctcggccctccctgtccccctcctctgtctcgtctccccatctggtctggaacctgtttgcaagtgaagcaatatctccgtgttttgtatatacaaccgctcttgtagcctttggtttttgttaatgtagagaaacacagattctttatacactttgtaagatttacgccaaaccccagctctcgatctcttcttctccctgtggcccctgcgctgttgccccgtccccgtcaccccgcccgttactgaaatgtataatctgacttcctgtacagaaaaaaaa

SEQ ID NO: 71799 - DNA, 883 bp, Homo Sapiens
cacacagaacaagaatatacggctaggtagcgaggctgggtggtgaattcggcacgaggggacaatggggacccgggacgacgagtacgactacctattcaaagtggtgctcatcggggactcaggcgtgggcaagagcaacctgctgtcgcgcttcacccgcaacgagttcaacctggagagcaagagcaccatcggcgtggagttcgccacccgcagcatccaggtggacggcaagaccatcaaggcgcagatctgggacaccgctggccaggagcgctaccgcgccatcacctccgcgtactaccgtggtgcagtgggcgccctgctggtgtacgacatcgccaagcacctgacctatgagaacgtggagcgctggctgaaggagctgcgggaccacgcagacagcaacatcgtcatcatgctggtgggcaacaagagtgacctgcgccacctgcgggctgtgcccactgacgaggcccgcgccttcgcagaaaagaacaacttgtccttcatcgagacctcagccttggattccactaacgtagaggaagcattcaagaacatcctcacagagatctaccgcatcgtgtcacagaaacagatcgcagaccgcgctgcccacgacgagtccccggggaacaacgtggtggacactcagcgtgccgcccaccacggactggacagaaacccaacaagctgcagtgctgccagaacctgtgaccccggcgcctcaccagcgtggtgccgtccccgggcggcccggccagggatcactggccctcctgagggcctcggtggcggctagcaagccacaggagatgaaggcgggcgtgcacgagagagagacatgaccagcgcggggaaaaccgagggggccagc

SEQ ID NO: 71800 - DNA, 1621 bp, Homo Sapiens
  misc_feature (1325)..(1393): n is a, c, g, or t
aagcaggctggtacggtcggattccgggatatcgtcgacccacgcgtcggcggtccgccccgtcgggtgtttgtggtggggctgcggagtcgccgatcccgccggaagcgccaggacaatggggacccgggacgacgagtacgactacctattcaaagtggtgctcatcggggactcaggcgtgggcaagagcaacctgctgtcgcgcttcacccgcaacgagttcaacctggagagcaagagcaccatcggcgtggagttcgccacccgcagcatccaggtggacggcaagaccatcaaggcgcagatctgggacaccgctggccaggagcgctaccgcgccatcacctccgcgtactaccgtggtgcagtgggcgccctgctggtgtacgacatcgccaagcacctgacctatgagaacgtggagcgctggctgaaggagctgcgggaccacgcagacagcaacatcgtcatcatgctggtgggcaacaagagtgacctgcgccacctgcgggctgtgcccactgacgaggcccgcgccttcgcagaaaagaacaacttgtccttcatcgagacctcagccttggattccactaacgtagaggaagcattcaagaacatcctcacagagatctaccgcatcgtgtcacagaaacagatcgcagaccgcgctgcccacgacgagtccccggggaacaacgtggtggacatcagcgtgccgcccaccacggacggacagaagcccaacaagctgcagtgctgccagaacctgtgacccctgcgcctccacccagcgtgcgtgcacgtcctccgcccgcccccgccacggtatcctctggcccctccctgctgtccctctgtggccggctcgttccagccctcccagtgagctctgcacggccgggccggggcccaggaaggacaggagccagtgctaccccgtcctgcccggggaaaagctagaagccccggtttgctgcacccatgaaactcgggtccccacagcgtcttggcggggtggggagggcggcaggatggacggggctggccagaggcgaggaggacgggcggacggcgccgccttctccccttttccttggccgactctagggagcgattgcctccctccctctgtgaccgggtggcccagccagcccgtcgtccccacccagaaccgtgctctgggccaaagcccgaagaaccaggcagcgggggccggggcaggcggaccccccgggctctcagcgcccacccgctcctccgcacacagcagctcgcacaggcctcccacctctgcctgttgattgatgcagggagaagcccgnnnnnnnnnnnnnnnnnnnnnnnnnnnnnnnnnnnnnnnnnnnnnnnnnnnnnnnnnnnnnnnnnnnnntcctctgtctcgtctccccatctggtctggaacctgtttgcaagtgaagcaatatctccgtgttttgtatatacaaccgctcttgtagcctttggtttttgttaatgtagagaaacacagattctttatacactttgtaagatttacgccaaaccccagctctcgatctcttcttctccctgtggcccctgcgctgttgccccgtccccgtcaccccgcccgttactg

SEQ ID NO: 71801 - DNA, 475 bp, Homo Sapiens
gcacgaggcggccttttattaaattctccagtagtagttgaaataaaaatctaccctaatttctatgaaatgatctatttatatcactgacttttctttttctctgattctatatttcatttaacaatctgcagactttcaccccatttcccagatgggaaaaccctagccccctcgtatctctgagaagttgctcagagtaggacacagagaaatatggcccccaccctgggaagtactgctgtcactgtttaagtgtatttcagttctgttactccaattcatacacacagtcttccatgaggatggtaggatgaacctggttagctggctttggataagtagatcagcatgactacctggaataaaagtgactgactctaggataaaaattaaaaaaagattctttcacagcaacgagtctttgcaaaacctctctcctaataatcacaaaccaggggaagaaaagtgggag

SEQ ID NO: 71802 - DNA, 661 bp, Homo Sapiens
  misc_feature (288)..(296): n is a, c, g, or t
aaatcactcaaaggactgtgaggaaaggctgtggtacctgaccttgttgaaatcaaggcccggcactgtactacaggcctgtttacagattattacggtgaactgaatgggtaccgaggcttcacccaaagaggtacttttttgttgttgttgttgttttaggaataattgtaccaattttaagagcatttttcccccactgtccccacacaccccaaacaaaatgtggtggtgttgccttcaaaaaagagaagttttgtgtcattaacatgacagaagaactttttnnnnnnnnntaactgtcaactattctatttgcatttaggagactgttcatctatgctagattgtcattttccctccttctcccacagaagtttactggtagtccatgtcatggctcgtagctatccctctaaccataccatggaaatgcaggcacccaatgtgaaaaggagcacttgctgggcatcactgacaccgctcatgttttacacatagttgagtaatcagcatatctagaattatcttgcattgcctaaatcatatgtatatagtgaatgttatataatatacctggcaggtctgttttaatttaattgaataaagatacaaatactttgtttggctggcatatattaaattattatatgaaaaaaaa

SEQ ID NO: 71803 - DNA, 1597 bp, Homo Sapiens
  misc_feature (81)..(115): n is a, c, g, or t
  misc_feature (1300)..(1301): n is a, c, g, or t
  misc_feature (1304)..(1334): n is a, c, g, or t
  misc_feature (1526)..(1535): n is a, c, g, or t
tggcggctgcttcttttcaagcccgcagaccgaaccccggaggacggcaaagcgaaagtcagtgagcgaggaagcggccgnnnnnnnnnnnnnnnnnnnnnnnnnnnnnnnnnnncagtcgacggtaccggacatatgcccgggaattcggccattacggccgggggatgccagaacgcgctctcagcttcgggtcctgcggctgcggctgccgccatcatggtgcggaagcttaagttccacgagcagaagctgctgaagcaggtggacttcctgaactgggaggtcaccgaccacaacctgcacgagctgcgcgtgctgcggcgttaccggctgcagcggcgggaggactacacgcgctacaaccagctgagccgtgccgtgcgtgagctggcgcggcgcctgcgcgacctgcccgaacgcgaccagttccgcgtgcgcgcttcggccgcgctgctggacaagctgtatgctctcggcttggtgcccacgcgcggttcgctggagctctgcgacttcgtcacggcctcgtccttctgccgccgccgcctccccaccgtgctcctcaagctgcgcatggcgcagcaccttcaggctgccgtggcctttgtggagcaagggcacgtacgcgtgggccctgacgtggttaccgaccccgccttccttgtcacgcgcagcatggaggactttgtcacttgggtggactcgtccaagatcaagcggcacgtgctagagtacaatgaggagcgcgatgacttcgatctggaagcctagcggatctcccactttgcatggctgtcttttacagatgggaaaactgaggcctgatgctggagattctatgagggtgctctcctcaagggtatcagacggtcgtaggttcttaagaatttgattcatcagtggcaggccatgcatagagccacgggaggtgcgtccttgttttccaggaaatgttcttagaacttggactactgattattaattgactgtgccttgggaaacagtgggaagtaacttggtgcagcactggggtattgttggcttcttgtgttggaaactttgtaatgtaaaaggaaaaactggaaatccccacgccctgtttccctttatcgtcttgtggttggactggttcaattcgtttaactcgaattcttgctcctggccgtggttaagctgtgtacagatgatggagagtttggcctcaagtttttataaactgagcgagactagtgttcaggatctcctcccttgtttaaatgtcaataaatgccccaactgctttgtaagtgcaaaaaannaannnnnnnnnnnnnnnnnnnnnnnnnnnnnnnaaaaagggcggccgctctagagtatccctcgaggggcccaagcttacgcgtaccccgctttcttggtacaagtgggcccctatagtggagtcgtattattaagctaggcacctgggccgtcgtttttaccaactccgtgactggggaaacgtgttaactttggggacctttgtgaaagaaaccttacttccnnnnnnnnnnacataattgggacaaacttccctaccgagattttaaagcttcctaagggaaatttaaaaatt

SEQ ID NO: 71804 - DNA, 1019 bp, Homo Sapiens
  misc_feature (31)..(31): n is a, c, g, or t
  misc_feature (70)..(70): n is a, c, g, or t
  misc_feature (127)..(128): n is a, c, g, or t
  misc_feature (131)..(131): n is a, c, g, or t
  misc_feature (152)..(152): n is a, c, g, or t
  misc_feature (164)..(164): n is a, c, g, or t
  misc_feature (187)..(187): n is a, c, g, or t
  misc_feature (293)..(293): n is a, c, g, or t
caccggaacgttgactgtcgattatagatcnttagatttgcctcggccagatcgcacgagagttaggttntgagtgcattgtcgatttcccgagccgcgagagcggtagacccgcgatccgcccacnntcnggacggatggagcgccttgcngcaagcccgcgntttagcggtccaccgcgtgtacngacagcgcccttttcctcgcagcgcccgcgatcaccagcttgtcccttctgcggagagcgatccgcttcccgacaccatgtctgcgctcagcagatccacattccnccggagctgccggacatcctgaagcaattcaccaaggctgccatccgcacccagccggccgacgtgctgcggtggtccgcgggctatttttcagctctgtcgagaggagatccacttcctgtaaaggacagaatggaaatgcccacggcaacccagaaaacagacacaggcctgactcaaggactcctgaaagttttgcacaagcagtgtcaccacaagcggtatgtggaattaacagatcttgagcagaagtggaagaacttgtgcctgccgaaggaaaaattcaaagcgctcttacaactggatccttgtgaaaacaaaatcaagtggataaactttttagcgcttggatgcagcatgcttggtgggtccttgaacactgcgctgaagcacctgtgcgagatcctcacggacgatccggagggcgggcccgctcgcatccccttcaagacgttttcctacgtttaccgctacttggccagattagactcagatgtgtctcccttggagacggaatcctaccttgcctctctaaaggaaaatatagacgccaggaagaacggcatgataggtctttcagatttcttctttccaaagaggaaacttttagaaagcattgaaaactctgaagatgtaggccattaatacagagaagaatacattttaatgtcaaaatagtgctctttaaaattctggcaccaaatacaacttaccctgaatcacaaa

SEQ ID NO: 71805 - DNA, 715 bp, Homo Sapiens
cttattatggcagagagtggggattggtcctactttctttctctggaaaggaaagcctccaagactccatgtgcttgggcagcttgagaaggcgttcagcaccacgcctagcaggcagaccttgaagcctcacctttagtctatctgcagaggtattcagttcctggcacaggggactaggggcatgtagagtatatgaggaggcagtatggctgtgcaggagccttcatttcagcttcaattaatagggaagaatttatgatagctctatagatgctgaaaaggtatttcgtaagatttaaaatccatcccttattaaaactcttagtaaattaagtctggaaagaaacaccctaatctagataaaggtctgtttcagaaaccaacagtgatggcattctaaagagtcagacgccacaggcattcccattaaagtcagaaactagccaagggcaagctattattcagcagtgtcccggcactactaacccctgcaacaagccagatgaggaacataaggaagaattataattgtcattatttgtagacaataaaactgcctacctgtaaaacctaagaatcaactgaagacctgttaagagtattctgtaagtcaacccaatgatacacatcatgttcctgtccacatactggttttccccaaatcagctgataaattcagtgtaattccaatgagattgaaactttggaattg

SEQ ID NO: 71806 - DNA, 754 bp, Homo Sapiens
  misc_feature (45)..(45): n is a, c, g, or t
  misc_feature (565)..(601): n is a, c, g, or t
cgagcccaaggagtggggcggccccggagcgaggctcacactccntgccctgcagatgactgtccacaacctgtacctgtttgaccggaatggagtgtgtctgcactacagcgaatggcaccgcaagaagcaagcagggattcccaaggaggaggagtataagctgatgtacgggatgctcttctctatccgctcgtttgtcagcaagatgtccccgctagacatgaaggatggcttcctggccttccaaactagccgttacaaactccattactacgagacgcccactgggatcaaagttgtcatgaatactgacttgggcgtgggacccatccgagatgtgctgcaccacatctacagtgcgctgtatgtggagctggtggtgaagaatcccctgtgcccgctgggccaaactgtgcaaagtgagctctttcgctcccgactggactcctatgttcgctctctgcccttcttctccgcccgggctggctgaagcaacctacctcaagtctcaggagaattcatgtctgcctggggcccttccgaacctgtgccaactaagggnnnnnnnnnnnnnnnnnnnnnnnnnnnnnnnnnnnnnagagcaacagcctaaaggcctgccctgatgctctcctcctaccagagtgaagcccacagagtccctccacctccacaccaggccctctctccagttttatcccctgcctaatgctgcgagaagcacagaataaactttttgtcactctcaaaa

SEQ ID NO: 71807 - DNA, 811 bp, Homo Sapiens
  misc_feature (747)..(766): n is a, c, g, or t
gctccgtggaaaccggaagtaactcttgacgggcactcggagcagttccgatgactgtccacaacctgtacctgtttgaccggaatggagtgtgtctgcactacagcgaatggcaccgcaagaagcaagcagggtttcccaaggagggaggagtataagctgatgtacgggatgctcttctctatccgctcgtttgtcagcaagatgtccccgctagacatgaaggatggcttcctggccttccaaactagccgttacaaactccattactacgagacgcccactgggatcaaagttgtcatgaatactgacttgggcgtgggacccatccgagatgtgctgcaccacatctacagtgcgctgtatgtggagctggtggtgaagaatcccctgtgcccgctgggccaaactgtgcaaagtgagctctttcgctcccgactggactcctatgttcgctctctgcccttcttctccgcccgggctggctgaagcaacctacctcaagtctcaggagaattcatgtctgcctggggcccttccgaacctgtgccaactaagggccgccactgtaagcccccgcacccccaccccctgcccagagcaacagcctaaaggcctgccctgatgctctcctcctaccagagtgaagcccacagagtccctccacctccacaccaggccctctctccagttttatcccctgcctaatgctgcgagaagcacagaataaactttttgtcactctcnnnnnnnnnnnnnnnnnnnnccctcgtgcggaattcgccacccaggcctcgcttcttggggtgtt

SEQ ID NO: 71808 - DNA, 837 bp, Homo Sapiens
ggggagttccggtgagtccgtgggtggggtccccacctggttggaaggctgtgggtccgggaacccgagcccaaggagtgggggcggccccggagcgaggctcacactccctgccctgcagatgactgtccacaacctgtacctgtttgaccggaatggagtgtgtctgcactacagcgaatggcaccgcaagaagcaagcagggattcccaaggaggaggagtataagctgatgtacgggatgctcttctctatccgctcgtttgtcagcaagatgtccccgctagacatgaaggatggcttcctggccttccaaactagccgttacaaactccattactacgagacgcccactgggatcaaagttgtcatgaatactgacttgggcgtgggacccatccgagatgtgctgcaccacatctacagtgcgctgtatgtggagctggtggtgaagaatcccctgtgcccgctgggccaaactgtgcaaagtgagctctttcgctcccgactggactcctatgttcgctctctgcccttcttctccgcccgggctggctgaagcaacctacctcaagtctcaggagaattcatgtctgcctggggcccttccgaacctgtgccaactaaagggcccccactgtaaggccccggaaccccaccccctgcccagagcaacagccctaagggcctgcccctaatgcttttcctcctaccaaaagtggagccccacgaaggtccctccaccttccaaaccaaggcccctctctcccagttttatccccctgggcttaatgcgtgcggagaaacccccaaattaaacttttttggcccctcccc

SEQ ID NO: 71809 - DNA, 480 bp, Homo Sapiens
tctattttaattacacataatatgtaattaaagtacaacataatatgttgtttctctgtggcccgttgagcatatgagtaagtcacatttctattaggactacttacaaggacaaggtttccatttttccagttgtaaaattggaaccatcagctgataacctcgtagggagcaaccccaggatagctaagtgttatgtaatatgcctagaaggtgatgtgaatgcgattcagaagcatagccactcccattttatgagctactcacatgacaaatgtcatcttttgctataacctttgccaagttagagaaaagatggatttaatgagataaatgaaaagatatttaacctaatatatcaaggcactatttgctgttatgctttgttatttatttcccagcacttgttccttattgtagattttttaaaaactgtaaccttttactaactgtggtcttactaaaatttgtgcttgaaaa

SEQ ID NO: 71810 - DNA, 649 bp, Homo Sapiens
tacaatgaggtaccctgttgaatgaccctaaaccagcctccaaaatgtgcaggatcccacattggtcagcgccaaccctgagcacaggatctaaaactatagatgatatggccaccctggccacagctggaaccaagctggtggcccaagagagagcctcttcttggaattgcatgtcagtttctcatacgcagtttcttcctatttttcccatttcccgttttaaagctagtggcatacctcacagtcaaataaccaagtggtcagtgtctcgacaatgtgcagtaacgaggtgggggctgcaagggtgaggggctcagtcaccttaacaaggcaggagacctcccacaaaaggctgatgtgtcgtccccagggccagctggacaagggcatgcagcgcaggggtagggggatggaaatattttctctcccgtaaactctgacttcatgtgagcaggcatggggtctccctgagagctgataaccgggaaaaccaaaaccaataatattcctaataataatactagaatgtaagaataatcatgtgtttttcactgaccgctgttgctctgcttttgtctttatatacagtagtttttataacaatgtccctaggttttaataaaggagtgtcatgtcaactgttaaa

SEQ ID NO: 71811 - DNA, 2837 bp, Homo Sapiens
  misc_feature (1019)..(1019): n is a, c, g, or t
gcagttcttggtgcaccagtcagcggaatagagccagaaactgaaagaagccaacaagcagcagaacttcaacacagggatcaaggactttgacttctggctgtctgaggtggaggccctgctggcatccgaagattatggcaaagacctggcttctgtgaacaacctggctgaaaaagcatcaactgctggaagcagatatatctgcccatgaggatcgcctgaaggacctgaacagccaggcagacagcctgatgaccagcagtgccttcgacacctcccaagtaaaggacaagagggacaccatcaacgggcgcttccagaagatcaagagcatggcggcctcccggcgagccaagctgaatgaatcccatcgcctgcaccagttcttccgggacatggatgacgaggagtcctggatcaaggagaagaagctgctggtgggctcagaggactacggccgggacctaactggcgtgcagaacctgaggaagaagcacaagcggctggaagcagaactggctgcgcatgagccggctattcagggtgtcctggacactggcaagaagctgtccgatgacaacaccatcgggaaagaggagatccagcagcggctggcgcagtttgtggagcactggaaagagctgaagcagctggcagctgcccggggtcagcggctggaagagtccttggaatatcagcagtttgtagccaatgtggaagaggaagaagcctggatcaatgagaaaatgaccctggtggccagcgaagattatggcgacactcttgccgccatccagggcttactgaagaaacatgaagcttttgagacagacttcaccgtccacaaggatcgcgtgaatgatgtctgcaccaatggacaagacctcattaagaagaacaatcaccatgaggagaacatctcttcaaagatgaagggcctgaacgggaaagtgtcagacctggagaaagctgcagcccagagaaaggcgaagctggatgagaactcggcctttccnttcagttcaactggaaaggcggacgtggtgggagtcctggatcggtgaaaaggagaacagcttgaagacagatgattatggccgagacctgtcttctgtgcagacgctcctcaccaaacaggaaacttttgacgctgggctgcaggccttccagcaggaaggcattgccaacatcactgccctcaaagatcagcttctcgccgccaaacacgttcagtccaaggccatcgaggcccggcacgcctccctcatgaagaggtggagccagcttctggccaactcagccgcccgcaagaagaagcttctggaggctcagagtcacttccgcaaggtggaggacctcttcctgaccttcgccaaaaaggcttctgccttcaacagctggtttgaaaatgcagaggaggacttaacagaccccgtgcgctgcaactccttggaagaaatcaaagctttgcgcgaggcccacgacgccttccgctcctccctcagctctgcccaggctgacttcaaccagctggccgagctggaccgccagatcaagagcttccgcgtagcctccaacccctacacctggtttaccatggaggccctggaggagacctggaggaacctacagaaaatcatcaaggagagggagctggagctgcagaaggaacagcggcggcaggaggagaacgacaagctgcgccaggagtttgcccagcacgccaacgccttccaccagtggatccaagagaccaggacatacctcctcgatgggtcctgtatggtggaagagtcggggaccctcgaatcccagcttgaagctaccaaacgcaagcaccaggaaatccgagccatgagaagtcagctcaaaaagatcgaggacctgggggccgccatggaggaggccctcatcctggacaacaagtacacggagcacagcaccgtgggcctcgcccagcagtgggaccagctggaccagctgggcatgcgcatgcagcacaacctggagcagcagatccaggccaggaacacaacaggtgtgactgaggaggcccctcaagaattcagcatgatgtttaaacactttgacaaggacaagtctggcaggctgaaccatcaggagttcaaatcttgcctgcgctccctgggctatgacctgcccatggtggaggaaggggaacctgaccctgagttcgaggcaatcctggacacggtggatccgaacagagatggccatgtctccttgcaagaatacatggctttcatgatcagccgcgaaactgagaacgtcaagtccagcgaggagattgagagcgccttccgggccctcagctcagagggaaagccttacgtgaccaaggaggagctctaccagaacctgacccgggaacaagccgactactgcgtctcccacatgaagccctacgtggacggcaagggccgcgagctccccaccgcgttcgactacgtggagttcacccgctcgcttttcgtgaactgagccactccctgggtcacccacccctcgctgcttgccctgcgtcgccttgctgcatgtccgctcctctgtgtgctctcactttccactgtaaccttaagcctgcttagcttggaataagacttaggagaaaatggtgcttcactaacccgcttccggtccagtcacaatcatcatgtcactgtggggacccagatctgtgtcttgaagcagctgccctcattccgacttcagaaaatcgaagcagctggctcctccccttgttctctctcccaccctcccccaaatctgttttcatgtaaaagacaaataaatgatgacttcccccaaaaaaa

SEQ ID NO: 71812 - DNA, 919 bp, Homo Sapiens
catcctggccttgggagcaagacgagtgggctcagccctggcccacaccaaggcagcagcttcccatctctaaaacgggagaaatgctccctgccatccctcgatccctggggcccattaggtaaagatggccagttgcagttaggtttggtttccttaaaaggaatgtgaggttgccaggcattgctctctctgagagaaggttcattctgagctctcagccagctgggagcaggcccctttcctcactgtccttccacgtttaggtcctgtatggtggaagagtcggggaccctcgaatcccagcttgaagctaccgaacgcaagcaccaggaaatccgagccatgagaagtcagctcaaaaagatcgaggacctgggggccgccatggaggaggccctcatcctggacaacaagtacacggagcacagcaccgtgggcctcgcccagcagtgggaccagctggaccagctgggcatgcgcatgcagcacaacctggagcagcagatccaggccaggaacacaacaggtgtgactgaggaggccctcaaagaattcagcatgatgtttaaacactttgacaaggacaagtctggcaggctgaaccatcaggagttcaaatcttgcctgcgctccctgggctatgacctgcccatggtggaggaaggggaacctgaccctgagttcgaggcaatcctggacacggtggatccgaacagagatggccatgtctccttgcaagaatacatggcctttcatgatcagccgcgaaacttgagaaccgtcaagtccagccaaggaaattgaagagcgcccttccgggcccctcaacctcagaggggaaaagcctttacgttgaccccagggagggagcttcttaccagaaacctgtaccccggggaaccaagcccgaactaaa

SEQ ID NO: 71813 - DNA, 1602 bp, Homo Sapiens
aaaggctaggtacgaggcctgggctgttgaattcggcacgaggccgagggcggctgcgacgcgccgagaggccgcggctctcccacctgtcaccctggcccttctctgcttggatggtgtcttcctctcctcagccgagaatgacttcgtccaccggatccaggaggaactggaccgctttctgctgcagaagcagctgtcaaaggttcttcttttccccccactctccagtcgcctccggtacctgatccatagaacagcagagaattttgatctcttgagcagcttctccgttggggagggctggaagaggaggacggtcatctgtcaccaggacatcagggtacccagttcggatggcctctctggcccctgccgcgctcctgcctcctgccccagcaggtaccacggtcctcggcccatctccaaccaaggagcagctgcggttccccgaggtgcccgggctggccggtggtatcgtggacgcaagcctgaccagcctttgtatgtgccccgggtgctgcgcaagcaggaagaatgggggctgacctctacctcggtgctcaagagagaggccccagctggcagggacccagaagagcctggagatgttggtgctggagaccccaactctgatcagggactccctgtgctgatgactcagggaacagaggacctaaagggcccaggacaaaggtgtgagaatgagccactgctggaccctgttggcctgagcctctggggcctgagagtcagtcaggcaagggagacatggtggagatggccacacggtttgggtccaccctgcagctagacctggaacacaggggaaggagagtctgctggagaagaggctggtggcagaggaggaagaggacgaagaggaggtggaagaggatggccccagcagctactcggaggacgattaacagtgagctgctgcaggagatcacagacaacctgacgaagaaggagattcagatagagaagatccatttggacacatcctccttcgtggaggagctgcctggagagaaggaccttgcccacgtggtagagatctatgactttgaaccagcgctcaagacggaggacctgctggcaacgttttctgagttccaagagaaggggttcaggattcagtgggtggatgatactcacgcactcggcatctttccctgccgggcctcagctgcggaagccctgacccgggagttctcggtgctcaagatccggcccctcacgcagggaaccaagcagtcaaagctcaaagccttgcagaggccaaaactcctgcgtctggtgaaggagaggccacagacaaatgcgactgtggcccggcggctggtggcccgggccctgggactccaacacaaaaagaaagagcggcctgctgtccggggtccgctgccgccctgaggcctggagacccaactggcctggatctgcgtcccgacgtagctggcgcccccaacaccataagccttcacagacgccagagcagccccgcaccaccctcgagcttcaccatggggtgtggtgggctttagtttagtcccagaaatggagaaaaaataaaaactcacgttgttctaatgtgaa

SEQ ID NO: 71814 - DNA, 1235 bp, Homo Sapiens
  misc_feature (111)..(156): n is a, c, g, or t
attgttctgctttttctgtagttcaatttcatgtttcttgacccttttgtataaagctgcaatattctctcttattgttctttcatatggaatgtattttcaaatgtaaannnnnnnnnnnnnnnnnnnnnnnnnnnnnnnnnnnnnnnnnnnnnnagaattggaggatttgccattgtccaggaaagaaacttgcagctttaacctgctgggaatggcaaacgattttactagactttatgtttaaaaataaataaataagggaaattcctaactttgccctccaaagtctaactttggttttcttgttaactggttaaagtgacagtatcttttttccttatctattctattcaaaatgacctttgatagaaatgttggcatttagtagaaatagtgataagttgaggaaagaaataatacaaattggctttcaagtgagacccaaaggaagaactggataaaatcttccaaatccaaaagcatgagatttttctatccaaatatgcaaaaatgacccaagagaactttcttattttgctactgagtcacacaagggaagtggaaggaagaacagttaatttaagaatgaaactataaatcctgatgcctgggggtcaagtattttaagataagagggggaaaaacacataaagtcaaacaaatgttttaaaaattcataacagcaaccttgaaaaaatagacttaaatgaatgcttctagaaacttccagcggctcacaaagaataagcctgccttagggctggcaacatctaagcctctaacagcacagggaagcaaatatcttaccaggcagcctatgaattaacccaaagaagctttggttggttttggtggatttttatcatgccatgttggacatgagattttttagatcttccttcccacattgctagacgtctcactcaaagacatttgttgggagtcacatttgcatcatagacgagacagtccattcatcttagttaaattggattgagaatgccttttgtttccaggaaaatattgatcaccatgaaagaagaatagttttttgtccccagagacattcatttagttgatataatcctaccagaaggaaagcactaagaaacactcgtaagtcgtttcttaaaggcaacagacttaaagtggtcctcagccaaggaaaaatgatactgcaactttaaaatttaaagtatcttgcactgataaatattttcaaaaattatatg

SEQ ID NO: 71815 - DNA, 1122 bp, Homo Sapiens
  misc_feature (1013)..(1029): n is a, c, g, or t
  misc_feature (1031)..(1075): n is a, c, g, or t
ccgggatatcgtcgacccacgcgtccgatgttttaaaaattcataacagcaaccttgaaaaaatagacttaaatgaatgcttctagaaacttccagcggctcacaaagaataagcctgccttagggctggcaacatctaagcctctaacagcacagggaagcaaatatcttaccaggcagcctatgaattaacccaaagaagctttggttggttttggtggatttttatcatgccatgttggacatgagattttttagatcttccttcccacattgctagacgtctcactcaaagacatttgttgggagtcacatttgcatcatagacgagacagtccattcatcttagttaaattggattgagaatgccttttgtttccaggaaaatattgatcaccatgaaagaagaatagttttttgtccccagagacattcatttagttgatataatcctaccagaaggaaagcactaagaaacactcgtttgttgtttttaaaggcaacagacttaaagttgtcctcagccaaggaaaaatgatactgcaactttaaaatttaaagtatcttgcactgataaatatatttaaaaattatatgtttataaagttattaatttgtaaaggcagtgttacaaaatgttcagtttatattgttttagattgttttgtaatttttaaaggtgtaaaataacatattttttctttatggaaatctataaaactttctgtagtaaaatgttttcattttactggtatattattgcttcatgttttgtaccatcataagattttgtgcagattttttttacagaaattattattttctatgacaatatgacacttgtaaattgttgtttcaaaatgaacagcgaagccttaactttaaatgacatttgtattctcagacactgagtagcataaaaaccacatagaactgaactgtaacttaaattccaaactatgactactacattccaaagaaacagttgaattaaacattttcatataaatatnnnnnnnnnnnnnnnnngnnnnnnnnnnnnnnnnnnnnnnnnnnnnnnnnnnnnnnnnnnnnnacccagctttccatgtacaaagtgtcgctatagtgatcttaaagcat

SEQ ID NO: 71816 - DNA, 2301 bp, Homo Sapiens
  misc_feature (56)..(90): n is a, c, g, or t
  misc_feature (2008)..(2013): n is a, c, g, or t
  misc_feature (2015)..(2020): n is a, c, g, or t
  misc_feature (2022)..(2035): n is a, c, g, or t
  misc_feature (2159)..(2159): n is a, c, g, or t
ggggtacgctatagcgaacgacgagcgcaggaagtcagtgagcgaggaagcggcgnnnnnnnnnnnnnnnnnnnnnnnnnnnnnnnnnnncagtcgacggtaccggacatatgcccgggaattcggccattacggccggggagtggaggcaggcgctcgctgaggcaaaaggaggcgctcggcccgcggcctgacagggacttagcccgcagagatcgaccccgcgcgcgtgaccccacacccacccactcatccatctatccactccctgcgccgcctcctcccaccctgagcagagccgccgaggatgataaacacccaggacagtagtattttgcctttgagtaactgtccccagctccagtgctgcaggcacattgttccagggcctctgtggtgctcctgatgcccctcacccactgtcgaagatccccggtgggcgagggggcggcagggatccttctctctcagctctaatatataaggacgagaagctcactgtgacccaggacctccctgtgaatgatggaaaacctcacatcgtccacttccagtatgaggtcaccgaggtgaaggtctcttcttgggatgcagtcctgtccagccagagcctgtttgtagaaatcccagatggattattagctgatgggagcaaagaaggattgttagcactgctagagtttgctgaagagaagatgaaagtgaactatgtcttcatctgcttcaggaagggccgagaagacagagctccactcctgaagaccttcagcttcttgggctttgagattgtacgtccaggccatccctgtgtcccctctcggccagatgtgatgttcatggtttatcccctggaccagaacttgtccgatgaggactaatagtcatagaggatgctttacccaagagccacagtgggggaagaggggaagttaggcagccctgggacagacgagagggctcctcgctgtctagggaaggacactgaggggctcagggtgagggttgcctattgtgttctcggagttgactcgttgaaattgttttccataaagaacagtataaacatattattcacatgtaatcaccaatagtaaatgaagatgtttatgaactggcattagaagctttctaaactgcgctgtgtgatgtgttctatctagcctaggggaggacattgcctagagggggagggactgtctgggttcaggggcatggcctggagggctggtgggcagcactgtcaggctcaggtttccctgctgttggctttctgttttggttattaagacttgtgtattttctttctttgcttcctgtcaccccaggggctcctgagtataggcttttcagtccctgggcagtgtccttgagttgttttttgacactcttacctgggcttctctgtgtgcatttgcgtctggcctggagtaagcaggtccgacccctccttctttacagcttagtgttattctggcatttggttaagctggcttaatctgtttaatgttatcagtacattttaaataggggcattgaaatttactcccaccaccagggcttttttgggggatgcctgggcctttaaaacactagccaaactctaattaattctcaaatcactgccaggagttcttgctcctggctgcaggcccaggccccaaggtctccttcttggggtcacaaacagcagtaaggaagaggaatatatagcaactcagggcctgggaattgtggggcaatccgttcttagggactggatacttctggctggctgagtatagtactagctgcctccccaccaggttccgagtagtgtctgagactctgctctgcagggcctagggtagcgctgggagtgtagaagtggcctgcccttaactgttttcactaaacagctttttctaaggggagagcaagggggagagatctagattgggtgagggggacggggatgtcagggaggcaagtgtgttgtgttactgtgtcaataaactgatttaaagttgannnnnncnnnnnncnnnnnnnnnnnnnnaaaaaacctcgtgcccgattcttggcctcgagggccaattcctatagggagtcgtattaattcgtaccatgtcaaactgtttctgtgtgaattgttatcgtcacattcaacacatcgagcggancataatgtaagctggggggcgagaggggccaacccaatattggttggccacggcctgttcatcgggaacgggtgcagtgataagatcggaccgcggagagggtggtatgcgctcgtctccacgacaagccgggccgggtcgg

SEQ ID NO: 71817 - DNA, 1294 bp, Homo Sapiens
  misc_feature (233)..(316): n is a, c, g, or t
ttcaatcatgatttcttcaaattcagcttcacgtcaatggcgttcttgcaagtatccattttcccttccaggggggccatagtcacccctatcatatgttggagttcgccccatatggatctgttgctggtggacctcggctatctgatgtaggcatgccactgttagttgctggaggaaagaaagctgggttcacatgcggagctgtcggtggggcacctggaggtggtccnnnnnnnnnnnnnnnnnnnnnnnnnnnnnnnnnnnnnnnnnnnnnnnnnnnnnnnnnnnnnnnnnnnnnnnnnnnnnnnnnnnntggtccctgttgtggagtcggtgggccaggaggggggccgtagcctggaactggaggtggagggccaggaggaagtggacccaatggaggctgcccaaaaggttgtccaggaaaaagaactggtggtggagggcgatctcctcgattaggaggcccagctagaggaggaggcagaacctgaccaggaggtggaggacctggtggaccaggtgggcctggaggacctaagggtggacgtggtggagtctgtccagctggaaaaggtgggggtggccctcctggtcctgctggcccaggaaatctgtccccaccaggaacagcccctggaaaacggccccgtcctctaccaccttgtggaaatgctgcacgggaactgcctcctggaggaccagctttaccttccccagacatttgtcctgattgtgtagttttcctggactgcatttcaaattgactcaggaactgtttattgcatggagttacaacaggattctgaccatgaagttctcttttaggtaacagatccattaacttttttgaagatgcttcagatccaacaccaacaagggcaaacccctttgactggccatttgcccgattttcaaaaaattttatctccaaaatatcatttactcccaaagaatgaactgcttcagttaagtcttcatctgttgtccaccatgttagatttccaatatataatgcaattctctttccagtatatgtatagacaacatttggtgctgctcctttacccacatcatcaccaacagttggtgggagagtatccatgtaatctcggtcttctggggcatctccattatttgcagatggagatatgacatcgtcatacaaatctatctgatcatgcccaccatattcagcttcctggttgaactcttcgccgacatccgcgtaaatgtctatgtggtccacgccgtccgccatcttccttcagcctcggccgccgccgccgcc

SEQ ID NO: 71818 - DNA, 2991 bp, Homo Sapiens
  misc_feature (2361)..(2369): n is a, c, g, or t
  misc_feature (2979)..(2979): n is a, c, g, or t
cttgggtttcccggctgccgctgctgccgccgccgcctcgggtcgtggagccaggagcgacgtcaccgccatggcaggcatcaaagcttagattagtttgtcctttggaggagcaatcggactgatgttgttgatgcttggatgtgcccttccaatatacaacaaatactggcccctctttgttctatttttttacatcctttcacctattccatactgcatagcaagaagattagtggatgatacagatgctatgagtaacgcttgtaaggaacttgccatctttcttacaacgggcattgtcgtgtcagcttttggactccctattgtatttgccagagcacatctgattgagtggggagcttgtgcacttgttctcacaggaaacacagtcatctttgcaactatactaggctttttcttggtctttggaagcaatgacgacttcagctggcagcagtggtgaaaagaaattactgaactattgtcaaatggacttcctgtcatttgttggccattcacgcacacaggagatggggcagttaatgctgaatggtatagcaagcctcttgggggtattttaggtgctcccttctcacttttattgtaagcatactattttcacagagacttgctgaaggattaaaaggattttctcttttggaaaagcttgactgatttcacacttatctatagtatgctttttgtggtgtcctgctgaatttaaatatttatgtgtttttcctgttaggttgattttttttggaatcaatatgcaatgttaaacacttttttaatgtaatcatttgcattggttaggaattcagaattccgccggctctattactggtcaagtacatcttttctcttaaaattatttagcctccattattacaaaaaattataaaaataagttttcagtcagtcaggatgacatcactcccaatgttatgcagacatacagacggttggcatacgttatagactgtatactcagtgcaaatatagctgcatttatacctcagaggggccaagtgttaatgcccatgccctccgttaagggttgttggttttactggtagacagatgttttgtggattgaaaattattttatggaattgctacagaggagtgcttttcttctcaattgttagaagaatttatgttaaactttaaggtaagggtgtaaaaacatttttgagataaggtttttatttatgtttattattgttagagtgagttgcaatgtgggaagaaatgacattgaaattccagtttttgaatcctgtttctatttataagtgaaatttgtgatctcctatcaacctttcatgttttaccctgttaaaatggacatacatggaaccactactgatgagggacagttgtatgtttgcatcatatatgccagaaaaccttcctctgcttcctccttttgacttatttggtatgttgtatatattacataaaataacttttcaaatatagtttaataacacttagaagtgtttacttacctggaaaataattgctatgccgtacattcagagtgccccctcccctgcaaggccttgccatgattaacaagtaacttgttagtcttacagataattcatgcattaacagtttaagatttagaccatggtaatagtagttcttattctctaaggttatatcatatgtaatttaaaagtatttttaagacaagtttcctgtatacctctgaactgttttgattttgagttcatcatgatagatctgctgtttccttataaaaggcatttgttgtgtgagttaatgcaaagtagccaagtccagctatatagcagcttcagaaacatacctgaccaaaaaattcccagtaaccaggcatgatcaatttatagtggtcgtttacatctaaataattatcaggacttctttcaggagtgggttataaaaacattcaagttggtctgacagtatttcgttaaggatatttgtttgtatgtttattcagtatacttacataaaaattatttcgccatcagccaaaactcagtaatcatgacagctgtctgttgttttatgaagtttatttctcaagaaaatgggaataaatttgggatttgttcagcttttttactaaagatgcctaaagccacaggttttattgcctaacttaagccatgacttttagatatgagatgacgggaagcaggaccgaaatatccggccgtgtggctggagccttcccactggaggctgaaagtggcttgtggtattataatgttcagatttcaagaggaaggtgcaggtacacatgagttagagagctggtgagacagttgggaactctttgtgcttgtgatctactggacnnnnnnnnngcaggaagtgcattctctggtccttccctattttctgttctggatgtcagtgcagtgcactgctactgttttatccacttggccacagactttttctaacagctgcgtattatttctatatactaattgcattggcagcattgtgtctttgaccttgtatactagcttgacatagtgctgtctctgatttctaggctagttacttgagatatgaattttccatagaatatgcactgatacaacattaccattcttctatggaaagaaaacttttgatgatgaaacaataaagattttaaatatctattttagtttgtgggtgtttttgaaatgaaaatatatggcacactttcattctgaagtgcattaacattctaataaggtgatgtaaagcaagatgacattggtgtaatgttagagttgcagaagtttccattccaaaataaaatggaaaccatagttacagatattacaatgcagccctgtaattttgagctgtagtaaaaggattggtaatctgggaagtagaatttttacaaaatcttttacaaaaatagtcataaaaggttttgttgacatttaagactactactgatctaaaggcaaggtnctacttcttaaa

SEQ ID NO: 71819 - DNA, 1083 bp, Homo Sapiens
cgaccgcccgtttctacaacggatgacgtgggtatgactattctaaagtgtctcacagtgtctgtaaaatcacgaccaaagagcctgtcgctgagactgtctattaccagattcacttctgaattggccagaggaaatctgaatgtattatcctgtgtgtgtctaggtagagatattcggaacggctgccacggggatttcgaagtttgcaacctttataggcataactgatggcaatattaagacagacgcctgcttttgcaaataacttacaagactgtaaattccaaagatctgaatggggctttcctgatgttggtatctaaggcttaggcctatagattgatttacctttggaattgtgctccaaatgtctactgaagcttaaccgaagaactaataaatggactacagtagctcacgttacagggaaggagggtaggcagggaggctctgtgtgttaaaatgagggtctcactgctttaggattgaagtggctggaaagagtgatgcctggggaaggagatggagttatgagggtactgtggctggtactttctgtactaaacatttcctttttctattttaccactaattttgttttaaactgtgagccgtccaagtcagaagaagacagcaaaaaaagcaacttttccaacatacaatttacttttaataaagtatgaatatttcattttgagaacattccctggaattgccacataattcattaaaaacatttttttaagcaacacttggaacagtgtttactttaaatccttaatggccttaattaattctcagattcctgccccatcacttacagaaccaattcactttagagtgactaaaaggaaacgatagcctagctttctaaagccacgctgtgtccctcaattacagagggtaggaatgggtatacctctaactgtgcaaagcagagtgaaattcaattcatagaataacaactgctgggaatatccgtgccaggaaaagaaaaatttctggcaaatattttgtcactgctgtaaagcaaaatatttgtgaaagtgccaaaataaagtctgtcatgccaaaagtaaa

SEQ ID NO: 71820 - DNA, 1024 bp, Homo Sapiens
ctggacttcccatatgtagttcctcaaccctgttccgtgcttccgttcccaaacggtcaaaactttcggactgtaacgatggccctccaagggctgtccccacgaagaaggttaaagcttcgtccgcgaccaagtccctggagtatgggactgccctcagtgacctttggcagtgtccacctcctgtgatgtgttggactaatgcctggtggattcctaacgtaaccccacttatcgccttggtcaccaggtctcctatggagagatgattggctgtgacaacccctgattgttccattgagttggttccattttgcctgtcgtggtgcttgacaaaccaagccttcgggggatatggttttgcccacgctgctcccaagaatcggaagaagaaatagataacgggccttggacttccaacacacgtttgctgtccacatcccctgacttgggatacgtgggcagaggaatgcctgtgctggggccaaggggttcagggaggagtggatggcacagtgctgtcatcccttctcctcccctctccccactcccggtgctgaggctgcatcagaccctggtagggaggggtgccgcagccactaacggtatgtgctctccttcagccctctcccttcggagggacgtggtcttgcccactgtccttttgcctccatgctgaggtcggtgctgtatttcagagggagggtccttttcattctccttgctttgtatttaaggactggggcatagcatgggggcagtcccccagacctcttcattccccctcctgtggtgagggctaggtgtgatcaacacttttcttctccattcccttcctgcttttttcatggtgggggatccaccaggtcatctaggctctggccctagttgaaggggcaccccttcctctgtgccaagaggattcatcctgggagagggggcaaggtggaatgcagataactcacatgtaaaaggaacttgggtaggtaaataaaagctatacatgttgaaaaaaacctcgtgc

SEQ ID NO: 71821 - DNA, 1253 bp, Homo Sapiens
  misc_feature (62)..(113): n is a, c, g, or t
  misc_feature (117)..(151): n is a, c, g, or t
  misc_feature (1054)..(1119): n is a, c, g, or t
tccctcccctcgcataccctccactcctcctcgtacaccccctccctcttatagggcgctannnnnnnnnnnnnnnnnnnnnnnnnnnnnnnnnnnnnnnnnnnnnnnnnnnnccgnnnnnnnnnnnnnnnnnnnnnnnnnnnnnnnnnnncagtcgacggtaccggacatatgcccgggaattcggccattacggccgggggtagtacgaaatggcgtcgtggcattgaggggcatccctcctagaacctccaggaaaagctcgcggaagacgaggttctgcggagagagaggctccaagcagtctggcaagtgtagtccagttggcttaacagtagtttcgcttgggggggagccgaggttccgggaaggggctacgcccgcttgaaaagagattatgactgtaccttttaactttgtagctggaacacaagaagtgtttgtttaatgaatgacgtacacatttaagatctgtttggacgcggaggataatcctgtgaattgctaatagttcactgggtttggcccttagtgttgacttcagtatgctgagacggaaaccaacacgcctagagctaaagcttgatgacattgaagagtttgagaacattcgaaaggacctggagacccgtaagaaacagaaggaagatgtggaagttgtaggaggcagtgatggagaaggagccattgggcttagcagtgatcccaagagccgggaacaaatgatcaatgatcggattggttataaaccccaacccaagcccaataatcgttcatctcaatttggaagtcttgaattttagagatggattatcttgcatgccagagcgctggaatggaataaaatgatggcagaagtacaaaccagatttagagaattgagtgcttgcagtcaagcagaatgtacctcctgcagagacaaatcttctgcatgagattactgatgcttcacttgcactctaagctggaatccaaactctggtttgtctcttgaaaatttgactctataaaactgatctgattttctgtttttaaaaataaatatatttttggnnnnnnnnnnnnnnnnnnnnnnnnnnnnnnnnnnnnnnnnnnnnnnnnnnnnnnnnnnnnnnnnnnccctggcgcgccccctccgcccctcaaaagtttttcaaaaccttcctttggcggccgggccccaaaaggaagggaacctgggcataactgtttcccaagaaaacccgggcaagaataaggcttggaatcccccc

SEQ ID NO: 71822 - DNA, 1646 bp, Homo Sapiens
tgttttctaccccatgtttacctatggggcaaatctcaattggtaaaggaagtcagcatgtaattgaaaaatggcagacgaatgccttatgttttaaaacattatactcctttctatgcatctttccatagctattagagggaaaaaccaagagcatatccaggggatgggtaagacagtctatggtaagacagtctacagtcacagcacatgggaattgagacatgtttctgtgacttcctcttctttgcatgtttttcaccagtagaattactgcaagggcaaatatcatttactatttgacaaacaagaaaaatagaggcaaaacgagtattggaacaaaaatctttgtctgtgacaattgtgaagctttccagcaaagtggtagaggaaggcagctttttaaagggcttctcctaaatactttgggagacaatgacagaacatcacaaaattagagaaagcccagttagagggaccatctggatgtgtagaaaaagcagccacaaaaatatgttaatggcaataaaaatcctgccacataaatttgcatttaattgaaaaatcaaccttataaaatgtgaaaacctttgttgaattataaaattatttatattcccaagttttcttgaaaactgatcaaaccactccccaccatttcggtgttgaagaaatgaatctaagttctttggaatcttattctcaagaaacaaagggaactgcagccatgcaaaatgttttaacttttcaatctatatttttaccttttgggaaaaagagcagcaagaagttaaaaagagctgaccccaaaaatgtacaggtagataagcctccaagtagcagccaaagaaatattcagcatttcaaaagcttctttggaatttacaggtggtaagaaaatattttgggatttcttgatatccacaaggcaaagaatttgtattgaaaactttactttgttagggtaatgttttgagcctttacataatgctactttaactgaaaatctttgatgatacagtttctaaaagtgtaattattattgagttgtacatctctttttttacgtaggagacacagcggttcgagaagtttttgaagagactggtataaaatcagaattcaggtccgtcctgagtattcggcaacagcacacaaatcctggagcttttgggaagtcagatatgtatatcatctgccgcctaaagccatattcattcaccataaatttttgccaggaagaatgcttaagatgtgagtggatggatctcaatgacctggcgaagactgaaaatacaactcccatcaccagcagagttgctaggctgctgctgtatgggtacagagaagggtttgacaaaattgacctgactgtggaagaacttccagcagtttacacaggactgttttataaactctatcataaggaactgccagagaattataaaactatgaaaggaattgattaaattcacatttatatgtttagaaacatgtagactaacgaatgacataagaaatagtggacattttggattgattaaacatctgactgtgattttctaatgtatatgatttccatgaagaaattttgtttctaaacatgcacattttaaaagcctcttttcgaataaagcaaatgcgtg

SEQ ID NO: 71823 - DNA, 1729 bp, Homo Sapiens
gctagtaaggcctcgctttaatcggccgagggtgactcgtggtgctggctgccgctgttcaggcggccgggaacgggcggtggggagcgggcggagctggccctgcctctgcctggccggcgccgcagtcggcgcgggccgcgcccgccgccgccaactgccctgagcgcttgctgaggccgagggagacgtcggggcctgcacctggagggagcctgccgcgctggccccgaggagggggcgttgccatggcgacagcctctcccgctgctgacggggggcgggggcggccctgggaaggagggctggtctcctggccccccgcccctccccttactctcccctggacttggatgggcccgagttgggggcaacaccccgggcattggggctttccagctctcacagaaccttcagcatccccagctgccggtcttggcatcttcgaagtaaggagagttttagatgcttctggatgttcaatgctagcacctttacagactggagcagctcgattttcttcgtatttactttcaagagcaagaaaagtgctgggctcccacttattttctccctgtggtgttccggagttctgctccatatccaccagaaagctggcggcccacggctttggcgcatccatggcggcaatggtgtccttccctccccagaggtatcactactttttagtgctggactttgaggccacgtgcgacaagccacagattcatcctcaggaaatcatcgagttccccatcctaaagctaaatggccggaccatggagattgagtctacctttcacatgtatgtccagcctgtagtccatccacagcttaccccattctgtacagagctcaccgggattattcaagccatggtggatggtcagccaagcctgcagcaagtgctggagagggtcgatgaatggatggcgaaggaaggcctcttagatccaaacgtcaagtcaatttttgtcacctgtggagactgggacttaaaagtcatgctcccaggccagtgccagtacttgggcttgccagtggcggattacttcaagcagtggattaatctgaaaaaggcttacagcttcgccatgggctgctggcccaagaatggacttctagacatgaacaagggcctcagcctgcaacacataggccggccccacagcggcattgacgactgcaagaacattgccaacatcatgaagacactcgcctatcgaggcttcatcttcaagcagacatcgaagccgttctgattggccgaggacaggatggggcaggacagggtagctgtttggcccagcccagaatcctcctctccctcaccagaggggaagagggagagtggcatagctctgtgtccagagtgtccccagctgccctgtgggctcatgcccttggcgtgggcttgtgcccttgcaagggcttggccacttggcccttctggagcagacactttgtgccccccatccccacccctcaatctcagcccagtatcagcccctcccattgcgggcctgggctagggggacccaggcactcaccgcctcctccctggtacacaggcttctgtggggccaccaagcccctcctgtgccccctcccatccatagtgcatggtgtgtggtgcccccagggctccaggacagatcaggccccaccttgtgtctacccccatccccgctgtgaacgtgccactgaataaagtcggggaaacgagaaa

SEQ ID NO: 71824 - DNA, 2708 bp, Homo Sapiens
aaggtagcgaggcctgggtggcgaatccccacgagggggagcggcccctcagcggtccctaccgcctgaggccagggcccggggacttttattgtgacacggcgggcgcccggctctgcttagtcatggtgacctgcgcgcgctccgcgcctcccccacgcgcagcgatggaggcgccggggctcgggcggtggaggcggagccggagcgcggccatggcggggtccctgagtgccagaggtggtggtgttgcttatcttctggaaccccatgcagccagatcccaggcctagcggggctggggcctgctgccgattcctgcccctgcagtcacagtgccctgagggggcaggggacgcggtgatgtacgcctccactgagtgcaaggcggaggtgacgccctcccagcatggcaaccgcaccttcagctacaccctggaggatcataccaagcaggcctttggcatcatgaacgagctgcggctcagccagcagctgtgtgacgtcacactgcaggtcaagtaccaggatgcaccggccgcccagttcatggcccacaaggtggtgctggcctcatccagccctgtcttcaaggccatgttcaccaacgggctgcgggagcagggcatggaggtggtgtccattgagggtatccaccccaaggtcatggagcgcctcattgaattcgcctacacggcctccatctccatgggcgagaagtgtgtcctccacgtcatgaacggtgctgtcatgtaccagatcgacagcgttgtccgtgcctgcagtgacttcctggtgcagcagctggaccccagcaatgccatcggcatcgccaacttcgctgagcagattggctgtgtggagttgcaccagcgtgcccgggagtacatctacatgcattttggggaggtggccaagcaagaggagttcttcaacctgtcccactgccaactggtgaccctcatcagccgggacgacctgaacgtgcgctgcgagtccgaggtcttccacgcctgcatcaactgggtcaagtacgactgcgaacagcgacggttctacgtccaggcgctgctgcgggccgtgcgctgccactcgttgacgccgaacttcctgcagatgcagctgcagaagtgcgagatcctgcagtccgactcccgctgcaaggactacctggtcaagatcttcgaggagctcaccctgcacaagcccacgcaggtgatgccctgccgggcgcccaaggtgggccgcctgatctacaccgcgggcggctacttccgacagtcgctcagctacctggaggcttacaaccccagtgacggcacctggctccggttggcggacctgcaggtgccgcggagcggcctggccggctgcgtggtgggcgggctgttgtacgccgtgggcggcaggaacaactcgcccgacggcaacaccgactccagcgccctggactgttacaaccccatgaccaatcagtggtcgccctgcgcccccatgagcgtgccccgtaaccgcatcggggtgggggtcatcgatggccacatctatgccgtcggcggctcccacggctgcatccaccacaacagtgtggagaggtatgagccagagcgggatgagtggcacttggtggccccaatgctgacacgaaggatcggggtgggcgtggctgtcctcaatcgtctcctttatgccgtggggggctttgacgggacaaaccgccttaattcagctgagtgttactacccagagaggaacgagtggcgaatgatcacagcaatgaacaccatccgaagcggggcaggcgtctgcgtcctgcacaactgtatctatgctgctgggggctatgatggtcaggaccagctgaacagcgtggagcgctacgatgtggaaacagagacgtggactttcgtagcccccatgaagcaccggcgaagtgccctggggatcactgtccaccaggggagaatctacgtccttggaggctatgatggtcacacgttcctggacagtgtggagtgttacgacccagatacagacacctggagcgaggtgacccgaatgacatcgggccggagtggggtgggcgtggctgtcaccatggagccctgccggaagcagattgaccagcagaactgtacctgttgaggcacttttgtttcttgggcaaaaatacagtccaatggggagtatcattgtttttgtacaaaaaccgggactaaaagaaaagacagcactgcaaataacccatcttccgggaagggaggccaggatgcctcagtgttaaaatgacatctcaaaagaagtccaaagcgggaatcatgtgcccctcagcggagccccgggagtgtccaagacagcctggctgggaaagggggtgtggaaagagcaggcttccaggagagaggcccccaaaccctctggccgggtaataggcctgggtcccactcacccatgccggcagctgtcaccatgtgatttattcttggatacctgggagggggccaatgggggcctcagggggaggccccctctggaaatgtggttcccagggatgggcctgtacatagaagccaccggatggcacttccccaccggatggacagttattttgttgataagtaaccctgtaattttccaaggaaaataaagaacagactaactagtgtctttcaccctggctctgggctggaggcctgaaaccgggggcc

SEQ ID NO: 71825 - DNA, 1526 bp, Homo Sapiens
  misc_feature (97)..(475): n is a, c, g, or t
  misc_feature (494)..(521): n is a, c, g, or t
  misc_feature (755)..(1045): n is a, c, g, or t
  misc_feature (1084)..(1442): n is a, c, g, or t
ttgatgtcgtcggggggcgaactatggaaaaacgccagcacccgccttttaacggtcctggcctgtgatgcctttggctaacatgtcttccctgcgnnnnnnnnnnnnnnnnnnnnnnnnnnnnnnnnnnnnnnnnnnnnnnnnnnnnnnnnnnnnnnnnnnnnnnnnnnnnnnnnnnnnnnnnnnnnnnnnnnnnnnnnnnnnnnnnnnnnnnnnnnnnnnnnnnnnnnnnnnnnnnnnnnnnnnnnnnnnnnnnnnnnnnnnnnnnnnnnnnnnnnnnnnnnnnnnnnnnnnnnnnnnnnnnnnnnnnnnnnnnnnnnnnnnnnnnnnnnnnnnnnnnnnnnnnnnnnnnnnnnnnnnnnnnnnnnnnnnnnnnnnnnnnnnnnnnnnnnnnnnnnnnnnnnnnnnnnnnnnnnnnnnnnnnnnnnnnnnnnnnnnnnnnnnnnnnnnnnnnnnnnnnnnnnnnnnnnnnnnnaagaattcggcacgagggnnnnnnnnnnnnnnnnnnnnnnnnnnnntgttgcaaatgattcttttattattttccaatcagccaacagtcctcacttagggctttcttccctttttacgcaatgactgtccttctccagagaaagcgacgaatctgcctccagcttcatcctaggtttgaagagaagatactattttcagaaactccctggaggtttacaataaatgccttactctatggactcacgtaccatccacattactcataagaaatatctcannnnnnnnnnnnnnnnnnnnnnnnnnnnnnnnnnnnnnnnnnnnnnnnnnnnnnnnnnnnnnnnnnnnnnnnnnnnnnnnnnnnnnnnnnnnnnnnnnnnnnnnnnnnnnnnnnnnnnnnnnnnnnnnnnnnnnnnnnnnnnnnnnnnnnnnnnnnnnnnnnnnnnnnnnnnnnnnnnnnnnnnnnnnnnnnnnnnnnnnnnnnnnnnnnnnnnnnnnnnnnnnnnnnnnnnnnnnnnnnnnnnnnnnnnnnnnnnnnnnnnnnnnnnnnnnnnnnnnnnnnnnnnnnnnngcctacagccgcggccgctcccctcgtgccgaattcttnnnnnnnnnnnnnnnnnnnnnnnnnnnnnnnnnnnnnnnnnnnnnnnnnnnnnnnnnnnnnnnnnnnnnnnnnnnnnnnnnnnnnnnnnnnnnnnnnnnnnnnnnnnnnnnnnnnnnnnnnnnnnnnnnnnnnnnnnnnnnnnnnnnnnnnnnnnnnnnnnnnnnnnnnnnnnnnnnnnnnnnnnnnnnnnnnnnnnnnnnnnnnnnnnnnnnnnnnnnnnnnnnnnnnnnnnnnnnnnnnnnnnnnnnnnnnnnnnnnnnnnnnnnnnnnnnnnnnnnnnnnnnnnnnnnnnnnnnnnnnnnnnnnnnnnnnnnnnnnnnnnnnnnnnnnnnnnnnnnnnnnnnnnnnnnnnnnnnnnccaaatatcaggggatacgcaggaaggatatgtgagcaaaggcacaaaaggcaggtaccgtaaaaggccggttgctgggttttc

SEQ ID NO: 71826 - DNA, 1089 bp, Homo Sapiens
gggttggcgcggcggcagcggcagcggcggctgggagagcggtcggcggggtttcttcgttgcattgcctgagaggagcggagtctgccaggtggtgtccatcatgttctctttcaacatgttcgaccaccctattcccagggtcttccaaaaccgcttctccacacagtaccgctgcttctctgtgtccatgctagcagggcctaatgacaggtcagatgtggagaaaggagggaagataattatgccaccctcggccctggaccaactcagccgacttaacattacctatcccatgctgttcaaactgaccaataagaattcggaccgcatgacgcattgtggcgtgctggagtttgtggctgatgagggcatctgctacctcccacactggatgatgcagaacttactcttggaagaaggcggcctggtccaggtggagagcgtcaaccttcaagtggccacctactccaaattccaacctcagagccctgacttcctggacatcaccaaccccaaagccgtattagaaaacgcacttaggaactttgcctgtctgaccaccggggatgtgattgccatcaactataatgaaaagatctacgaactgcgtgtgatggagaccaaacccgacaaggcagtgtccatcattgagtgtgacatgaacgtggactttgatgctcccctgggctacaaagaacccgaaagacaagtccagcatgaggagtcgacagaaggtgaagccgaccacagtggctatgctggagagctgggcttccgcgctttctctggatctggcaatagactggatggaaagaagaaaggggtagagcccagcccctccccaatcaagcctggagatattaaaagaggaattcccaattatgaatttaaacttggtaagataactttcatcagaaattcacgtccccttgtcaaaaaggttgaagaggatgaagctggaggcagattcgtcgctttctctggagaaggacagtcattgcgtaaaaagggaagaaagccctaagtgaggactgttggctgattggaaaataataaaagaatcatttgcaaaaaacaaccacgtca

SEQ ID NO: 71827 - DNA, 2651 bp, Homo Sapiens
aaacataggtcagtacgaggcctggtgtcgaattcggcaccgaggctctgacagctctgaggatgatgaagctccttctaagccagctggtaccaccaagaattcttcaaataagccagctgtcaccaccaagtcacctgcagtgaagccagctgcagcccccaagcaacctgtgggcggtggccagaagcttctgacgagaaaggctgacagcagctccagtgaggaagagagcagctccagtgaggaggagaagacaaagaagatggtggccaccactaagcccaaggcgactgccaaagcagctctatctctgcctgccaagcaggctcctcagggtagtagggacagcagctctgattcagacagctccagcagtgaggaggaggaagagaagacatctaagtctgcagttaagaagaagccacagaaggtagcaggaggtgcagccccttccaagccagcctctgcaaagaaaggaaaggctgagagcagcaacagttcttcttctgatgactccagtgaggaagaggaagagaagctcaagggcaagggctctccaagaccacaagcccccaaggccaatggcacctctgcactgactgcccagaatggaaaagcagctaagaacagtgaggaggaggaagaagaaaagaaaaaggcggcagtggtagtttccaaatcaggttcattaaagaagcggaagcagaatgaggctgccaaggaggcagagactcctcaggccaagaagataaagcttcagacccctaacacatttccaaaaaggaagaaaggagaaaaaagggcatcatccccattccgaagggtcagggaggaggaaattgaggtggattcacgagttgcggacaactcctttgatgccaagcgaggtgcagccggagactggggagagcgagccaatcaggttttgaagttcaccaaaggcaagtcctttcggcatgagaaaaccaagaagaagcggggcagctaccggggaggctcaatctctgtccaggtcaattctattaagtttgacagcgagtgacctgaggccatcttcggtgaagcaagggtgatgatcggagactacttactttctccagtggacctgggaaccctcaggtctctaggtgagggtcttgatgaggacagaagtttagagtaggtcctaagactttacagtgtaacatcctctctggtccttttctgtgttcctagttttgtacagacttgtttttgagtgttgagtagcagggacaaaataagggaatgttattttttaagaaaattcattttcattgttgtctccttccttttctgtgaaagtcctcatactgagaaatttgtatattttatattaaatcacttactattgatttttgttgtgattttcaaaggtggattcccacagataaaatcttggctattgcccaaaacatagtaaagggtcacgtgtgactttttataataggaagaaaattctgcctttgtgagtgcacatgtccacatttcatccctccttccctcaaaaccctagagaggggcattaaagaattgttgatgtatatgcaatgtctgttaagcatgcactatgtatttcatcctcatttattgggtctgggactgaagtttttagccagcatggacctaacctactttttgggataaaattctctgttttgttacaggcaaaattctggtatggcgtgaatgccatgggtcattctgaatatatttttttctgtaattttatcattacacgatgtttgcaatacgtgctttgttttttaatttgaaagcaaacttttctactgttgaaagacattttttgacaacttgacccttcctagtattgagttctaagttgaggactgcatcttctcgttttttacagtatagagaacaaaatgacatgagtttgaaaaatacatatcacttggtattgctgtcttggttgcagtggtgatacagaattggtttcattaattcctacatggttgagaatcactgatcaagaaagtggggggaaaaaaaacaaacgttaaaacctcaatcctcagtaggaaggtagattacattaggtgaaattataggtaatctatgtatgtgctaatggggttggaaagaaccttacagagcatattacctgataaactggagtgggtttgggagaacaaactaataggattattgtgtctcctagttggtacctgggagcaattgacatgcccccttcagaaccttaactgttagtagcagtggctgtaacaacacaaaccagtgaccagagataacagcttttaggccaagctggcctgacggtatggctgcaggaagtgactgagcagtagcggtactcagccagaccaagacggagagggaagagtccacagctttctggaagctaaggcattctggtggtagaaaagtgtgccccaagccttcatggacgagttataggtcttaagattagtctcctcttgtttggattccatacttgctaaataacctgataataacctggttttccatgtaactgcctctaggaagaaaatgtactgttcatgctgacacagatatttcagtctgcatggtaaaagttctaaatcttactacaaaataataaactggctggtttataatgtgtaaaa

SEQ ID NO: 71828 - DNA, 153 bp, Homo Sapiens
ggttaagagtttttttaatttatttagggggaatgatggttgtctttgggtatacatatcacttggtattgctgtcttggttgcagtggtgatacaaaattggtttcattaatttctacatggttgagaatcactgatcaagaaagtgggggg

SEQ ID NO: 71829 - DNA, 684 bp, Homo Sapiens
  misc_feature (57)..(57): n is a, c, g, or t
gtgtaataaaaatgatgtattcaagagaaagttaaaaatgtgttgaagcgcacacanagagaatgattatgacatgttcccttcattttctgaattctcaaattcatcaggcttaaatatgacagacatcacaaggattatttttgagcacctggaaggactttctcaagtgttcagtgactgttttccaccagaacaagacttgcgttcaggaaatttgtggataattcacccttttatgaatcaccaaaataataatctcaccgacttcgaagaagaaaagctaacagagctatcttcagatttaggattacaagcactatttaaatcagtgtctgtaactcagttttggataaatgcaaagacaagttacccagaactccatgaaagggcaatgaaatttttattacccttttcaactgtttatttatgtgatgctgccttttcagctttgactgagtcaaaacaaaaaaatctgttgggttctggccctgccctaagacttgcagtcacatctttaattccaaggatagaaaaattagtgaaggagaaagagtagcaatatgcacattgcttaacagtgaagtcaataatcctgtgttaagttttgtataagtatcctaaaagataatttcctaatgtggatttgtgttttcagtgattaaatgttttaataattttaaa

SEQ ID NO: 71830 - DNA, 1709 bp, Homo Sapiens
  misc_feature (1107)..(1123): n is a, c, g, or t
ggggtccccgaggcgggaggagcccgagggggcgcgagccccgcatggattttatattggaagacatggatcttgctgccaacgagatcagcatttatgacaaactttcagagactgttgatttggtgagacagaccggccatcagtgtggcatgtcagagaaggcaattgaaaaatttatcagacagctgctggaaaagaatgaacctcagagaccccccccgcagtatcctctccttatagttgtgtataagcccattagcacctgagccagtgctttctggagctcacacctggcgctcactcatccatcacattaggctgatgtccttgcccattgccaagaagtacatgtcagaaaataagggagttcctctgcatgggggtgatgaagacagaccctttccagactttgacccctggtggacaaacgactgtgagcagaatgagtcagagcccattcctgccaactgcactggctgtgcccagaaacacctgaaggtgatgctcctggaagacgccccaaggaaatttgagaggctccatccactggtgatcaagacgggaaagcccctgttggaggaagagattcagcattttttgtgccagtaccctgaggcgacagaaggcttctctgaagggtttttcgccaagtggtggcgctgctttcctgagcggtggttcccatttccttatccatggaggagacctctgaacagatcacaaatgttacgtgagctttttcctgttttcactcacctgccatttccaaaagatgcctctttaaacaagtgctcctttcttcacccagaacctgttgtggggagtaagatgcataagatgcctgacctatttatcattggcagcggtgaggccatgttgcagctcatccctcccttccagtgccgaagacattgtcagtctgtggccatgccaatagagccaggggatatcggctatgtcgacaccacccactggaaggtctacgttatagccagaggggtccagcctttggtcatctgcgatggaaccgctttctcagaactgtaggaaatagaactgtgcacaggaacagcttccagagccgaaaaccaggttgaaaggggnnnnnnnnnnnnnnnnncgatgaaactgctttctgggggttggttacttagttacctgccctttgcatgcatgtgtgaaccagctgtgagctgcaaggcagtggccagagcctcgccctcctgactcttcctgcaggtggctcaggaaggattcagcctggccacttggctaggactctgccagcacccatctgagactgacctcttccgggcctttggacactatgaccttgatgctgcccttcaggcaggaaacagggctggtgcctttcttcacctgcatggccagcttccttccctggcagtggagagggcagccaacaggttctaatgtcagagccatcctttaccaggtgggcctgcttgtccctgtcttgcctgccacatcactctactttttggaaggccatggctgattaaagaagttcttgtagtttcccaagcaaagtggaatctagaaacagtgaaaaaagttcagataactttgaattgcattcagaagtacacttctttcccattgtccgtggctcttggagtctccgtgatgccaggctagagtctgattatataataattcaaaatggtactcccagtatgctttct

SEQ ID NO: 71831 - DNA, 1551 bp, Homo Sapiens
caggctggtacggtccggaattcccgggatatcgtcgacccacgcgtcggcttcgctatggcggcaattcccccagattcctggcagccacccaacgtttacttggagaccagcatgggaatcattgtgctggagctgtactggaagcatgctccaaagacctgtaagaactttgctgagttggctcgtcgaggttactacaatggcacaaaattccacagaattatcaaagacttcatgatccaaggaggtgacccaacagggacaggtcgaggtggtgcatctatctatggcaaacagtttgaagatgaacttcatccagacttgaaattcacgggggctggaattctcgcaatggccaatgcggggccagataccaatggcagccagttctttgtgaccctcgcccccacccagtggcttgacggcaaacacaccatttttggccgagtgtgtcagggcataggaatggtgaatcgcgtgggaatggtagaaacaaactcccaggaccgccctgtggacgacgtgaagatcattaaggcatacccttctgggtagacttgctaccctcttgagcagctcttctgagatggccccagtgaaccagcttctagatgacatagaatgacatgtaatgctaaatttcattttggctttgcaagtcatgaagcttaggaggcctggcatcttgggtgagttaagaaatggcaagaacattttaataggatggcttcttttctcttcccccagtgcctaggttgccagagcatttgcacaaatgcccctgtttatcaataggtgactacttactacacatgaaccataatgctgcttcttgtgcatgtctgctctgatatacgtcgaacaatgtagcagccactgtcatttctcagtggttttgcctaaccaaacttcttcctaaggagatttatattctggcctacacagcagtccttgatggctgacagccacagaattccaaaccaagtagtgtctgtcagccctcttaactctgtgcacgccctatttcagtcttttacatttgttcttctagggaatgtatgcatctctatatatattttccctctcaaaaccagaacatcaacagtgctgtttctgacacttcagacatcccacgcaaagccacattgaatttttgccaaatgaaaaacacatccaacaatcaagtttctaagaaggtgtcaagtggggaataataataatgtataataatcaagaaattagtttattaaaaggaagcagaagcattgaccattttttcccagagaagaggagaaatctgtagtgagcaaaggacagaccatgaatcctccttgagaagtagtactctcagaaaggagaagcgccactcaagttcttttaacccaagactttagagaaattaggtccaagatttttatatgttcagttgtttatgtataaaaataactttctggattttgtggggaggagcaggagaggaaggaagttaatacctatgtaatacatagaaacttccacaataaaatgccattgatggttgaaaaaaaa

SEQ ID NO: 71832 - DNA, 899 bp, Homo Sapiens
ggcggcagctgtccccgaggcgggaggagcccgagggggcgcgagccccgcatggattttatattggaagacatggatcttgctgccaacgagatcagcatttatgacaaactttcagagactgttgatttggtgagacagaccggccatcagtgtggcatgtcagagaaggcaattgaaaaatttatcagacagctgctggaaaagaatgaacctcagagaccccccccgcagtatcctctccttatagttgtgtataaggttctcgcaaccttgggattaatcttgctcactgcctactttgtgattcaacctttcagcccattagcacctgagccagtgctttctggagctcacacctggcgctcactcatccatcacattaggctgatgtccttgcccattgccaagaagtacatgtcagaaaataagggagttcctctgcatgggggtgatgaagacagaccctttccagactttgacccctggtggacaaacgactgtgagcagaatgagtcagagcccattcctgccaactgcactggctgtgcccagaaacacctgaaggtgatgctcctggaagacgccccaaggaaattggagaggctccatccactggtgatcaaagacgggaaagcccctgtttggaggaagacgattcagcatataaagtgccagtaccctgagggcgacagaaggcttctctgaagggtataccgccaagtggtggcgctgcttacctgcagcggtggttcccatttccttatccatggaggagacctctgaacagatcacaactgttacgtgagctttaacctgtttcactcaacctgcaatttccaaaagatgcctctttgaacaagtgctctatcttacacccagaaccgtgtgggagtaca

SEQ ID NO: 71833 - DNA, 1017 bp, Homo Sapiens
gttcatggtagtcagtgtcacctgtggatgccaggccatgtggtgcaatggtctggcaacctaggcagtgcgggaagagaaaagagcatccctatgaggaggtacgtccatgcttgggagctcaccccagatgccagccctccgtaagcgttcatgaccttgcaaagccaaatgaaatttagcagtacagggcattctatgtcatctagaagctggttcactggggccatctcagaagagctgcctcaagagggtagcaagtctagcccagaagggtatgccttaatgatcttcacgtcgtccacagggcgggtcctgggagtttgtttctaccattcccacgcgattcaccattcctatgccctgacacactcggccaaaaatggtgtgtttgccgtcaagccactgggtgggggcgagggtcacaaagaactggctgccattggtatctggccccgcattggccattgcgagaattccagcccccgtgaattcgcaagtctggatgaagttcatcttcaaactgtttgccatagatagatgcaccacctcgacctgtccctgttgggtcacctccttggatcatgaagtctttgataattctgtggaattttgtgccattgtagtaacctcgacgagccaactcagcaaagttcttacaggtctttggagcatgcttccagtacagctccagcacaatgattcccatgctggtctccaagtaaacgttgggtggctgccaggaatctgggggaattgccgccatagcgaagccggcggcggaatgcttgtctagtaattgctacttccggcgtcgattagctggggacccgtcgctgctgcacacttccggtccgttcaaccctttcgataccaggatttgggtggccaagacaaggaagaggacggtcccttcttccaatgccgggaagctggggtgggagacgagaagaagctgggctcaagaacagaggaaaacgcaaacttcattcgcggtggtctccaagtggcgatccc

SEQ ID NO: 71834 - DNA, 1006 bp, Homo Sapiens
  misc_feature (69)..(69): n is a, c, g, or t
  misc_feature (73)..(75): n is a, c, g, or t
  misc_feature (101)..(101): n is a, c, g, or t
  misc_feature (110)..(110): n is a, c, g, or t
  misc_feature (134)..(134): n is a, c, g, or t
  misc_feature (142)..(142): n is a, c, g, or t
  misc_feature (155)..(155): n is a, c, g, or t
  misc_feature (181)..(182): n is a, c, g, or t
cttggtgtacttgctcctgatgacttaaagaatatctgcacactgtgtatcggataactgtgcctattntccnnngggtgggtgtgttgttgctatggttncattgtacnccattgctaggagagtggctcctntagggacntgcttaactcatngcagcaggatgtaagagaatagactnnatccactagggctctcatctcacacctaaggaggagatctctagaaaaactgggccagattttctgtgttctccatcattttaatgtggcaggctgttcagttttcttactcttacctatgtgatatttcttcgtaacgtgtccaaaaagaaaaaagacccaatcagtgtctcttgactttgttctttgatccctcagtttcttcttgatttcagcatgtgtcgggttcctaattttgggtatgagttagcaaatttaaccattgtgtttgtgccctacccaggggactccccagtttctgacttgaagtagactgagaagaatccacgaggtgctatctggccagatttaagtagattctatttccttggttctccctctccctgaggacctcttattttattgtcccctcttctaggttaattctcctttgatttgactttgttgagaaggaggttggacagtagattagcaaagttccaagtgcaaaattacagtgtgttagagtgtggggggaaaattagtcttatttttccctacatgggatacaacactgtgaattcaatcttcaactgaaggccctgcagttctcctaaaacatagttgtttgtttttctttaacaaagtttaagctagtgttaataaattaaaaaaaattgcttgtctgtctacttcagctttgttttatgcccatttcatattgttgtctgtgttgtaattcataacttttgataccatttctgatgtgtaaaattggttgtcttgtaaatatcttataaagagttcaattgtaaataaactattgtggctgttaatttttgaaa

SEQ ID NO: 71835 - DNA, 1050 bp, Homo Sapiens
aaaaggtccagtagaaaaggagctggatgtgggtgctgattttgtggaaaagtcagagtaacggagctcgcctctgcattcagaaactgctataccctcttcagccttgcagaggtttgcagcagatgccaggaaagccaagtacattccaatacccaatcttttccctcagattttccatctccagagcttccctttatggagctttctgaggatattctgaaaggatttatgagtaactaaaatggaaggccatagaagaagggagaagaggaaataatactaagtcatacagttaatccagcaacaaaaaatgaaaagggaaagccacaggcaagggtaatcctggaaatgcctcgtcatctggtgtactgtaggagaagacgcattgccaggatgtggggaacagtcgctgtgaagcgtgtcacatacctgattcactgacttgagctgatgatgccgacctggcagacactaaactcgtggagggtcagtttctcttgacaccaaccaaatggctgcctgaaagaattttttcaagcaacaattatttttcttatcttcagggttaaaatgtataaaagtatgttatgtataattaatctgttatgtcataagtgatcatgcaaaacctaaatattatggcagcctgaggggctgcttcgtatttgaaacatgctttgtctcaggcgttgacgtatgtatgcattttgttactggcgttttgtataaggtgtgagacacacctttccagatgaaaccatatgtgccgcactgtgcactactcataacggtgataacctcaagaccatcaggagaaatatttaaatttccgtgttatgaagaaagaaaccaaattattagttatgctttttaacacaaattaccagtttacataattaatgagggtgcattttaagttctaactttattgtataaggcatcatttgaaagtaccaaggaagtcttctttgtttttagtgatccgtgagtggaaggaattctagttggcagtatttgattgtaagaaatcaataaagtaattgtgtt

SEQ ID NO: 71836 - DNA, 1321 bp, Homo Sapiens
  misc_feature (228)..(265): n is a, c, g, or t
  misc_feature (848)..(886): n is a, c, g, or t
  misc_feature (961)..(961): n is a, c, g, or t
cgactggaagcggagactggcagaagatcattcacggcaaggacgggccagagattcctgcacagaacgggatggtcgggccatcccctagaccagcgacgagctcagggacaccatgtccctcatgatccggcagaccatccgctccaagaggcctgctctcttgtccagctcagccaaggctgatggcggagaagagcagctgacgtacgagtctggggaatgacnnnnnnnnnnnnnnnnnnnnnnnnnnnnnnnnnnnnnncttcaagccatccgacggcagtgaaaacgaaatggagacagagattctggactacgtgtgacagggcccaaggctgggcctccctgacccggccagactggtgtctggcctaatgagggagccggggctccccattgccacccacagtgcccggaatggccctaggaggccctctgaggagagctagagtcccagcaaagggtgcagctgaccctagcactggctgtgacatgctgcttggtgctgcctctggtcctgaggggttagggacatccccaaagggtataccctggctctgccacccatgaaccagcccagcatccagccagtgagtgggcacccaatgcctctcaggatgagaccagtaaatgccggaggtggagctgggcagctgtggagccccaggccacaggccagtctcgcttggctctcatgactgtggtggtggagatagcgtggggagcctcgcccatggtctcacgtggcaagaagtgcctttagctctggatcccaaccgtttggcacagctttggccacagccaggcccctctggaattgtccttattaaaccagtttcccgagnnnnnnnnnnnnnnnnnnnnnnnnnnnnnnnnnnnnnnncaccacacgcacagacaagcaacggacaagcaaccacaaacggggggggcgccccaaaaaaatcccccgcgaggngcaccacaaaagaggcacccgcgagattttgtgcacaaaggggcccaccaaagggcgcgaaataacgcggaagcagtgcgcgggtatacacaccacgccgtggatggggaaacaaaactggtagtcggggcgcactttggagggaacccccacaccgtgcgaggggggggagacacacatatgtgtgggagagacctctccaccaagagaaatattaaggcgtctaccgcgggcgcactatagaaaatataggcggtttacaccgtggtggcacaaccacaacgtcggatatgttcctccgggccagagaagatttgtgccactgcggcgttgttcgtcacgacacatattttatcgcgg

SEQ ID NO: 71837 - DNA, 1049 bp, Homo Sapiens
  misc_feature (129)..(129): n is a, c, g, or t
  misc_feature (138)..(138): n is a, c, g, or t
  misc_feature (149)..(149): n is a, c, g, or t
  misc_feature (181)..(182): n is a, c, g, or t
  misc_feature (185)..(763): n is a, c, g, or t
  misc_feature (793)..(808): n is a, c, g, or t
  misc_feature (930)..(946): n is a, c, g, or t
cccgtgcgatagtcggtctacccggtgactcagacgtagtacggatagcgcagcgtcggctgaccgggggttgtccacacacccagttggacgacgacctacaccgattgagtacctacagcgtggctntgagaagcncacgctccgangggagaaagcggacagtatcggtagcgcaggnntcnnnnnnnnnnnnnnnnnnnnnnnnnnnnnnnnnnnnnnnnnnnnnnnnnnnnnnnnnnnnnnnnnnnnnnnnnnnnnnnnnnnnnnnnnnnnnnnnnnnnnnnnnnnnnnnnnnnnnnnnnnnnnnnnnnnnnnnnnnnnnnnnnnnnnnnnnnnnnnnnnnnnnnnnnnnnnnnnnnnnnnnnnnnnnnnnnnnnnnnnnnnnnnnnnnnnnnnnnnnnnnnnnnnnnnnnnnnnnnnnnnnnnnnnnnnnnnnnnnnnnnnnnnnnnnnnnnnnnnnnnnnnnnnnnnnnnnnnnnnnnnnnnnnnnnnnnnnnnnnnnnnnnnnnnnnnnnnnnnnnnnnnnnnnnnnnnnnnnnnnnnnnnnnnnnnnnnnnnnnnnnnnnnnnnnnnnnnnnnnnnnnnnnnnnnnnnnnnnnnnnnnnnnnnnnnnnnnnnnnnnnnnnnnnnnnnnnnnnnnnnnnnnnnnnnnnnnnnnnnnnnnnnnnnnnnnnnnnnnnnnnnnnnnnnnnnnnnnnnnnnnnnnnnnnnnnnnnnnnnnnnnnnnnnnnnnnnnnnnnnnnnnnnnnnnnnnnnnnnnaagaattcggcacgagggcggctgtaggcnnnnnnnnnnnnnnnnactctctggaaaaggagataatacaattccagaaagtgaactcatatttctaaggttaagattcccttttattgcacctagaatagtgctatgcacagagcgggtgcttgagttgttgtcgnnnnnnnnnnnnnnnnnaaatgtaaactggtaaattttgtgcttatcttcaaggctggcttaagtataaaattgttttttaaacacttgaaaaattaaaggatttgttttatattaaaaa

SEQ ID NO: 71838 - DNA, 2290 bp, Homo Sapiens
  misc_feature (2049)..(2061): n is a, c, g, or t
tccaaggtagcgaggcctgggtggcgaattcggcacgaggcttccgcggggcccagcgcgagtctctacctgagcgaggacgaggtgcgccggctgatcggtcttgatgcagaactttattatgtgagaaatgaccttattagtcactacgctctatcctttagtctgttagtacccagtgagacaaatttcctgcacttcacctggcatgcgaagtccaaggttgaatataagctgggattccaagtggacaatgttttggcaatggatatgccccaggtcaacatttctgttcagggggaagttccacgcactttatcagtgtttcgggtagagctttcctgtactggcaaagtagattctgaagttatgatactaatgcagctcaacttgacagtaaattcttcaaaaaattttaccgtcttaaattttaaacgaaggaaaatgtgctacaaaaaacttgaagaagtaaaaacttcagccttggacaaaaacactagcagaactatttatgatcctgtacatgcagctccaaccacttctacgcgtgtgttttatattagtgtaggggtttgttgtgcagtaatatttctcgtagcaataatattagctgttttgcaccttcatagtatgaaaaggattgaactggatgacagcattagtgccagcagtagttcccaagggctgtctcagccatccacccagacgactcagtatctgagagcagacacgcccaacaatgcaactcctatcaccagttatcctaccttgcggatagagaagaacgacttgagaagtgtcactcttttggaggccaaaggcaaggtgaaggatatagcaatatccagagagaggataactctaaaagatgtactccaagaaggtacttttgggcgtattttccatgggattttaatagatgaaaaagatccaaataaagaaaaacaagcatttgtcaaaacagttaaagatcaagcttctgaaattcaggtgacaatgatgctcactgaaagttgtaagctgcgaggtcttcatcacagaaatcttcttcctattactcatgtgtgtatagaagaaggagaaaagcccatggtgatattgccttacatgaattgggggaatcttaaattgtttttacgacagtgcaagttagtagaggccaataatccacaggcaatttctcagcaagacctggtacacatggctattcagattgcctgtggaatgagctacctggccagaagggaagtcatccacaaagacctggctgccaggaactgtgtcattgatgacacacttcaagttaagatcacagacaatgccctctccagagacttgttccccatggactatcactgtctgggggacaatgaaaacaggccagttcgttggatggctcttgaaagtctggttaataacgagttctctagcgctagtgatgtgtgggcctttggagtgacgctgtgggaactcatgactctgggccagactccctacgtggacattgaccccttcgagatggccgcatacctgaaagatggttaccgaatagcccagccaatcaactgtcctgatgaattatttgctgtgatggcctgttgctgggccttagatccagaggagaggcccaagtttcagcagctggtacagtgcctaacagagtttcatgcagccctgggggcctacgtctgactcctctccaatcccacaccatcaggaagaaggtgcctgtcggggctcacttgaagcctgtcagggatgctttgtatctaacacaacgccaacagaagcacatttgtcttccagaacaccgtgccttagaaatgctttagaatctgaactttttaagacagacttaataatgtggcatattttctagatatcacttttattaggttgaactgaaagggtttttgtaaattttttggccaaaattttttaaaacatacttactttggactaggggtacattcttacaaaataaataaacagtttttaaaattgtttagacacagatattcggaattagctatcttagtcccaactgcnnnnnnnnnnnnnacttcatcaaggtgatgtaagtgactcacctttaaagtttttttagtgttattttttatcactactctgggaaatggtttgtcttcaagatgcaatacttttcttagtaaaggaaaaacagcataaaaagatacctggtctgccttgtacaagaaaaggcaatattagaggaagaaaatttaaagaaaagctagaccaataaagagacaaatacattttctaactcagc

SEQ ID NO: 71839 - DNA, 611 bp, Homo Sapiens
tcatgttttaaaaaagtgacattgctttattactattggcaggtggggcctgcatgaggtggttagtgtgctcaggggatgggtgggctgtggagatgatgacagaaaggctggaaggaaagggggtgggtttgaaggccagggccaaggggtcctcaggtccgcttctgggaagggacagccttgaggaaggagtcatggcaagccatagctaggccaccaatcagattaagaaattctgagaaatctagctgaccatcactgttggtgtccagtttcttcatcatgcggtcaaggacaccagggtccttctggttctttgtgaaggcagctagttctgtattcatgaagcttaggaactctgtcttggagagagtgtagttataaccatcctttccagcatacttctggaagacagcaatcagggactcgatgcaccgctcagtctctgtagggctggagatttttgccatgttggagctgagcgaggcgcgggaggctgtggctgggagcggcgctgagagctctgtgcgcgcggcgtgcgggtctggagcctctcctcaaccccacgcgtggtcgacgatatcccgggaattccggaccggtccagc

SEQ ID NO: 71840 - DNA, 991 bp, Homo Sapiens
  misc_feature (107)..(136): n is a, c, g, or t
  misc_feature (139)..(173): n is a, c, g, or t
  misc_feature (788)..(789): n is a, c, g, or t
  misc_feature (795)..(795): n is a, c, g, or t
  misc_feature (810)..(810): n is a, c, g, or t
  misc_feature (812)..(812): n is a, c, g, or t
agagaaacgaaacaacaacaaaaaagaaactctgataaatacggaacaatcaaacgtaaatagggcgctacccgtcgttttgtttagcccggacaactgaccccgannnnnnnnnnnnnnnnnnnnnnnnnnnnnncgnnnnnnnnnnnnnnnnnnnnnnnnnnnnnnnnnnncagtcgacggtaccggacatatgcccgggaattcggccattacggccggggggttgaggagaggctccagacccgcacgccgcgcgcacagagctctcagcgccgctcccagccacagcctcccgcgcctcgctcagctccaacatggcaaaaatctccagccctacagagactgagcggtgcatcgagtccctgattgctgtcttccagaagtatgctggaaaggatggttataactacactctctccaagacagagttcctaagcttcatgaatacagaactagctgccttcacaaagaaccagaaggaccctggtgtccttgaccgcatgatgaagaaactggacaccaacagtgatggtcagctagatttctcagaatttcttaatctgattggtggcctagctatggcttgccatgactccttcctcaaggctgtcccttcccagaagcggacctgaggaccccttggccctggccttcaaacccaccccctttccttccagcctttctgtcatcatctccacagcccacccatcccctgagcacactaaccacctcatgcaggccccacctgccaatagtaataaagcaatgtcacttttttaaaaccnncaccancaacaccacaaacananaaaaacatgtcgggccggcctcggcccctccgagaagcctttctaagaaccattccgttttgggcgcggcggggccccagtaaggtaaagtggaacatgggtccattagcctgttttccctaaggaagaatcctggggcaatggacctaggtgcctttgggatttcctccacccacatt

SEQ ID NO: 71841 - DNA, 1388 bp, Homo Sapiens
  misc_feature (41)..(81): n is a, c, g, or t
  misc_feature (85)..(119): n is a, c, g, or t
  misc_feature (707)..(739): n is a, c, g, or t
  misc_feature (876)..(876): n is a, c, g, or t
  misc_feature (929)..(929): n is a, c, g, or t
  misc_feature (938)..(938): n is a, c, g, or t
  misc_feature (1064)..(1064): n is a, c, g, or t
  misc_feature (1104)..(1104): n is a, c, g, or t
  misc_feature (1217)..(1217): n is a, c, g, or t
  misc_feature (1219)..(1219): n is a, c, g, or t
  misc_feature (1255)..(1255): n is a, c, g, or t
  misc_feature (1295)..(1295): n is a, c, g, or t
  misc_feature (1335)..(1345): n is a, c, g, or t
caggtcgtatcgatcactatagggcgtagctctgccggagnnnnnnnnnnnnnnnnnnnnnnnnnnnnnnnnnnnnnnnnnccgnnnnnnnnnnnnnnnnnnnnnnnnnnnnnnnnnnncagtcgacggtaccggacatatgcccgggaattcggccattacggccgggggcgcacagagctctcagcgccgctcccagccacagcctcccgcgcctcgctcagctccaacatggcaaaaatctccagccctacagagactgagcggtgcatcgagtccctgattgctgtcttccagaagtatgctggaaaggatggttataactacactctctccaagacagagttcctaagcttcatgaatacagaactagctgccttcacaaagaaccagaaggaccctggtgtccttgaccgcatgatgaagaaactggacaccaacagtgatggtcagctagatttctcagaatttcttaatctgattggtggcctagctatggcttgcatgactccttcctcaaggctgtcccttcccagaagcggacctgaggaccccttggccctggctttcaaacccaccccctttccttccagcctttctgtcatcatctccacaggccaacccatccccttgaagcaaactaaaccacctcatggcagggccccacctggccaatagttaataaagccaatgttcactttcttttnnnnnnnnnnnnnnnnnnnnnnnnnnnnnnnnnacctactactaacagaaacaccacggaccaccacacggcaagatagccgaacaacctgggtcggtgccgtcctcctcggacctcgtttgaagagaatccttttctataacacacccattccttctttgtggggtgancgccccggggcccccccgcgctacgcggcaaaggtgggagaactagtgcgggnccacactanctctgtggtgccttcccctaaggagacaatactctcgcggtggtccaaagaaaccaagaaggggcttggggcggtcttccccgccgcgcagatataagaaagaggcgccccccgcgaggtgcgacnacaccgacaagacgcgttcctgtgtaacccacacttcgcnccataactggggtatttctctcgagagggacccttaaaccgggggcagatctatatacacgcccggggagaggccccgcaagccggaagagctgtccaagatatcaatcaatntnataaggcgccccgacccgccgtgcgccaacactctntggagcacaggagacgcgatggtggtagaaaatatcgttnacaaacactctttctctcggcgagcagtgtgcagagatannnnnnnnnnnacagcgcgcagttgcgaggtagaccgcgtgaaaatgccttcgc

SEQ ID NO: 71842 - DNA, 1371 bp, Homo Sapiens
cggatagcggggacccacagaataagagaactccagatttgcctgaagaagagtatgtgaaggaagaaatccaggagaatgaagaagcagtcaaaaagatgcttgtggaacccacccgggagtttgaggaggttgtggtggatgagagccctcctgattttgaaatacatataactatgtgtgatgatgatccacccacacctgaggaagactcagaaacacagcctgatgaggaggaagaagaagaagaagaaaaagtttctcaaccagaggtgggagctgccattaagatcattcggcagttaatggagaagtttaacttggatctatcaacagttacacaggccttcctaaaaaatagtggtgagctggaggctacttccgccttcttagcgtctggtcagagagctgatggatatcccatttggtcccgacaagatgacatagatttgcaaaaagatgatgaggataccagagaggcattggtcaaaaaatttggtgctcagaatgtagctcggaggattgaatttcgaaagaaataattggcaagataatgagaaaagaaaaaagtcatggtaggtgaggtggttaaaaaaaattgtgaccaatgaactttagagagttcttgcattggaactggcacttattttctgaccatcgctgctgttgctctgtgagtcctagatttttgtagccaagcagagttgtagagggggataaaaagaaaagaaattggatgtatttacagctgtccttgaacaagtatcaatgtgtttatgaaaggaagatctaaatcagacaggagttggtctacatagtagtaatccattgttggaatggaacccttgctatagtagtgacaaagtgaaaggaaatttaggaggcataggccatttcaggcagcataagtaatctcctgtcctttggcagaagctcctttagattgggatagattccaaataaagaatctagaaataggagaagatttaattatgaggccttgaacacggattatccccaaacccttgtcatttcccccagtgagctctgatttctagactgctttgaaaatgctgtattcattttgctaacttagtatttgggtaccctgctctttggctgttctttttttggagcccttctcagtcaagtctgccggatgtctttctttacctacccctcagttttccttaaaacgcgcacacaactctagagagtgttaagaataatgttacttggttaatgtgttatttattgagtattgtttgtgctaagcattgtgttagatttaaaaaattagtggattgactccactttgttgtgttgttttcattgttgaaaataaatataactttgtattcgagtctcgtc

SEQ ID NO: 71843 - DNA, 1124 bp, Homo Sapiens
  misc_feature (988)..(988): n is a, c, g, or t
ggcacgagggcggtgacagctcagtcagttgagctctgtgtgccaggcgctcgggagggggtagctattctagtagtgctcggcgtcagacatggcggaggcgatggatttgggcaaagaccccaacgggcccacccattcctcgactctgttcgtgagggacgacggcagctccatgtccttctacgtgcggcccagcccggccaagcgtcggctgtcgacgctcatcctgcacggcggcggcaccgtgtgccgagtgcaggagcccggggccgtgctgctggcccagcccggggaggcgctggccgaggcctcgggtgatttcatctccacgcagtacatcctggactgcgtggagcgcaacgagaggctggagctggaggcctatcggctgggccccgcctcggcggcggacaccggctcggaagcaaagcccggggccctggccgagggcgccgcggagccggagccgcagcggcacgccgggcggatcgccttcacggatgcggacgacgtagccatccttacctacgtgaaggaaaatgcccgctcgcccagctccgtcaccggtaacgccttgtggaaagcgatggagaagagctcgctcacgcagcactcgtggcagtccctgaaggaccgctacctcaagcacctgcggggccaggagcataagtacctgctgggggacgcgccggtgagcccctcctcccagaagctcaagcggaaggcggaggaggacccggaggccgcggatagcggggaaccacagaataagagaactccagatttgcctgaagaagagtatgtgaaggaagaaatccaggagaatgaagaagcagtcaaaaagatgcttgtggaagccacccgggagtttgaggaggttgtggtggatgagagccctcctgattttgaaatacatataactatgtgtgatgatgatccacccacacctgaggaagactcagaaacacagcctgatgaggagganagaagaagaagaagaaaaagtttctcaacccagaggtggggagctgcccattaagatcattccggcagttaaatggaagaagttaaacttgggatcttatccaacagtttacacaggcctttcctaaaaaaatagt

SEQ ID NO: 71844 - DNA, 841 bp, Homo Sapiens
atgtgacagagtatgaagtcgacggcgcgccgaattcggcacgaggatggacgccaggcagccaggagaaagatcccaaccccacccgcgcagatatccgcgaggccccgcgctcagcctcctcacccccgctatccgcggcctccgggtcctcctccgccttccgcttgagcttctgggaggaggggctcaccggcgcgtcccccagcaggtacttatgctcctggccccgcaggtgcttgaggtagcggtccttcagggactgccacgagtgctgcgtgagcgagctcttctccatcgctttccacaaggcgttaccggtgacggagctgggcgagcgggcattttccttcacgtaggtaaggatggctacgtcgtccgcatccgtgaaggcgatccgcccggcgtgccgctgcggctccggctccgcggcgccctcggccagggccccgggctttgcttccgagccggtgtccgccgccgaggcggggcccagccgataggcctccagctccagcctctcgttgcgctccacgcagtccaggatgtactgcgtggagatgaaatcacccgaggcctcggccagcgcctccccgggctgggccagcagcacggccccgggctcctgcactcggcacacggtgccgccgccgtgcaagatgaacgtcgactgccgacgcttggccgggctgggcccacgtagaaagacatggaactccgtcctcctctacaacaagtcaaggatgggtggccctttgggtcttaccctattctcactcccttgctaccctacactcttagaatacccttttgcgcttccaatattatggttgagttccaa

SEQ ID NO: 71845 - DNA, 951 bp, Homo Sapiens
  misc_feature (460)..(484): n is a, c, g, or t
ccgcatgtgtcaggcgcgagcaggtgttctggataatgagtgagatgtgtcctgaaagtttttaccacttgtttttctgtttcattttgttttgaacactaagatttattttcaaacagcacacagaccgtctgcggggcagagccaggctaggctggtgtctgggccccacccacagcagctgccaggaaaagaggacccttgcccgggtggcgcggccgaagcttcaggcaagcatggtggctcggcagcccccagccccgccctgcggccaggcacacatgcgggcacaggcaggggcgccagaaactcaactagaggacacagcagcttcaggaacactggtgaattccgccggacttgccgggacgcggctctttggaaaacgacctaatctttgggagaacgcccctctgcctgggggtctcctcttgatttccctttgctcttcaaaagatgnnnnnnnnnnnnnnnnnnnnnnnnngaaccacacatttttccgggaggaggtgttcttcacacgcccggaggctgcctgggccccgccgtcatgggaccctctcagtgaagttctcggggaagacgccacggcacttctccagctccttgtgctggttccagttcgctctccttcacgcccatgagccagccttcatccgtgcgtcttcagggttctggaaggggatcaccaggcaccacgatcaccagccttgagctgcagctcgtctgtgtcagtggccgtgtagtcgtgctgggcctgtaccttgaacatgaaacctgggggcaggtcgaagcgcccggcccactgtcgacctccacggtgccattcacagttgctgggaaggtctccagcacgacaggcggcacaaagctgggagctgctaacattgccgcgcttccccggccctgggcccagccgcaggtgggaccacaagaagctcgaggctatga

SEQ ID NO: 71846 - DNA, 462 bp, Homo Sapiens
  misc_feature (100)..(138): n is a, c, g, or t
  misc_feature (233)..(352): n is a, c, g, or t
aatttgaaatgcttgtttatttttaatacaactctaacaagatgaataatctgtgttactacatcattcccataggttatagttgtgcatgatatttatnnnnnnnnnnnnnnnnnnnnnnnnnnnnnnnnnnnnnnncgcatatatttaagagatgatagtaggaaaaaaaagtttcttatttctcatatgcatgtacagctcaataaacatgttacctgggccaggcatgnnnnnnnnnnnnnnnnnnnnnnnnnnnnnnnnnnnnnnnnnnnnnnnnnnnnnnnnnnnnnnnnnnnnnnnnnnnnnnnnnnnnnnnnnnnnnnnnnnnnnnnnnnnnnnnnnnnnnnnntaaaattagttgagcatggtggtgtgtgcctgttgttgcagctacttgggaagcttgagcccaggaattcaagaccagcctggacaatataataagacctcatctttcca

SEQ ID NO: 71847 - DNA, 792 bp, Homo Sapiens
gtcccatacgggaccccgcccaaatacaagtttttttggggctcccgggccagccgcgaaatcaccaagatgcaaatcatggagttcctggccagggtctttaagaaagacccccaggcctggccctcccgatacagagaagctctggaggaggccagagctctgcgggaggctaatcccactgcccactaccctcgcagcagtgtctctgaggactagcaaagtctggaggcagatgaatggtttctgaccctcaccagggctgtggaagggtgggggtgggtcattatagtattcaggatttacagtgcagtattcacgtgtaacttttaagttttcagtacagtgcttttatacctttaatgcaatgttgtattcatttgggtactattgtgtagtatttaggatgtatgcatgtttgtttatatgtaagcttggttggtgctttcgcttttgtgctacctttcttggatttttgtaccagagatgtgctaaactgatgaaatacattgagaaagtttccatcttattcttttatatgggactgatgatgtgtgttggggtagactgctcctgcagagtttggaagaagtcaccagcaaagccggcctaaccaagaaaagtcaaggcccttcatgaccttgctgggcacagaaaacaccctcgtggagtacactaatttgaactggactggtctcagtgtgagcacttggcacactttactaaacacatatacaaccccaccgtgagtcaactttaaagtaaacattaaagattcttgtgatacaatca

SEQ ID NO: 71848 - DNA, 998 bp, Homo Sapiens
  misc_feature (55)..(55): n is a, c, g, or t
  misc_feature (59)..(59): n is a, c, g, or t
  misc_feature (248)..(248): n is a, c, g, or t
  misc_feature (272)..(272): n is a, c, g, or t
  misc_feature (306)..(306): n is a, c, g, or t
cctacagactgtcttgtgtgcacagccattgtgctgcgagacggggaatacaaancgcncatgagtggacaccttgcgatatgagctgtacagcttgcaagtggcagcccacatgacaatactcgagaacttggagctcttatagcgccaggaaagctggagctgctgagacatggaggatgtgccatgcgtcccggagacagggcactgaccctatcagccagacgaaggtggcagagctgcttggngagagtgatggtagaaggacctcncaggagggccctggagacagtgtgaaattcgagngaggtgaagatgcttctgtggctgtggagtggtccggggatggcagtgggaccctgcagaggagtggctctcttggcaagatccgggatgtgctccgcagaagcagtgaactcttggtgaggaagctccaggggactgagcctcggccctccagcagcaacatgaagcgagcagcctccttgaactatctgaaccaacctagtgcagcacccctccaggtctcccggggcctcagtgccagcaccatggacctctcttcaagcagctgacattcaacccggcccccaggtctgctgggtccccccacccccacagccctcacagcattccccattgctcctggctcttccccacccctaggtgggacagtgaaggggagcagtttaaccagaagattgctgctgcccttagggtctcagctccctcctcaggaatccctcttaggaaggaccctcaggacaccctctctgcaccctgtggtcctctagagtagctagctctgaggccccaaggtgggtacaaagcaggtatggccctcagagatgcagcctgctgctggcttttcagtcagagggttgggggctggccagccaagctgccttgccctggccgctcttactccctccctctgctgtctcacttcaggtccatgtatttcacttttcttaaataaaagaatcaggtaacctttc

SEQ ID NO: 71849 - DNA, 469 bp, Homo Sapiens
gcaatcttctggttaaactgctccccttcactgtcccacctaggggtggggaagagccaggagcaatggggaatgctgtgagggctgtgggggtggggggacccagcagacctgggggccgggttgaatgtcagctgcttgaagagaggtccatggtgctggcactgaggccccgggagacctgaaacagacaacactaccccatcagctcagggacctcggcctcccaaagactggctcctagagtccatccatcccatggtcacagtgtatctctggacctaggatcacatctgtctctggaccagtctatctctggacctgggactttgtttagcctctgctagggttttccagaaggccacaatctggtggagaagctacctggaagaaccacatgaatactggcatatacttgtgtgttgatacaagaagtcatttgccattaaaatatcaatagtgttttctc

SEQ ID NO: 71850 - DNA, 581 bp, Homo Sapiens
  misc_feature (346)..(346): n is a, c, g, or t
  misc_feature (484)..(484): n is a, c, g, or t
  misc_feature (523)..(523): n is a, c, g, or t
  misc_feature (532)..(532): n is a, c, g, or t
  misc_feature (545)..(545): n is a, c, g, or t
  misc_feature (566)..(566): n is a, c, g, or t
cccggaccaagaacaacctggcttcctgttacctgaaacagggcaaatatgctgaggctgagacactatacaaagagatcctgacccgtgcccatgtacaggagtttgggtctgtggatgatgaccacaagcccatctggatgcatgcagaggagcgggaggaaatgagcaaaagcccggcaccatgagggtgggacactactgctgagtatggaggctggtacaaggcctgcaaagtgagcagccccacagtgaacactactctgagaaacctgggagctctgtataggcgccagggaaagctgggtccccccacccccacagccctcacaagcattccccattnctcctggctcttccccacccctaggtggaacagttgaaggggagcagtttaaccagaagattgctgctgcccttagggtctcagctccctcctcaggaatccctcttaggaaggaccctcaggacaccctctctggancctgtggtcctctagagtagctagctctgaggccccaangtgggtacnaagcaggtatggncctcagagatgcagcctgctntgggcttttcagtca

SEQ ID NO: 71851 - DNA, 852 bp, Homo Sapiens
tgcagctgcccacctcaccctcagctctggcctcttactcaccctctaccacagacatggctcagtcactggctctgagcctccttatcctggttctggcctttggcatccccaggacccaaggcagtgatggaggggctcaggactgttgcctcaagtacagccaaaggaagattcccgccaaggttgtccgcagctaccggaagcaggaaccaagcttaggctgctccatcccagctatcctgttcttgccccgcaagcgctctcaggcagagctatgtgcagacccaaaggagctctgggtgcagcagctgatgcagcatctggacaagacaccatccccacagaaaccagcccagggctgcaggaaggacaggggggcctccaagactggcaagaaaggaaagggctccaaaggctgcaagaggactgagcggtcacagacccctaaagggccatagcccagtgagcagcctggagccctggagaccccaccagcctcaccagcgcttgaagcctgaacccaagatgcaagaaggaggctatgctcaggggccctggagcagccaccccatgctggccttgccacactctttctcctgctttaaccaccccatctgcattcccagctctaccctgcatggctgagctgcccacagcaggccaggtccagagagaccgaggagggagagtctcccagggagcatgagaggaggcagcaggactgtccccttgaaggagaatcatcaggaccctggacctgatacggctccccagtacaccccacctcttccttgtaaatatgatttatacctaactgaataaaaagctgttctgtcttcccacccaaaa

SEQ ID NO: 71852 - DNA, 453 bp, Homo Sapiens
  misc_feature (374)..(393): n is a, c, g, or t
aagaattcggcacgaggcccagcctcaccagcgcttgaagcctgaacccaagatgcaagaaggaggctatgctcaggggccctggagcagccaccccatgctggccttgccacacttctttctcctgctttaaccaccccatctgcattcccagctctaccctgcatggctgagctgcccacagcaggccaggtccagagagaccgaggagggagagtctcccagggagcatgagaggaggcagcaggactgtccccttgaaggagaatcatcaggaccctggacctgatacggctccccagtacaccccacctcttccttgtaaatatgatttatacctaactgaataaaaagctgttctgtcttcccacccnnnnnnnnnnnnnnnnnnnngaccgcgtatgcggccgcaagcttattcccttgtagtgagggttaattttagctaggcac

SEQ ID NO: 71853 - DNA, 1062 bp, Homo Sapiens
  misc_feature (12)..(12): n is a, c, g, or t
  misc_feature (266)..(286): n is a, c, g, or t
  misc_feature (373)..(855): n is a, c, g, or t
  misc_feature (1006)..(1006): n is a, c, g, or t
ttcttcctaccncccttctccctctcccttcccctgactgttccacccaggaggaggaaacttcacatagccgtgctcacagttttttattttaaaggaatttggctggggagctgaacagggctccctgtgatctgaagaaagcttttggtgcttgtcctcacaaccacctcagtcctccctccctgtcctcccctgtctcctttcctcctcctgggttcatgttgtaataaaagaagattgttggtgtgtaattaatttgttcnnnnnnnnnnnnnnnnnnnnncaagaaacttggttccaactgaagcctattttaattttattttattattttcctcttgttagaaataaacctcgtgccgaattcttnnnnnnnnnnnnnnnnnnnnnnnnnnnnnnnnnnnnnnnnnnnnnnnnnnnnnnnnnnnnnnnnnnnnnnnnnnnnnnnnnnnnnnnnnnnnnnnnnnnnnnnnnnnnnnnnnnnnnnnnnnnnnnnnnnnnnnnnnnnnnnnnnnnnnnnnnnnnnnnnnnnnnnnnnnnnnnnnnnnnnnnnnnnnnnnnnnnnnnnnnnnnnnnnnnnnnnnnnnnnnnnnnnnnnnnnnnnnnnnnnnnnnnnnnnnnnnnnnnnnnnnnnnnnnnnnnnnnnnnnnnnnnnnnnnnnnnnnnnnnnnnnnnnnnnnnnnnnnnnnnnnnnnnnnnnnnnnnnnnnnnnnnnnnnnnnnnnnnnnnnnnnnnnnnnnnnnnnnnnnnnnnnnnnnnnnnnnnnnnnnnnnnnnnnnnnnnnnnnnnnnnnnnnnnnnnnnnnnnnnnnnnnnnnnnnnnnnnnnnnnnnnnnnnnnnnnnnnnnnnnnntcgcgctaagtcagaggggcgaaccgactgactataagatacaagcgtttcccctggagctcctcgtgcctctctgttcgacctgcgactacggtactgtcgcttctcctcggaagctgcgcttctcaactagcttagtactcatcgttangcgtcgtcaactggtgttgacaacccgtcaacgacgtggctatcgtatacgctggc

SEQ ID NO: 71854 - DNA, 1105 bp, Homo Sapiens
  misc_feature (1023)..(1046): n is a, c, g, or t
ttacggtctaggtacgaggctgggttcgaattcggcacgaggcgaccgggccggcgctggggtaagaagcctgctgagggatgcccaagaagttccagggtgagaacaccaagtcggcagcggcccgggcacgtagggcagaggccaaggcggccgctgatgccaagaagcagaaggagctggaggatgcctactggaaggacgacgacaaacacgtcatgaggaaggagcagcgcaaggaggagaaggagaagcggcgcctcgaccagctggaacgtaagaaggagacgcagcgcctactggaggaggaggactccaagctcaagggcggcaaggcgccgcgggtggccacgtccagcaaggtcacccgggcccagatcgaggacacgctgcgccgagaccatcagctcagggaggccccggacacagccgagaaagccaagagccatctggaggtgccgctggaggagaacgtgaaccgccgcgtgctggaggagggcagcgtggaggcgcgcaccatcgaggacgccattgcagtgctcagcgtggcggaggaggcggccgaccggcacccagaaagacgcatgcgggcagccttcacagcctttgaggaagcccagctgccgcggctcaaacaagagaaccccaacatgcggctgtcgcagctgaaacagctgctcaagaaggagtggctccgctctcctgacaaccccatgaaccagcgggccgtgcccttcaatgcccccaagtgagcccagaacttggggagccagttcacccacgggtggtccaggtcacgactctgcacgcccttaggccaggtcagctgcgagggtcacagagcgttccgggggccaaggcgccgggcccctggggccatgctcttatcaccagccacccgtcctcccgccagagggtccctgccccgagtgacaccccatcccctcccatcccccggcgcgtgtgtgtagagcctcagggctgagtgcccaataaaggtggcggcaaggctgcggtgaggcnnnnnnnnnnnnnnnnnnnnnnnncctgagcaggcggccgcaagcttattcccttgtagtgagggttaatttgagcatggcac

SEQ ID NO: 71855 - DNA, 341 bp, Homo Sapiens
  misc_feature (135)..(180): n is a, c, g, or t
  misc_feature (231)..(251): n is a, c, g, or t
gactgttccacccaggaggaggaaacttcacatagccgtgctcacagttttttattttaaaggaatttggctggggagctgaacagggctccctgtgatctgaagaaagcttttggtgcttgtcctcacaaccannnnnnnnnnnnnnnnnnnnnnnnnnnnnnnnnnnnnnnnnnnnnngggttcatgttgtaataaaagaagattgttggtgtgtaattaatttgttcnnnnnnnnnnnnnnnnnnnnncaagaaacttggttccaactgaagcctattttaattttattttattattttcctcttgttagaaataaaacccttagaaacattttttgg

SEQ ID NO: 71856 - DNA, 940 bp, Homo Sapiens
  misc_feature (38)..(38): n is a, c, g, or t
  misc_feature (45)..(45): n is a, c, g, or t
  misc_feature (549)..(608): n is a, c, g, or t
  misc_feature (749)..(789): n is a, c, g, or t
  misc_feature (839)..(859): n is a, c, g, or t
acattgcaaatggcgttcttcggatggtggggggcctnccagggnggccctccttccagccacgggggcgttccaggttttcttcccagcggcactcccagatgggctcttggctttctcggctggtccgggggcctccctgagctgatggtctcggcgcagcgtgtctcggatctgggccccgggtgacccttgctggacgtggccacccgcggcgccttgccgcccttgagcttggagtcctcctcctccagtaggcgctgcgtctccttcttacgttccagctggtcgaggcgccgcttctccttctcctccttgcgctgctccttcctcatgacgtgtttgtcgtcgtccttccagtaggcatcctccagctccttctgcttcttggcatcagcggccgccttggcctctgccctacgtgcccgggccgctgccgacttggtgttctcaccctggaacttcttgggcatcccgcaaactgggggactctcctcccttctctccccagttctggtcctggccaggccatgctacactaacccctgnnnnnnnnnnnnnnnnnnnnnnnnnnnnnnnnnnnnnnnnnnnnnnnnnnnnnnnnnnnngactgttccacccaggaggaggaaacttcacatagccgtgctcacagttttttattttaaaggaatttggctggggagctgaacagggctccctgtgatctgaagaaagcttttggtgcttgtcctcacaaccacctcagnnnnnnnnnnnnnnnnnnnnnnnnnnnnnnnnnnnnnnnnnggttcatgttgtaataaaagaagattgttggtgtgtaattaatttgttcnnnnnnnnnnnnnnnnnnnnncaagaaacttggttccaactgaagcctattttaattttattttattattttcctcttgttagaaataaaacccttagaaac

SEQ ID NO: 71857 - DNA, 1475 bp, Homo Sapiens
ttctttgtattgttgcatttagtacaatcagtgtgtaaacttactgtatatttatgctttctgtatttaccagctattttaaatgagctgtaactttctagtaaagaattgaaaagcaaatctcactaatgatacacagatagataaagcaagtctatcaacattaaaaatactaaaaaataaagacacacacagagcattttagtgacatccactacttattgccgctatgagttagagtctatcagtgttcttgttataaccccctattttcagggggttaaaaatcagctttaaaaaaatacataaaaatttcatcttaaagcactttcattttataccaacgtgaaaagtgccatttttagaataactttaaagcttaacaggtttccttttaatatcctttttttgtgtgctctttacttacacaatggctttgttttgctttttcagccacaccccttatgtgaactagtgcctttgggtatcacgtaaaattttttccaaagggttactttaaaaatctgttaccacaattatgagatgatttttaagtgataaattaaacttcttcttgtataaattctgcccagatctctccacaagagctgagggtttcataactttatggcttaataaatgtatgacactgaaaagatttgagtgtgaatctactgaaatcactataatgcacattgaagctatgatggtatttgagtagtgaggttacttttgatcggagcaacataatgctcatagaatcttctagaagaagagaaacaaagggattgataaaatgctgagaactagtgattatatatttttctgtatttacctgacatttattttaatgttcaaaaagtaaacactttaagtttgatgtgttttactctctcattgttttaagtaattgccaactcagaatacatcattcttaggctgaaatttgtctttccattttttaaggtgaaatagtactaccttacgtgatagcatacaaagaagaaagctctagaaagagaaattatggagaatgattatttaaattacaattaaggaaatgagaatatgatcccctcttccgagttgcccacaaacttgcttctttgcttttgctccctgtaatagaactacttttcaacaaatctaattttgcacggcaccgttaaccatattttcactacagcaaacttagtgctaagggtttcctttttctttgcttttttccttgatcacttgcataggaaaacataatttcccagcgctattttgcatatatatttttgtccttccaatattttgccttacagatggaaaattaaatgtttatacctcgaaattcttggggttggggggccaaaatatttaagcctcgaaaataatgcctggggggggattttggttttaaaaaacaagcctttatttttgaaaactgccattggggaatttgggaatattgcccctcttaatttttt

SEQ ID NO: 71858 - DNA, 668 bp, Homo Sapiens
catgtgtgcaatgccttgctgtggcccccaaccatctgcttaggcctcccaacttctccccaggccaagtatggggccctggctgtgttctggaagttcaagacacttagtcctccacagtgggtggaagagtgcaaggtctgccaggtcagatggagacgcagaacctgctggtgcaagctgggcaggtcctgaccaacctgcatcaggggatgccctgagctccacaggtcttcatgggcaggggttgtgggtcctggtgaaggaagtgcatcctcaggcctgggctgtagcaagctgtctgcccttgggttcaagaaccagactgtggagccaaaggtgaccgcagggggccccagggctggagccacaaggataccctcactttgcatgaggagctgaaactgaccagtgtccagtgttagcccccacatggggctgctcttgcttctactaaaagatacagcagttacccccttatccacaggggatacagtggatatctaaaaccagacccccagtggatgtctaaaaccacagataataacaaaccttatacatactgttttttcctatgcatacatacctgtgattaagtttatgaattaggcaccttaagagattgacaacaataactaataataaaatgtaacggttatactgtaaaa

SEQ ID NO: 71859 - DNA, 935 bp, Homo Sapiens
cagggtaaacccgtatttatttactagcactgttaaaacattacacaaaacacattcaagtggcaagtaattataatgcaagcccttgcatggcaatccaaatttattgaactactgatgctaagttatacaaaattgcaccactttaattaaggcttttagtttacatttggccacctcaaagtagttgtaacattaggttggtcaatttaaatactgtggctccctgttggatagacacacaatctttacatccaaacattaatgcatacaaagcaacaaggcattgttaaataaaacagcaatagttactgcaaattaggccttgtgaccaattacatatgattaaaattacttcccacattcacatccacagtactcgtccaccatttaacatctcaaccaaaacgttacacatgtgaaacaatcactaacaggcaaaaatactaaacctgtatatttggtattgcaaatacacttatgcatgagcaagcaagggattcacagtgagaatctacagctgcagaagcctgaaaatgatttacaaaaattgttaaatcattaaaaaattgtttgaaaatatacacttcttgttgtagacccccactgtacacacgactataaacattgttccctatgtaaacaaaaaaaggaaacatataataagagatttgaaaagtctggacatttccttcccaacagatattaaaggcaacgtctttaatctaagacattatactgaaaggactatcatgttttaaagacaagatcaccgtctccacaggttttttaaaaattaaaaaaactatatagctgtgttaatcaaagcgcttattttgtacaataataatgaccttgaatttcttaaaaaaaattacaataagccccggccgtaatggccgaattcccgggcatatgtccggtaccgtcgactg

SEQ ID NO: 71860 - DNA, 452 bp, Homo Sapiens
gcacgagggcaagcaagggattcacagtgagaatctacagctgcagaagtgtatttgcaataccaaatatacaggtttagtatttttgcctgttagtgattgtttcacatgtgtaacgttttggttgagatgttaaatggtggacgagtactgtggatgtgaatgtgggaagtaattttaatcatatgtaattggtcacaaggcctaatttgcagtaactattgctgttttatttaacaatgccttgttgctttgtatgcattaatgtttggatgtaaagattgtgtgtctatccaacagggagccacagtatttaaattgaccaacctaatgttacaactactttgaggtggccaaatgtaaactaaaagccttaattaaagtggtgcaattttgtataacttagcatcagtagttcaataaatttggattgccatgcaagggcttgcatt

SEQ ID NO: 71861 - DNA, 1269 bp, Homo Sapiens
aagaggaaaacccggtaatgatgtcggggttgagggataggaggagaatggggaataggagttaacacattcacatttactgtctattttcttgtgtgccttatgagatggcttttctgactgtatctcaatagtctttctttctatgcaggtttataatcagtacaactactgttttctaaaatactactactcaaggctcggagtttgtatttaaattacactgaccaagtaacaatgtattccatttcaggaactgaatatttgactgttaacctttttcccatacgtccagtgtggcatggagcatatggacttgacagacatctctcacccagacgcccacgtgtgaacacacccacatccacatctctgggtggaaaccagcctagagtggggacgacgctaatggtgttgctttagaaccgtcttttcttacccttttagactcgtgttttgtatgagacaccattgcaagaaaattttatccctccagaagtattttattactaaagaacaaaagcaaaaaaagcttaaattgcactggttaaagtacagtttccaacagctgtccttcctcagtactctaatggccactccaccgcgagtggaagtcactgttgtgtgtacacaggtggtcccaatcaaaactccatcttttgagcccaattatgtccattttgttatagactaaatcaggggtttgttctacaagaacaatacatgttttaccctttcctttaactagaaggataactagtaatgcatcaacataatttctgtattaaccatcatgcgcacaagaaatacatagtaaataaggaagctgaaaactcctggcattggatcttaagctagatgattagaatgtgaaaaagattttacaaatgtaaaacttctatttctctgtagaaactttcttcactttgctgtgcaagaagacactgctttgctatatttaaaatggcttttttaaaagagatttatgtatttggtaaatgtttgtagtcaacagttcacacaagaagctgtacacggtttgatcatgtaaaaccgtttggcggcacaagctggactttgttgccatccttgagatgaaccttttaagaaaaataagttaatctcaatttttccctgaatgtgttgtttttcttcattatacaataaatataatagtgaactttttatcaaatggtgaagacaatgctaaaggttgttgtaaactgtttgtctcccgcactcactccagtaaagacggactggctcttc

SEQ ID NO: 71862 - DNA, 958 bp, Homo Sapiens
  misc_feature (214)..(214): n is a, c, g, or t
  misc_feature (235)..(235): n is a, c, g, or t
  misc_feature (239)..(239): n is a, c, g, or t
  misc_feature (241)..(242): n is a, c, g, or t
gagaatactaactctaacttagtattctactccaagacaaagggtattatgttagagttagtggatttctagtttaggagaggagctcaaaactataatctttaacaaattgaaaaatgaaatagggtgttttccctttttgtgcacacctatattaccttaagaaatttccttccatagacagctgcctcaaagggaaatcctctttaaaccngtagttggcgcagaggtcagncctnanncctagtcggagcttaggaggggcggagacgctcacatcgtctgacttgagtcgccactgattgtggcaacagctttgcctcatgagtcaaaaattggcaatttcttttgatttttagttgttgaatttgctgtttcaagcatttgtacatattagaagtctaaggagtagcaagtcagtgggaggactttttcacccctggcattagcagcttcgacctcattttccagatgcaccagctcctattaataagttagcaaggaaagtgtatgtcacgtgcaggaacagtgaggcagggacaggggttctgctccttctcacttcaccaccggcacacagcttgcccctgtctttgcccccaaaggtattttgtgtctagtgtcaaattggagctattcttcactggtccttaaccttgggttttaaaaagaaggcttctctgtttgggtagcgtaagagctgagtatagtaagtcctcttccaaagagatggcaatatgctgggcatctactttaaaacaaagttgtctgatttttgcaagagaggttaggattttattgttcttatttccctttacagttctgcagttccatcacagtatttttttaaataactcaggtgtatgagaagaaattagaaaagaaaattaacttatgtggactgtaaatgttttatttgtaagattctataaataaagctatattctgtaattgttga

SEQ ID NO: 71863 - DNA, 687 bp, Homo Sapiens
atcggtagtcaggcctggtgttaattcggcacgagggagagtttgtgcggcgacatgaaactgcttacccacaatctgctgagctcgcatgtgcggggggtggggtcccgtggcttccccctgcgcctccaggccaccgaggtccgtatctgccctgtggaattcaaccccaacttcgtggcgcgtatgatacctaaagtggagtggtcggcgttcctggaggcggccgataacttgcgtctgatccaggtgccgaaagggccggttgagggatatgaggagaatgaggagtttctgaggaccatgcaccacctgctgctggaggtgagaagcggcccatcacttgcttcccgggccacctgcctcccgcactgaggctgccagtgctcagctctgtccctccctgcccgcaggtggaagtgatagagggcaccctgcagtgcccggaatctggacgtatgttccccatcagccgcgggatccccaacatgctgctgagtgaagaggaaactgagagttgattgtgccaggcgccagtttttcttgttatgactgtgtatttttgttgatctataccctgtttccgaattctgccgtgtgtatccccaacccttgacccaatgacaccaaacacagtgtttttgagctcggtattatatatttttttctcattaaaggtttaaaacc

SEQ ID NO: 71864 - DNA, 3540 bp, Homo Sapiens
  misc_feature (70)..(112): n is a, c, g, or t
  misc_feature (115)..(149): n is a, c, g, or t
cacgcggaaggacagaccgaccaccccaaccaaagaatgatagatcactatagggcgctagcgcgttttnnnnnnnnnnnnnnnnnnnnnnnnnnnnnnnnnnnnnnnnnnncgnnnnnnnnnnnnnnnnnnnnnnnnnnnnnnnnnnncagtcgacggtaccggacatatgcccgggaattcggccattacggccggggggccacccgcagaacagagcttccgggacccacgcctcgtttgcactgggtgctggacagccgacgcaactacaaatggggcggagctttcggcactggagcagctaatttgcatataggaatgaggtgcggctcggcttccatgggcctaatttacagatagggcggtatttctgccccttaaccgaaagtgggatacagaggacgacggtgttaggcgcctgtgtacgagtaaaatgtgtctattttgcattcaacgagagctcctgcattgcagctattttgcatatgatttgcatcttacgaagaatttgtggcaaacaaaagctgggcgtgcgccgtaggaacctcctgctgagacgcttccggtagcggcgcgtgacccgacaggtctttcagctacctacctcagctcccacaaacacgacgaagttccagcaagttcgccacttccggttctcctggctatccaatagcatcgagtggagcatccccggtacgtgaggcagcggaggacgacctttttccggttccggcctggcgagagtttgtgcggcgacatgaaactgcttacccacaatctgctgagctcgcatgtgcggggggtggggtcccgtggcttccccctgcgcctccaggccaccgaggtccgtatctgccctgtggaattcaaccccaacttcgtggcgcgtatgatacctaaagtggagtggtcggcgttcctggaggcggccgataacttgcgtctgatccaggtgccgaaagggccggttgagggatatgaggagaatgaggagtttctgaggaccatgcaccacctgctgctggaggtggaagtgatagagggcaccctgcagtgcccggaatctggacgtatgttccccatcagccgcgggatccccaacatgctgctgagtgaagaggaaactgagagttgattgtgccaggcgccagtttttcttgttatgactgtgtatttttgttgatctataccctgtttccgaattctgccgtgtgtatccccaacccttgacccaatgacaccaaacacagtgtttttgagctcggtattatatatttttttctcattaaaggtttaaaaccaaaagcggtttctctttgcagcaaatatacattaaaatagagtctctgtacagccaagggctctgggccctggcttgccccatgtccctgcgcctccctggccaaacccaaaaataaatatagtgttattgctctgcagggcatagaggcagtgctctcctaccccctgaggaggctcgttgggagctgatggggaagccctggccaccccaggggtccaggggctggagtctgcttggagttattgcttcaaggggggacactaatgcccaatgcaaatgatgagaggaggagcgaagggggcatgggcctttgctctccaagtcccactctgctttgaagagggggtaggattaagcagcagcaaaagcatcacccactgggagactctggcctccatccccttccctccctgagataggtttctgcctcccacgcatcccgtgcagccccctatggcttccgcaaggccccctacactctgggggcacgttatggcttgcaaggggcagcactgtgcccagagcctggacacacgttcccagcttctgacaccccctaggagggggaggagagggcgtggggcctgttcccaggggctgatggcattgccctggccctgccagcaggctgtggcactgcccagaccccagctccgccccagcccttggggctgaccccatgctaggcaggtcctgccagaacccccaccagtcccaccccttgcctcagtccatcatggcctcgagcatctccaagaacagcttgtgcatgggcaccttgccctccagcttcaccccatagaaatgggccagcactttgcccgctgtctggcggaggagcggtagcgtgagcagcagcctgcccgcccgccgccgctcagcaccccctccggggccagcccggccggcttcatactccagcagggcctcgtgcagagcttctcgcagctgctccacagcctcggcatcttcgatgtgcacagagtctgaattggcaagggccaaggcctttagtagaacatactcctctcgctccagccgcagggcctgcagccgccgcactagttgcagcagggcagcccccagttcccccaggccagctgcccgtgccccctcttcatccaggactaagtcctcagcgaaggccagctcatcctgcagtggcagtgagcgctgggccacacccagcaccagcacctccatccacacgctctgcagtactgacatctggtcagacagcgacagcgatgagaagcctgggatgctcttggcccagctgatggtgaccacaatctctcggtcaaagaggtcacagagggtagccacggctgggaggtgcccatcagggcctgcgggtcaggcatggcatagagcttctcaggctcaaccaccagcagatgagacaccagtgcattcactggggctgctgtcttccgggggcctccagcgactgccaggggcccagcagggaaggggcccgggaagggcagtgggtccacctccggccgccgcttgtacttctgccgcccaccccggacgcggtccaggcgcactccctccttgagcatgcccacccgcaggcacttggtgaagcggcaggcctggcaggccttgcgtctccgcttggtgatctcacactcgttggaggccggacagctgtactcgatgctcccctggatggtcctcttgaagaaggctttgcaggcctcacaggatgccacaccatagtggtagccggaggccacgtccccacagaccaggcagaggcgcttgggcagggagctgagcaccagcttcccaccgccctgctcgccaggcccagccccctccccatcctcctcttccttgtggcctgggaggcagcgagtgggagctggaccaggggccagggccacaggaggctcggtctctgtctccgaggaaccctttggactgtcagggctggccggctctgccttgatgtagagaggctcaatgcccaccacctggctggacatggcgctggtcacctggggctccggcagcgcggtcgggcaggcatgggggccgagcggcccggagtgccggagtgagccgggggccgcgggcggcccctcctccgccgcctcctcgggccgcgccgccccaccgcgccgcgtcccctcactcggcggcgccgccggctgcttgtaggacacaaaaggacatcgcggccgctcctcgtgccggattcgccacccaggcctcgctaccta

SEQ ID NO: 71865 - DNA, 635 bp, Homo Sapiens
gatggtggtcaggaaccccaaaggcgaggtggtggagggtgacccggacaaggtgctgcggatgctgtacgtgtgggcgctctgccgagaccaggacgagctcaacccctacgcggcctggcggctcctgcacatctcggcctccagcaccgagcagattctctgagtgtggtgccggagccaggtagccccggcctgggtcatcaggcacagaggcaccgcaacaccaactgcggcaactccagacctctgggaacaagactgacggctctgcccccagctctgccaggacggctgcaagaccagctggcccgggaggggacaacgggctgttgcgggtgcgcggcagctggagacactctccccgcagggccaacccctgccctgttgctctgccctgcaggggtcccggcgcctggtcacctggggtgcacacaggtcacacagtgccaagaagccccagggcccagggactccccccacagcagggtgggacccgggacccgcggctcagtggcccgctagccacgtcagccaagccactttaggtccatttttttattttaacagtgctcttccatcttgtgcataagcctgagatttggaaagaataaaacaccgaattgcagaagagc

SEQ ID NO: 71866 - DNA, 643 bp, Homo Sapiens
gagtttttaaaagcatgtttatgtgactgcacataaatgtttgtgtaaaaagagcattatgacagttgataccacaaagattacagtaagaaaaagcactttatgacaatatttcacaaattcacaaggatcactttaatatacaaagcaactgctaccattctgaacacaaagcagctattatgtacatagtgttaataaaatgcattgtaactcagtacatttttttctttacacataaagcacaaaaagatttagataaaaaaattaaaacagggatgtttctagaatgtagggaattttattagaaatgtatttccctcattatagttatttatttagtattcaactccaatagaaacatcagagttaaaaatcaataccctgttttgtgctgacagttgtgggggaagtcttctttaccccaaccctcaaaaaccaaaaagccaaacacctttctaggaacttccctgattattttgcttctaaaaagtttcaagtgatacatctgggttagaaataattccttttgcagggagtgggggacttacaactgacatgtggacaaatcagtcaaggacaactttacatggaaaactgctaactagcactcttctttgccacccctaataaatcgatactc

SEQ ID NO: 71867 - DNA, 1177 bp, Homo Sapiens
  misc_feature (784)..(837): n is a, c, g, or t
  misc_feature (875)..(905): n is a, c, g, or t
ttggagaaggcagttcaggaggagaggacccaaaaccaagtgttcaagactgagctggcccgggagaaggattctagcctggtacagttgtcagaaagtaagcgggagctgacagagctgcggtcagccctgcgtgtgctccagaaggaaaaggagcagttacaggaggagaaacaggaattgctagagtacatgagaaagctagaggcccgcctggagaaggtggcagatgagaagtggaatgaggatgccaccacagaggatgaggaggccgctgtggggctgagctgcccggcagctctgacagactcagaggacgagtccccagaagacatgaggctcccaccctatggcctttgtgagcgtggagacccaggctcctctcctgctgggcctcgagaggcttctccccttgttgtcatcagccagccggctcccatttctcctcacctctctgggccagctaaggacagtagctctgactcggaggctgaagatgagaagtcagtcctgatggcagctgtgcagagtgggggtgaggaggccaacttactgcttcctgaactgggcagtgccttctatgacatggccagtggctttacagtgggtaccctgtcagaaaccagcactgggggccctgccacccccacatggaaggagtgtcctatctgtaaggagcgctttcctgctgagagtgacaaggatgccctggaggaccacatggatggacacttctttttcagcacccaggaccccttcacctttgagtgatcttactccctcnnnnnnnnnnnnnnnnnnnnnnnnnnnnnnnnnnnnnnnnnnnnnnnnnnnnnnttaggtttcatgcccattttctatcacactgggctccnnnnnnnnnnnnnnnnnnnnnnnnnnnnnnntgtgccctgtgttcatcccaagatttctcacttcatcctctcctacctggctcttttgtcccagggaggggtcctgttcggaagcagtggctgaatttatcccctgaaagtggtttggaggaaccgggatggacggaggccttcccctgtgggaatagaatcggtccactcctagcgctggttgcttctgatacacagccactgacacacaaactcacactcacatcccttgtctgattgcccaaagcaattcctggggcacctaccctctt

SEQ ID NO: 71868 - DNA, 884 bp, Homo Sapiens
  misc_feature (70)..(122): n is a, c, g, or t
  misc_feature (160)..(190): n is a, c, g, or t
  misc_feature (382)..(416): n is a, c, g, or t
gcggccgcggatggtacttctttttcagcacccaggaccccttcaccttagagtgatcttactccctcgnnnnnnnnnnnnnnnnnnnnnnnnnnnnnnnnnnnnnnnnnnnnnnnnnnnnnttaggtttcatgcccattttctatcacactgggctccnnnnnnnnnnnnnnnnnnnnnnnnnnnnnnntgtgccctgttttcatcccaagatttctcacttcatcctctcctacctggctcttttgtcccagggaggggtcctgttcggaagcagtggctgaatttatcccctgaaagtggttttggaggaaccgggatggaggaggccttcccctgtgggaatagaatcgtccactcctagccctggttgcttctgatnnnnnnnnnnnnnnnnnnnnnnnnnnnnnnnnnnntcccttgtctgatgccccaaagccaattcctggggcaccctaccctctcttatttggagtttccgttggtttacctgagttttctctggggtctgcacagaggcagcagcatggacatcatggcctctcaggtcccttttggttctcagtttcattggttcctctttctgttcccccattgacttctgtgccccaccctagccttttccataaccttaggtattcagtttggaggggttttttgtatttttgaggattcctgtattctgtatcctctcctcgcatctcctcacatggaaagaaataatgtatttgtgccttctgtgaggaatggggggaacaagtggtcccaggtatccccatttccaaggcccccctccctctccaggtccccccacagcaataaaagcttccccctgatatccatccctttgtagtttgaacaaatatatttatatgatatgtaaa

SEQ ID NO: 71869 - DNA, 1040 bp, Homo Sapiens
  misc_feature (174)..(174): n is a, c, g, or t
ccccgacttcaacaaagatgagtcttgttcttttcatatccaagtgctcgtagcagccatgacgttggttttaaagactaagtgaccttttggatatgatgttcccaggacagcgctcctttgtttaaacaaatcccccagacgagagtcaccagctgatcgtgcatgtgaaanaggaaccgaacgcccggatcatgacaaccgcgagtatgaagtcctgcctcgtgggccacagctgctgtcttgctcctgacagtcaaatgcctcctctgagcctagctcgtgagatgaaagaacagaagtgtttggaccttagagccattgtccacaatcacggatgttctcaagagttgattgtaagaaatttccaaagaaggctgcctgcatagtggttccggctgccctttctaggtgattggaatcagcccatctaaagcagtctttatatgcattccgaggccagagtaacattttgaactttggggggatatttgttcatcacttgggtagaagaggagcaaaaatacctctgttttctcttgccaaagtaagatgaagctattccaggttgagggatttttctttgcacggggttgattaatttctgcacagggagtgagattattaaagtaacacacacacaaagtaaattgcaaaatgaaaaaaattagaagcaaatgagttttggaccaatattgttgataaatctaaattgttaagagagatcttataatgcaacatcaaattctttattcaattttactgaagtactggctctttcctgctctggacaagaattgagcaacttgtctgatgactgggaaaggaggacctgcaaccatctgacttggtctctgttaatgacgtctctccctctaaaccccattaaggactgggagaggcagagcaagcctcagagcccaggcctcagtggtcattaagatgttaagtcttttgcggcagattcctggtgatttgatcaataaagagtaatttcttgctaaataaataaaagaaaccttgttgaaaaactaaaaaaa

SEQ ID NO: 71870 - DNA, 1156 bp, Homo Sapiens
cagtcgacggtaccggacatatgcccgggaattcggccattacggccgggtcggtggagttgccactgtagtatgccaaccaaatgagttcataatgccggacagcgccgtcgttggggacgtgctggtgttaaccaaaccgttaggaacccaggttgctgtcaatgcccaccaatggctggataatcctgaaagatggaataaagtaaagatggtggtctccagagaagaggtggagctggcctatcaggaagccatgttcaatatggctaccctcaacagaactgctgcaggtttaatgcacacatttaatgcccatgcggccacagatatcacaggctttggcattctaggacactcccagaaccttgcaaaacaacaaagaaatgaagtgtcctttgttattcataatctgccaataattgccaagatggctgccgtcagcaaggccagtggacggtttgggcttcttcaaggaacctcagctgaaacctctgggggcattactgatttgtctgccaagagaacaggcggctcgcttttgttctgaaatcaaatcctccaagtacggagagggtcaccaagcgtggatcgttggcattgtggaaaagggaaaccgaacggcccggatcattgacaagccgcgagttattgaagtcctgcctcgtggggccacagctgctgttcttgctcctgacagttcaaatgcctcctctgagcctagctcgtgagatgaaagaacagaagttgtttggaccttagagccattgtccacaatcacggatggttctcaagagttgattgtaagaaatttccaaagaaggctgcctgcatagtggttccggctgccctttctaggtgattggaatcagcccatctaaagcagtctttatatgcattccgaggccagagtaacattttgaactttggggggatatttgttcatcacttgggcagaaaaagagcaaaaataacctctgtttttctcttgccaaaagaaagatgaagcttttttccaggtttgaaggggattttttccttttggcccggggggtgggatttaacttttccggccccaggggcaaggtgcagaatttagtttaacaggtaaaccaccacaacctcccgaaggttaaaattgtggccaaaaaatgtg

SEQ ID NO: 71871 - DNA, 761 bp, Homo Sapiens
  misc_feature (62)..(62): n is a, c, g, or t
aattatacaaatgctgaagtgagatcctactattgttaattgcttccttttctttttccttntgcgattttcactgattaatagcacattgtcttcacaaaattagataaagttggtcaaagaccagatattctggaatggaaattgtaaagcttaatcaaaaagaatagccagtacagcatacaatctcagaaacttagaagcaagtagaaaataattggttgatgtaaacgaaagtgccattttagtaaaggcaggaaaaaaatagcaatatttgagttatgtaaggataaaaaatccactgacttgtatttttgcacaagaggctggtctgaatatgattgttcacattaagagtgtttattcgtcggttcattttggggattttcccccttgatgttttgacagattgaagtgagctttagtgagcaaaaggatcagaatgcagggaacactaagctgtgatgaagaaagtgtggtaaaaagccagagtagttttatacagacaaaaccagtgtcaggcctttgcagtaggcttgagtgaacttctgatctagatttgaaagtaaattttatgaagacattgcccatttttacttcctcattcattattgtaccagcatcatagctttattactctaatcccaggtaagtcaagcctacaatgccctagaggaagagtaaaaccagaaattcatgctggcttaaataatctatttttgtttcttttcatttgaatatttaaattttatggtttatta

SEQ ID NO: 71872 - DNA, 1504 bp, Homo Sapiens
  misc_feature (1297)..(1348): n is a, c, g, or t
  misc_feature (1352)..(1352): n is a, c, g, or t
cagactttgtctcctgattagtactcttttcactaatcccaaaggtcccaaggaacaagtccaggcccagagtactgtgaggggtgattttgaaagacatgggaaaaagcattcctagagaaaagctgccttgcaattaggctaaagaagtcaaggaaatgttgctttctgtactccctcttcccttacccccttacaaatctctggcaacagagaggcaaagtatctgaacaagaatctatattccaagcacatttactgaaatgtaaaacacaacaggaagcaaagcaatctccctttgtttttcaggccattcacctgcctcctgtcagtagtggcctgtattagagatcaagaagagtggtttgtgctcaggctggggaacagagaggcacgctatgctgccagaattcccaggagggcatatcagcaactgcccagcagagctatattttgggggagaagttgagcttccattttgagtaacagaataaatattatatatatcaaaagccaaaatctttatttgtatgcatctagaatatgttaaatagttctcagatattaagaagttgtatgagttgtaagtaatcttgccaaagggtaaaggggcctagttgtaagaaattgtacataagattgatttatcattgatgcctactgaaataaaaagaggaaaggctggaagctgcagacaggatccctagcttgttttctgtcagtcattcattgtaagtagcacattgcaacaacaatcatgcttatgaccaatacagtcactaggttgtagttttttttaaataaaggaaaagcagtattgtcctggttttaaacctatgatggaattctaatgtcattattttaatggaatcaatcgaaatatgctctatagagaatatatcttttatatattgctgcagtttccttatgttaatcctttaacactaaggtaacatgacataatcataccatagaagggaacacaggttaccatattggtttgtaatatgggtcttggtgggttttgttttatcctttaaattttgttcccatgagttttgtggggatggggattctggttttattagctttgtgtgtgtcctcttcccccaaacccccttttggtgagaacatccccttgacagttgcagcctcttgacctcggataacaataagagagctcatctcatttttacttttgaacgttggccttacaatcaaatgtaagttatatatatttgtactgatgaaaatttataatctgctttaacaaaaataaatgttcatggtagaaaannnnnnnnnnnnnnnnnnnnnnnnnnnnnnnnnnnnnnnnnnnnnnnnnnnnaacncaacatgttcgaacccttccgccctcaaaaaagctttttcaaaacatttccttgggtgccggggcccccataagggaaacggcacccggggccaaacctggttcccaacgaaaccccggggaacataaaataggggtcgggcttcccccccc

SEQ ID NO: 71873 - DNA, 1533 bp, Homo Sapiens
tttcgggatcaacccactcttgggggattgaggccgcgctgcatgacttgctgaacggcacagggacccctcgaggaacaaggttgcacaccagctttcagccaccatgactgtggggagtggctggaccaagggctgacctccccgactgcatcaaagttggggaaccaagtctcagagtgaggcgggggccttccggatatcacatgggacagaggaagagcccggctggaatctgacttacctggaccgctgtccttgtgaggcattgaatgcccagtgcagtatccgagagactgtttaataacctgtcttcccagccaattggtggtgctggaatcccctaggagccttcagtctgggagaaacagagccagacatagacagttccagcatcacagaaccagaagaagagacctgcaactgtgagagtccagacaggaagcagagaaggcgtccttgcggaaagggcattttagctgaggctttggagtacgaataggagctcagcaggcagacgaatgaggaataaaggtcagagaaggtcagagctgagtgacgtttggaatccaccccgtttattgtagaactgggggttcagagggcaggtgcctcagagttgaggccacacagtgaggtctggtgggtgaaaggacccaggaacgaggcgttcaggaaagcaggttgtcagagctatgtggagtctgtgggtggcaggggcagccgctccagcctttgaagactttgaaagccagagattcctggcgcaggcttggacttcctgggagctcctccaagtacccaggggcatcagagctgcctgggtgttacatggcccagggaacccaggttcagggtaggacaggcaagaccagatacccaatgtgcaaagtgaaaacactgggctccctgttaaacgatgaagaattcaagacagtgacagcattacgtcacccctggggacagaggtcagcctaaggtgacacacggggactactgtgcttccggaggctccctgtgtcctggaggagaaaagcattagagggggcagctggacaagctcccaactgcagagtcccagccctggctggggcagggccccggcctgggactcagcatttctgatatgccttaagaattcattctgttttgtacaattattttttaaaagtaaacgtgtggagaacgcacccacgccatccgctcccggcaccctcagccgcatctgcgggcggcccctgcctccgaaagaattgctcaaccctcttttcgtggcgcgccgccccaatgcgagccggaaaagcccctaccgtgttctccccgaagaccatggggcataagcaccgggttgggatattccccaaacgaaaaaacaccccgcgtggcgaaccagccctcccgtgaaacccacccccaagcgcgttcccccggggtatctcctgggggttcccttacccgcggatgcttccgacgggcgctcgctgcacgatttaaaatcatcctcgcccccgcccctgttacccccttctatcc

SEQ ID NO: 71874 - DNA, 1254 bp, Homo Sapiens
  misc_feature (89)..(123): n is a, c, g, or t
  misc_feature (1129)..(1176): n is a, c, g, or t
gaacactcgacctcacccgtccatagtggccggctacccgtaacgcgaacgaccgagcgcagcgagtatgttgagcgaggaagcggcannnnnnnnnnnnnnnnnnnnnnnnnnnnnnnnnnncagtcgacggtaccggacatatgcccgggaattcggccattacggccgggttctaatccaaaagcaagtgcaaaaacgaaaaaggacaacatgaaatatgctagttgggcagctagtcaaataaacagagcttatcagtttgcaggtcgaagtaagaaggaaaccaaatattctcttaaggctgtcgaagacatgttggaaacattgcagatcacccagtcttaaggtttcaaaaactctttgacattagatttcacaactgcacaattgaacttattggcctgtaacttatttactaaatgctcagtgctatttatatactacagtaattttctgttaagaaggcagttgtaaagaatgtgtttatataaacctaaaaatgccttttactgctaagtggggagatgggggaaatccatggaagagagatttaagacttattgattgtacatcagtctcttcatatcacatatacatgtatatatataaaactctaatgtagtataaccttgttaaataaaccatgatgatttattaaacttgcatatgaagattctaacttcattttgttatactcacagtggatatattgtttaagaactcagtttctagttaactccttactggtgatagcaaagtcacagcatatgtagctgaccgaagcagattattttgactttgtttatattgtcgaattggattttgctgtacattccagtgggctatttgaattgttttatctgctgtaatatccttctgatgaatcttgcttaaaatatgtcattctccaaagttcagcaatatttctttgtaaaatttttgttttgatataggacataattgagatttttacatataaaatgccttaagataaatatgtgttacgacactttaacttttatgcaagttatatttattgaatcctttaatagtaaattacatgaaagaatattaaagaatcataaagagtagggattaaaggggttgtagttatttttaattttgnnnnnnnnnnnnnnnnnnnnnnnnnnnnnnnnnnnnnnnnnnnnnnnnttttcctattctatcattaccttagttagaattttttatttttctcttttcataataaacaaccattatgctaccttc

SEQ ID NO: 71875 - DNA, 1404 bp, Homo Sapiens
  misc_feature (41)..(80): n is a, c, g, or t
  misc_feature (84)..(118): n is a, c, g, or t
ggagtgtatagactcactatagggcgctactcggcacagannnnnnnnnnnnnnnnnnnnnnnnnnnnnnnnnnnnnnnnccgnnnnnnnnnnnnnnnnnnnnnnnnnnnnnnnnnnncagtcgacggtaccggacatatgcccgggaattcggccattacggccgggggctgcctctaggttctgggaagatggcgaaggtctcagagctttacgatgtcacttgggaagaaatgagagataaaatgagaaaatggagagaagaaaactcaagaaatagtgagcaaattgtggaagttggagaagaattaattaatgaatatgcttctaagctgggagatgatatttggatcatatatgaacaggtgatgattgcagcactagactatggtcgggatgacttggcattgttttgtcttcaagagctgagaagacagttccctggcagtcacagagtcaagcgattaacaggcatgagatttgaagccatggaaagatatgatgatgctatacagctatatgataggattttacaagaagatccaactaacactgctgcaagaaagcgtaagattgccattcgaaaagcccaggggaaaaatgtggaggccattcgggagctgaatgagtatctggaacaatttgtgggagaccaagaagcctggcatgaacttgcagaactttacatcaatgaacatgactatgcaaaagcagccttttgtttagaggaactaatgatgactaatccacacaaccacttatactgtcagcagtatgctgaagttaagtatacccaaggtggacttgaaaacctcgaactttcaagaaagtattttgcacaggcattgaaactgaacaacagaaatatgagagctttgtttggactttatatgtcggcaagtcatattgcttctaatccaaaagcaagtgcaaaaacgaaaaaggacaacatgaaatatgctagttgggcagctagtcaaataaacagagcttatcagtttgcaggtcgaagtaagaaggaaaccaaatattctcttaaggctgtcgaagacatgttggaaacattgcagatcacccagtcttaaggtttcaaaaactctttgacattagatttcacaactgcacaattgaacttattggcctgtaacttatttactaaatgctcagtgctatttatatactacagtaattttctgttaagaaggcagttgtaaagaatgtgtttatataaacctaaaaatgccttttactgctaagtggggagatgggggaaatccatggaagagagatttaagacttattgattgtacatcagtctcttcatatcacatatacatgtatatatataaaactctaatgtagtataaccttgttaaataaaccatgatgatttattaaacttgc

SEQ ID NO: 71876 - DNA, 1051 bp, Homo Sapiens
ggggcagctgtgactgtcgctgcagacggaaactgactggggtcaattcaagtcatgcaggctgtgagaaacgcggggtcgcggttcctgcggtcctggacttggccccagacagccggcagggtcgtggccagaacgccggccgggaccatctgcacaggcgctcgacagctccaagacgctgcggccaagcagaaagttgaacagaacgcggctcccagccacaccaagttcagcatttaccctcccattccaggagaggagagctctctgaggtgggcaggaaagaaatttgaggagatcccaattgcacacattaaagcatcccacaacaacacacagatccaggtagtctctgctagtaatgagccccttgcctttgcttcctgtggcacagagggatttcggaatgccaagaagggcacaggcatcgcagcacagacagcaggcatagccgcagcggcgagagctaaacaaaagggcgtgatccacatccgagttgtggtgaaaggcctggggccaggacgcttgtctgccatgcacggactgatcatgggcggcctggaagtgatctcaatcacagacaacaccccaatcccacacaacggctgccgccccaggaaggctcggaagctgtgatgggaaggaggcctgcacttggacctgacctcaagcctcagctccagtgggaccttgtaaaatgctccctgtcagagctctccagaatatgcttgttggagatccttcaggcagtaagggagagttttgcctccttacacagtggcctttgcttgcacctccagctggagatgggtgtgccccagaagtaagctttgcatctcttacaagaggggagctacaggggcagccgtggcctaggcccaaactctgctctgagaaaataaatatctgtaccacctgtcataattttgagattttttgctttcagagttacgtaattcctaattcctcttgaaaaagagagtgtgaaatgaggtgaggcctcagatgaaagtaaaatataaatgtgagttgctatttaccagacaaa

SEQ ID NO: 71877 - DNA, 1177 bp, Homo Sapiens
ggggcagtgtggggctgagggaggccggacggcgcgcgtgcgtgctggcgtgcgttcactttcagcctggtgtggggtgagtggtaccaacgggccggggcgccgcgtccgcaggaagaggcgcggggtgcaggcttgtaaacatataacataaaaatggcttccaaaagagctctggtcatcctggctaaaggagcagaggaaatggagacggtcatccctgtagatgtcatgaggcgagctgggattaaggtcaccgttgcaggcctggctggaaaagacccagtacagtgtagccgtgatgtggtcatttgtcctgatgccagccttgaagatgcaaaaaaagagggaccatatgatgtggtggttctaccaggaggtaatctgggcgcacagaatttatctgagtctgctgctgtgaaggagatactgaaggagcaggaaaaccggaagggcctgatagccgccatctgtgcaggtcctactgctctgttggctcatgaaataggttttggaagtaaagttacaacacaccctcttgctaaagacaaaatgatgaatggaggtcattacacctactctgagaatcgtgtggaaaaagacggcctgattcttacaagccgggggcctgggaccagcttcgagtttgcgcttgcaattgttgaagccctgaatggcaaggaggtggcggctcaagtgaaggctccacttgttcttaaagactagagcagcgaactgcgacgatcacttagagaaacaggccgttaggaatccattctcactgtgttcgctctaaacaaaacagtggtaggttaatgtgttcagaagtcgctgtccttactacttttgcggaagtatggaagtcacaactacacagagatttctcagcctacaaattgtgtctatacatttctaagccttgtttgcagaataaacagggcatttagcaaactactgattgtttcttgttttgtctctcatttcttttgtgaaattaaattccgtatcaccttcatttgcagctcttaactgtccatatggcactgaaataaaagaacagtgaccacattttacacagcaaggaggaaaggcatacaaacagaatttaagaggcttgtgattttctctgcttattagctgtgtgtttttaatgtgctattaaaaaataccaatgagg

SEQ ID NO: 71878 - DNA, 712 bp, Homo Sapiens
  misc_feature (76)..(76): n is a, c, g, or t
  misc_feature (109)..(109): n is a, c, g, or t
  misc_feature (128)..(128): n is a, c, g, or t
  misc_feature (616)..(616): n is a, c, g, or t
ggaaaagacccagtacagtgtagccgtgatgtggtcatttgtcctgatgccagccttgaagatgcaaaaaaagagngaccatatgatgtggtggttctaccaggaggtnatctgggcgcacagaattnatctgagtctgctgctgtgaaggagatactgaaggagcaggaaaaccggaagggcctgatagccgccatctgtgcaggtcctactgctctgttggctcatgaaataggttttggaagtaaagttacaacacaccctcttgctaaagacaaaatgatgaatggaggatgtcaccttttctgtttctactttgcaggtcattacacctactctgagaatcgtgtggaaaaagacggcctgattcttacaagccgggggcctgggaccagcttcgagtttgcgcttgcaattgttgaagccctgaatggcaaggaggtggcggctcaagtgaaggctccacttgttcttaaagactagagcagcgaactgcgacgatcacttagagaaacaggccgttaggaatccattctcactgtgttcgctctaaacaaaacagtggtaggttaatgtgttcagaagtcgctgtccttactacttttgcggaagtatnggaagtcacaactacacagagatttctcagcctcacaaattgtgtctatacatttctaagccttgtttgcagaataaacagggcatttagccaact

SEQ ID NO: 71879 - DNA, 901 bp, Homo Sapiens
cgtgacgtggtacccaacgggccggggcgccgcgtccgcagaaagaggcgcggcgtgcaggcttgtaaacatataacataaaaatggcttccaaaagagctctggtcatcctggctaaaggagcagaggaaatggagacggtcatccctgtagatgtcatgaggcgagctgggattaaggtcaccgttgcaggcctggctggaaaagacccagtacagtgtagccgtgatgtggtcatttgtcctgatgccagccttgaagatgcaaaaaaagagggaccatatgatgtggtggttctaccaggaggtaatctgggcgcacagaatttatctgagtctgctgctgtgaaggagatactgaaggagcaggaaaaccggaagggccagatagccgccatctgtgcaggtcctactgctctgttggctcatgaaataggttttggaagtaaagttacaacacaccctcttgctaaagacaaaatgatgaatggaggtcattacacctactctgagaatcgtgtggaaaaagacggcctgattcttacaagccggggggcctgggaccagccttccagtttgcgcttgcaattgttgaaacccctaaatgccaaagaagttggcggctcaagtgaaagctccacttggttctaaagactagagcagcggaactgcgacgatcacttagaagaaacaggccgttaaggaatccatcctcactgtggttccctctaaacaaaaaaaggggtaaggttaatgtggttcaaaaagtcccctggccccttactaactttttgcggaaaagaaagggaaagtcccaacctacaccagaaaatttccccagccctaacaaaatgggggcccaatacaatttccaaaacccctggtttggcaaaaaataaaac

SEQ ID NO: 71880 - DNA, 852 bp, Homo Sapiens
tatcgcaacagcttagaaggatagacacatttgtagctgagaatctctgtgtagtgtgacttccaaacttccgcaaaagtagtaagacacgacttctgaacacagttaacctaccacttgttttgttttagagcgaacacatgtgagaatggattcctaacggcctgtttcctctaagtgatcgtccgcagttcgctgctctagtctgtaagaacaagtgggagccttcacttgaggccgccacctccttgccattcagggcttcaacaattgcaagcgcaaactcgaagctggtcccaggcccccggcttgtaagaatcaggccgtctttttccacacgattctcagagtaggtgtaatgacctccattcatcattttgtctttagcaagagggtgtgttgtaactttacttccaaaacctatttcatgagccaacagagcagtaggacctgcacagatggcggctatcaggcccttccggttttcctgctccttcagtatctccttcacagcagcagactcagataaattctgtgcgcccagattacctcctggtagaaccaccacatcatatggtccctctttttttgcatcttcaaggctggcatcaggacaaatgaccacatcacggctacactgtactgggtcttttccagccaggcctgcaacggtgaccttaatcccagctcgcctcatgacatctacagggatgaccgtctccatttcctctgctcctttagccaggatgaccagagctcttttggaagccatttttatgttatatgtttacaagccccacaccaggctgaaaatgaacgcacgccagcacgcacgcgcgccgtccgccttcc

SEQ ID NO: 71881 - DNA, 850 bp, Homo Sapiens
  misc_feature (697)..(697): n is a, c, g, or t
  misc_feature (749)..(749): n is a, c, g, or t
cggggacggcgcgcgtgcgtgctggcgtgcgttcattttcagcctggtgtggggcttgtaaacatataacataaaaatggcttccaaaagagctctggtcatcctggctaaaggagcagaggaaatggagacggtcatccctgtagatgtcatgaggcgagctgggattaaggtcaccgttgcaggcctggctggaaaagacccagtacagtgtagccgtgatgtggtcatttgtcctgatgccagccttgaagatgcaaaaaaagagggaccatatgatgtggtggttctaccaggaggtaatctgggcgcacagaatttatctgagtctgctgctgtgaaggagatactgaaggagcaggaaaaccggaagggcctgatagccgccatctgtgcaggtcctactgctctgttggctcatgaaataggttttggaagtaaagttacaacacaccctcttgctaaagacaaaatgatgaatggaggtcattacacctactctgagaatcgtgtggaaaaagacggcctgattcttacaagccgggggcctgggaccagcttcgagtttgcgcttgcaattgttgaagccctgaatggcaaggaggtggcggcccaagtgaaggctccacttgttcttaaagactagagcagcgaactgcgacgatcactttaaagaaacagggccgttaggaaaccnatttctcactggggtccgctctaaacaaaaaaagtgttagggttaatggtgntccagaagggccgctggcccttaactaactttttgcgggaagttatgggaaattccccacccttaccccggaaaattttcctcaagccctacaaaatttgc

SEQ ID NO: 71882 - DNA, 1033 bp, Homo Sapiens
gggtgcgcagtgtggggctgagggaggccggacggcgcgcgtgcgtgctggcgtgcgttcactttcagcctggtgtggggcttgtaaacatataacataaaaatggcttccaaaagagctctggtcatcctggctaaaggagcagaggaaatggagacggtcatccctgtagatgtcatgaggcgagctgggattaaggtcaccgttgcaggcctggctggaaaagacccagtacagtgtagccgtgatgtggtcatttgtcctgatgccagccttgaagatgcaaaaaaagagggaccatatgatgtggtggttctaccaggaggtaatctgggcgcacagaatttatctgagtctgctgctgtgaaggagatactgaaggagcaggaaaaccggaagggcctgatagccgccatctgtgcaggtcctactgctctgttggctcatgaaataggttttggaagtaaagttacaacacaccctcttgctaaagacaaaatgatgaatggaggtcattacacctactctgagaatcgtgtggaaaaagacggcctgattcttacaagccgggggcctgggaccagcttcgagtttgcgcttgcaattgttgaagccctgaatggcaaggaggtggcggctcaagtgaaggctccacttgttcttaaagactagagcagcgaactgcgacgatcacttagagaaacaggcccgttaggaatccattctcactgtgttcgctctaaacaaaacagtgggtaaggttaatgtggttcagaaagtccctggcccttactactttttccgggaagtatggaaagtcccaactacaccagaaatttcctcaagcctaccaaattgtgtcctataacatttcctaagccctttgtttgccaaaataaaccagggctattttaacccaagtcggcaagatccatccatcaccccctctcttgccccatccttccactttctcccaactctctcccccgcccctctctttcaaccacgttctgcctccccacttcgtcctgtt

SEQ ID NO: 71883 - DNA, 3238 bp, Homo Sapiens
  misc_feature (2550)..(2559): n is a, c, g, or t
gggagagagtaatgaaagtcgacggcgcgccgaattcggcacgagggcagcacccccgcgccgtcgctgactcatcgaggtcgccggcgatgtcggccccgggcacgacaaacaggtcccggtgctatagctgaacaccttctatggctgccccaaggagagctgcaacctgtttgtgctgaaggacacactaaagaagatgcagaagttctttggactgccccagacaggtgatcttgaccagaataccatcgagaccatgcggaagccacgctgcggcaacccacatgtggccaactacaacttcttccctcgcaagcccaagtgggacaagaaccagatcacatacaggatcagtggcgacacacctgatctggacccagatacagtggatgatgcatttgctcgtgccctccaagtctggagcgatgtgaccccactgcggatgatgcctttgctcgtgccttccaagtctggagcgatgtgaccccactgcggttttctcgaatccatgatggagaggcagacatcatgatcaactttggccgctgggagcatggcgatggatacccctttgacggtaaggacggactcctggctcatgccttcgccccaggcactggtgttgggggagactcccattttgatgacgatgagctatggaccttgggagaaggccaagtggtccgtgtgaagtatggcaacgccgatggggagtactgcaagttccccttcttgttcaatggcaaggagtacaacagctgcactgataccggccgcagcgatggcttcctctgggtgctccaccacctacaactttgagaaggatggcaagtacggcttctgtcccactgaacccctgttcaccatgggcggcaacgctgaaggacagccctgcaagtttccattccgcttccagggcacatcctatgacagctgcaccactgagggccgcacggatggctaccgctggtgcggcaccactgaggactacgaccgcgacaagaagtatggcttctgccctgagaccgccatgtccactgttggtgggaactcagaaggtgccccctgtgtcttccccttcactttcctgggcaacaaatatgagagctgcaccagcgccggccgcagtgacggaaagatgtggtgtgcgaccacagccaactacgatgacgaccgcaagtggggcttctgccctgaccaagggtacagcctgttcctcgtggcagcccacgagtttggccacgccatggggctggagcactcccaagaccctggggccctgatggcacccatttacacctacaccaagaacttccgtctgtcccaggatgacatcaagggcattcaggagctctatggggcctctcctgacattgaccttggcaccggccccacccccacactgggccctgtcactcctgagatctgcaaacaggacattgtatttgatggcatcgctcagatccgtggtgagatcttcttcttcaaggaccggttcatttggcggactgtgacgccacgtgacaagcccatggggcccctgctggtggccacattctggcctgagctcccggaaaagattgatgcggtatacgaggccccacaggaggagaaggctgtgttctttgcagggaatgaatactggatctactcagccagcaccctggagcgagggtaccccaagccactgaccagcctgggactgccccctgatgtccagcgagtggatgccgcctttaactggagcaaaaacaagaagacatacatctttgctggagacaaattctggagatacaatgaggtgaagaagaaaatggatcctggcttccccaagctcatcgcagatgcctggaatgccatccccgataacctggatgccgtcgtggacctgcagggcggcggtcacagctacttcttcaagggtgcctattacctgaagctggagaaccaaagtctgaagagcgtgaagtttggaagcatcaaatccgactggctaggctgctgagctggccctggctcccacaggcccttcctctccactgccttcgatacaccgggcctggagaactagagaaggacccggaggggcctggcagccgtgccttcagctctacagctaatcagcattctcactcctacctggtaatttaagattccagagagtggctcctcccggtgcccaagaatagatgctgactgtactcctcccaggcgccccttccccctccaatcccaccaaccctcagagccacccctaaagagatactttgatattttcaacgcagccctgctttgggctgccctggtgctgccacacttcaggctcttctcctttcacaaccttctgtggctcacagaacccttggagccaatggagactgtctcaagagggcactggtggcccgacagcctggcacagggcagtgggacagggcatggccaggtggccactccagacccctggcttttcactgctggctgccttagaacctttcttacattagcagtttgctttgtatgcactccgttttttccttcgggtcttgnnnnnnnnnnccacttagaaattgcatttcctgacagaaggactcaggttgtctgaagtcactgcacagtgcatctcagcccacatagtgatggttcccctgttcactctacttagcatgtccctaccgagtctcttctccactggatggaggaaaaccaagccgtggcttcccgctcagccctccctgcccctcccttcaaccattccccatgggaaatgtcaacaagtatgaataaagacacctactgagtggccgtgtttgccatctgttttagcagagcctagacaagggccacagacccagccagaagcggaaacttaaaaagtccgaatctctgctccctgcagggcacaggtgatggtgtctgctggaaaggtcagagcttccaaagtaaacagcaagagaacctcaggggagagtaagctctagtccctctgtcctgtagaaagagccctgaagaatcagcaattttgttgctttattgtggcatctgttcgaggtttgcttcctctttaagtctgtttcttcattagcaatcatatcagttttaatgctactactaacaatgaacagtaacaataatatccccctcaattaatagagtgctttctatggcaaggcacttttcacgtgtcacctattttaacctttccaaccacataaataaaaaaggccattattagttg

SEQ ID NO: 71884 - DNA, 1079 bp, Homo Sapiens
  misc_feature (64)..(103): n is a, c, g, or t
  misc_feature (926)..(926): n is a, c, g, or t
caggcggtggctggaggctgcgcatctgggggctttaaacatacaaagggattgccaggacctnnnnnnnnnnnnnnnnnnnnnnnnnnnnnnnnnnnnnnnncggaccatgagccgctgagccgggcaaaccccaggccaccgagccagcggaccctcggagcgcagccctgcgccgcggagcaggctccaaccaggcggcgaggcggccacacgcaccgagccagcgacccccgggcgacgcgcggggccagggagcgctacgatggaggcgctaatggcccggggcgcgctcacgggtcccctgagggcgctctgtctcctgggctgcctgctgagccacgccgccgccgcgccgtcgcccatcatcaagttccccggcgatgtcgcccccaaaacggacaaagagttggcagtgcaatacctgaacaccttctatggctgccccaaggagagctgcaacctgtttgtgctgaaggacacactaaagaagatgcagaagttctttggactgccccagacaggtgatcttgaccagaataccatcgagaccatgcggaagccacgctgcggcaacccagatgtggccaactacaacttcttccctcgcaagcccaagtgggacaagaaccagatcacatacaggatcattggctacacacctgatctggacccagagacagtggatgatgcctttgctcgtgccttccaagtctggagcgatgtgaccccactgcggttttctcgaatccatgatggagaggcagacatcatgatcaactttggccgctgggagcatggcgatggatacccctttgacggtaaggacggactcctggctcatgccttcgccccacgcactggtgttgggggagactcccattttgatgacgatgagctatggaccttgggagaaggccagtggntcgtgtgagtatggcacgccgatgggagtactgaagttcccttcttgtcaatgcaggagtaaacactgcactgatacggcgcacgatgctccttgtgctcacactacacttgaaagatgcagacgctcgtccctgagctgtccatggcgcacc

SEQ ID NO: 71885 - DNA, 880 bp, Homo Sapiens
ggcatggtcagcgacatctcttgcgtgatctaggtcgcacaggggcatcggcgcctcatggcagttctagatggcctgaacgaaatgaactgcaggcgtcttcagcgtgcgcccatgtgacaggcctcatgggacagaacagtactgccatcttctcaaagtgtaggtggggagcaccagaggaagccatcgctgcggccggtatcagtgcagctgttgtactccttgccattgaacaagaaggggaacttgcagtactccccatcggcgttcccatacttcacacggaccacttggccttctcccaaggtccatagctcatcgtcatcaaaatgggagtctcccccaacaccagtgcctggggcgaaggcatgagccaggagtccgtccttaccgtcaaaggggtatccatcgccatgctcccagcggccaaagttgatcatgatgtctgcctctccatcatggattcgagaaaaccgcagtggggtcacatcgctccagacttggaaggcacgagcaaaggcatcatccactgtctctgggtccagatcaggtgtgtagccaatgatcctgtatgtgatctggttcttgtcccacttgggcttgcgagggaagaagttgtagttggccacatctgggttgccgcagcgtggcttccgcatggtctcgatggtattctggtcaagatcacctgtctggggcagtccaaagaacttctgcatcttctttagtgtgtccttcagcacaaacaggttgcagctctccttggggcagccatagaaggtgttcaggtattgcactgccaactctttgtccgttttgggggcgacatcgccggcctcgtgccgaattcggcgcgccgtcgacttcatactctctc

SEQ ID NO: 71886 - DNA, 1169 bp, Homo Sapiens
gggggagagagtatgaagtcgacggcgcgccgacccagagacagtggatgatgcctttgctcgtgccttccaagtctggagcgatgtgaccccactgcggttttctcgaatccatgatggagaggcagacatcatgatcaactttggccgctgggagcatggcgatggatacccctttgacggtaaggacggactcctggctcatgccttcgccccaggcactggtgttgggggagactcccattttgatgacgatgagctatggaccttgggagaaggccaagtggtccgtgtgaagtatggcaacgccgatggggagtactgcaagttccccttcttgttcaatggcaaggagtacaacagctgcactgataccggccgcagcgatggcttcctctggtgctccaccacctacaactttgagaaggatggcaagtacggcttctgtccccatgaagccctgttcaccatgggcggcaacgctgaaggacagccctgcaagtttccattccgcttccagggcacatcctatgacagctgcaccactgagggccgcacggatggctaccgctggtgcggcaccactgaggactacgaccgcgacaagaagtatggcttctgccctgagaccgccatgtccactgttggtgggaactcagaaggtgccccctgtgtcttccccttcactttcctgggcaacaaatatgagagctgcaccagcgccggccgcagtgacggaaagatgtggtgtgcgaccacagccaactacgatgacgaccgcaagtggggcttctgccctgaccaagggtacagcctgttcctcgtggcagcccacgagtttggccacgccatggggctggagcactcccaagaccctggggccctgatggcacccatttacacctacaccaagaacttccgtctgtcccaggatgacatcaagggcattcaggagctctatggggcctctcctgacattgaccttggcaccggccccaccccacactgggcctgtcactcctgagatctgcaacaggacatgtattgatgcacgctcagatcgtgtgagatctcttctcaggacgtcattgcggatgtagcccgtgaagccatgggcctgggggcacttcgctgctccgaagatgatcgatcagccccagagaaagtgt

SEQ ID NO: 71887 - DNA, 1030 bp, Homo Sapiens
aagggcgagagagtatgaagtcgacggcgcgccgaattcggcacgagggacttcctcaggcggtggctggaggctgcgcatctggggctttaaacatacaaagggattgccagggcgccgccgcgccgtcgcccatcatcaagttccccggcgatgtcgcccccaaaacggacaaagagttggcagtgcaatacctgaacaccttctatggctgccccaaggagagctgcaacctgtttgtgctgaaggacacactaaagaagatgcagaagttctttggactgccccagacaggtgatcttgaccagaataccatcgagaccatgcggaagccacgctgcggcaacccagatgtggccaactacaacttcttccctcgcaagcccaagtgggacaagaaccagatcacatacaggatcattggctacacacctgatctggacccagagacagtggatgatgcctttgctcgtgccttccaagtctggagcgatgtgaccccactgcggttttctcgaatccatgatggagaggcagacatcatgatcaactttggccgctgggagcatggcgatggatacccctttgacggtaaggacggactcctggctcatgccttcgccccaggcactggtgttgggggagactcccattttgatgacgatgagctatggaccttgggagaaggccaagtggtccgtgtgaagtatggcaacgccgatggggagtactgcaagttccccttcttgttcaatggcaaggagtacaacagctgcactgataccggccgcagcgatggcttcctctggtgctcaccacctacaactttgagaaggatggcaagtacggcttctgtcccatgaaccctgttcccatggcggcacgctgatgacgcctgcaagttcatccgctccaggaatctagacactgccatgaggcgaggaggttccatgtcgtacctgaaaataactaaaattgttcgccgaactctcctgtgggaacaaggctcgtttactcttggatataatac

SEQ ID NO: 71888 - DNA, 854 bp, Homo Sapiens
  misc_feature (76)..(169): n is a, c, g, or t
  misc_feature (202)..(297): n is a, c, g, or t
  misc_feature (300)..(388): n is a, c, g, or t
taaataaatttatgaaataataatataataaaatttaagtaatatagcaaatattgaaaaagatggtaaatattgnnnnnnnnnnnnnnnnnnnnnnnnnnnnnnnnnnnnnnnnnnnnnnnnnnnnnnnnnnnnnnnnnnnnnnnnnnnnnnnnnnnnnnnnnnnnnnaatatagttatgagtaagaaaaaaataataagnnnnnnnnnnnnnnnnnnnnnnnnnnnnnnnnnnnnnnnnnnnnnnnnnnnnnnnnnnnnnnnnnnnnnnnnnnnnnnnnnnnnnnnnnnnnnnnntannnnnnnnnnnnnnnnnnnnnnnnnnnnnnnnnnnnnnnnnnnnnnnnnnnnnnnnnnnnnnnnnnnnnnnnnnnnnnnnnnnnnnnnncatcattaatgaaatataagttagaaattaggaaaaaagggaatattatatatataaatgaaaatgtaatagataaaagatattagataataatacatttaaaaagtaaatatgaaataatataagataattaaatagatttagattaaatatctttataattaaagaataataaggatatatattaataaatgatatttacaggattaatatacatgattggagcatgataaataacagcaaggcttagatttgaggttcaaatggataggtggcttgaggtttgcccggatctgaggttcaatagtctggcccccgcgcaccagacccagcagcagccgccgccgccgcaggtcctggcaatccctttgtatgtttaaagccccagatgcgcagcctccagccaccgcctgaggaagcctcgtgccgaattcggcgcgccgtcgacttcatactctttaaaaat

SEQ ID NO: 71889 - DNA, 902 bp, Homo Sapiens
gggggagagagtatgaagtcgacggcgcgccgaattcggcacgaggggacccgccgcgccgtcgcccatcatcaagttccccggcgatgtcgcccccaaaacggacaaagagttggcagtgcaatacctgaacaccttctatggctgccccaaggagagctgcaacctgtttgtgctgaaggacacactaaagaagatgcagaagttctttggactgccccagacaggtgatcttgaccagaataccatcgagaccatgcggaagccacgctgcggcaacccagatgtggccaactacaacttcttccctcgcaagcccaagtgggacaagaaccagatcacatacaggatcattggctacacacctgatctggacccagagacagtggatgatgcctttgctcgtgccttccaagtctggagcgatgtgaccccactgcggttttctcgaatccatgatggagaggcagacatcatgatcaactttggccgctgggagcatggcgatggatacccctttgacggtaaggacggactcctggctcatgccttcgccccaggcactggtgttgggggagactcccattttgatgacgatgagctatggaccttgggagaaggccaagtggtccgtgtgaagtatggcaacgccgatggggagtactgcaagttccccttcttgttcatggcaaggagtacacagctgcactgatccggccgcagcgatggcttctctgggctcacaccacacttgagaagatgcagtacgctctgcccatgagcctgtcacatggcgcacctgaagacgctgcagttcatcgcttcagcatctagagctccctgagcgcagagtacctgtcgcatgaatcacgcagattgtcgctgacctctgtggatcagcc

SEQ ID NO: 71890 - DNA, 891 bp, Homo Sapiens
ccaagtccctgtcgattgcgattaaggttcagaggaatgaatcaggctcttaggtccgccaggaaagggtcagggaagagcgtcttcatctttcaagtgtgaggtggcacagagaagcctcgtgcggcgtatcaggcagtgtgtacccttgccttgacaagaagggacttgcagaatacccatcggcgttgccatacttcacacggaccacctggcattctcacaaggtccatagctcatcgtcatcaaaatgggagtctcccccaacaccagtgcctggggcgaaggcatgagccaggagtccgtccttaccgtcaaaggggtatccatcgccatgctcccagcggccaaagttgatcatgatgtctgcctctccatcatggattcgagaaaaccgcagtggggtcacatcgctccagacttggaaggcacgagcaaaggcatcatccactgtctctgggtccagatcaggtgtgtagccaatgatcctgtatgtgatctggttcttgtcccacttgggcttgcgagggaagaagttgtagttggccacatctgggttgccgcagcgtggcttccgcatggtctcgatggtattctggtcaagatcacctgtctggggcagtccaaagaacttctgcatcttctttagtgtgtccttcagcacaaacaggttgcagctctccttggggcagccatagaaggtgttcaggtattgcactgccaactctttgtccgttttgggggcgacatcgccggggaacttgatgatgggcgacggcgcggcgcaggtcctggcaatccctttgtatgtttaaagccccagatgcgcagcctccagccaccgccctcgtgccgaattcggcgcgccgtcgacttcatactcttcgccct

SEQ ID NO: 71891 - DNA, 783 bp, Homo Sapiens
taagggcgagagagtatgaagtcgaggcgcgccgaattcggcacgaggagacttcctcaggcggtggctggaggctgcgcatctggggctttaacatacaaagggattgccaggacccgccgcgccgtcgcccatcatcaagttccccggcgatgtcgcccccaaaacggacaaagagttggcagtgcaatacctgaacaccttctatggctgccccaaggagagctgcaacctgtttgtgctgaaggacacactaaagaagatgcagaagttctttggactgccccagacaggtgatcttgaccagaataccatcgagaccatgcggaagccacgctgcggcaacccagatgtggccaactacaacttcttccctcgcaagcccaagtgggacaagaaccagatcacatacaggatcattggctacacacctgatctggacccagagacagtggatgatgcctttgctcgtgccttccaagtctggagcgatgtgaccccactgcggttttctcgaatccatgatggagaggcagacatcatgatcaactttgggccgctgggagcatggcgatggatacccctttgacggtaaggacggactcctggctcatgccttcgccccaggcactggtgttgggggagactcccatttgatgacgatgactatggacttgggagaaggcagtggtcgtgtgaatatggaacccgatgggagtatgcagttcccttctgtcatgcaagatacacagcgcatgaacggcgcacgatgctctctgtgtc

SEQ ID NO: 71892 - DNA, 1073 bp, Homo Sapiens
  misc_feature (972)..(1011): n is a, c, g, or t
ccctgaaaaggtttaggaaaaaccctttccctctttaaaattaggggggggaccagaaaccattttgggcggttaaagggagtgtgttttcttgccataaaagaaagggaattcagtatttcccttggggttgcataattcccaggaccaattggcttttccaaggtccatagttatgttcatcaaatggagttttcccccaaccccagtcctggggcgaaggcatgagccaggattccgtccttaccgtcaaaggggtttccatcgccatgctcccagcggccaaagttgatcatgatgtctgcttctccatcatggattcgagaaaaccgcagtggggtcacatcgctccagacttggaaggcaacgagcaaaggcattcatccactgtctctgggtccagatcaggtgtgtagccaatgatcctgtaaagtgatctggttctttgtcccacttgggcttgcgagggaagaagttgtagttggccacatctgggtttgccgcagcgtggcttccgcatggtctcgatggtattctggtcaagatcacctgtctggggcagtccaaagaacttctgcatcttctttagtgtgtccttcagcacaaacaggttgcagctctccttggggcagccatagaaggtgttcaggtattgcactgccaactctttgtcccttttgggggcgacatctgccggggaacttgatgatgggccaccgccccgccggccgcgtggctcagcaggcagcccaggagacagagcgccctcaggggacccgtgagcgcgccccgggccattagcgcctccatcgtagcgctcctggccccgcgcgtcgcccgggggtcgctggctcggtgcgtgtggccgcctcgccgcctggttggagcctgctccgcggcgcagggctgcgctccgagggtccgctggctcggtggcctggggtttgcccggctcagcggctcatggtccgnnnnnnnnnnnnnnnnnnnnnnnnnnnnnnnnnnnnnnnnaggtcctggcaatccctttgtatgtttaaagccccagatgcgcagcctccagccaccgcctg

SEQ ID NO: 71893 - DNA, 1080 bp, Homo Sapiens
tatgtctgaagagtatgaagtcgacggcgcgccgaattcggcacgagggccagcggaccctcggagcgcagccctgcgccgcggagcaggctccaaccaggcggcgaggcggccacacgcaccgagccagcgacccccgggcgacgcgcggggccagggagcgctacgatggaggcgctaatggcccggggcgcgctcacgggtcccctgagggcgctctgtctcctgggctgcctgctgagccacgccgccgccgcgccgtcgcccatcatcaagttccccggcgatgtcgcccccaaaacggacaaagagttggcagtgcaatacctgaacaccttctatggctgccccaaggagagctgcaacctgtttgtgctgaaggacacactaaagaagatgcagaagttctttggactgccccagacaggtgatcttgaccagaataccatcgagaccatgcggaagccacgctgcggcaacccagatgtggccaactacaacttcttccctcgcaagcccaagtgggacaagaaccagatcacatacaggatcattggctacacacctgatctggacccagagacagtggatgatgcctttgctcgtgccttccaagtctggagcgatgtgaccccactgcggttttctcgaatccatgatggagaggcagacatcatgatcaactttggccgctgggagcatggcgatggatacccctttgacggtaaggacggactcctggctcatgccttcgccccaggcactggtgttgggggagactcccattttgatgacgatgagctatggaccttgggagaaggcaagtggtccgtgtgagtatggaacgccgatgggagtactgcagttccccttctgtcatggcaggatacacactgcctgatccgcgcacgatgctctctgtctcacactacacttgaaagatgcagtacgtcgtcctgagctgtccaggcgcacctagacactgagtcatcctcagcctcaacctccatagcgcgagtcctgtcgctagacaccacatgttcgacctcgtggacagctgtcttcgcataccgcggagga

SEQ ID NO: 71894 - DNA, 899 bp, Homo Sapiens
ttggtgggagagggtatgaagtcgacggcgcgccgaattcggcacgagggctgaaggacacactaaagaagatgcagaagttctttggactgccccagacaggtgatcttgaccagaataccatcgagaccatgcggaagccacgctgcggcaacccagatgtggccaactacaacttcttccctcgcaagcccaagtgggacaagaaccagatcacatacaggatcattggctacacacctgatctggacccagagacagtggatgatgcctttgctcgtgccttccaagtctggagcgatgtgaccccactgcggttttctcgaatccatgatggagaggcagacatcatgatcaactttggccgctgggagcatggcgatggatacccctttgacggtaaggacggactcctggctcatgccttcgccccaggcactggtgttgggggagactcccattttgatgacgatgagctatggaccttgggagaaggccaagtggtccgtgtgaagtatgggaacgccgatggggagtactgcaagttccccttcttgttcaatggcaaggagtacaacagctgcactgataccggccgcagcgatggcttcctctggtgctccaccacctacaactttgagaaggatggcaagtacggcttctgtccccatgaagccctgttcaccatgggcggcaacgctgaaggacagccctgcaagtttccattccgctttcagggcacatcctatgacagctgcacactgagggcgcacgatgctacgctgtgcgcacactgagactacacgcgacagagtatgctctgctgaacgcagtcactgtggtggactcaaggccctgtgctcctcatctggcacaagaactgcacgcgccagagagag

SEQ ID NO: 71895 - DNA, 888 bp, Homo Sapiens
  misc_feature (737)..(737): n is a, c, g, or t
  misc_feature (745)..(745): n is a, c, g, or t
  misc_feature (795)..(795): n is a, c, g, or t
ttaggggggagagagtatgaagtcgacggcgcgccgaattcggcacgaggggcgatgtcgcccccaaaacggacaaagagttggcagtgcaatacctgaacaccttctatggctgccccaaggagagctgcaacctgtttgtgctgaaggacacactaaagaagatgcagaagttctttggactgccccagacaggtgatcttgaccagaataccatcgagaccatgcggaagccacgctgcggcaacccagatgtggccaactacaacttcttccctcgcaagcccaagtgggacaagaaccagatcacatacaggatcattggctacacacctgatctggacccagagacagtggatgatgcctttgctcgtgccttccaagtctggagcgatgtgaccccactgcggttttctcgaatccatgatggagaggcagacatcatgatcaactttggccgctgggagcatggcgatggatacccctttgacggtaaggacggactcctggctcatgccttcgccccaggcactggtgttgggggagactcccattttgatgacgatgagctatggaccttgggagaaggccaagtggtccgtgtgaagtatgggaacgccgatggggagtactgcaagttccccttcttgttcatggcaaggagtaaacagctgcactgaaccggccgcagcgaggcttctctgggctcacccctacactttgagaggatgcagtangctctgtncatgagcctgtcacatggcgcacgcgaagacgctgcagttcatcgctcangaatctagactgccatgagcgcagatgtcctgtcgacctagaaaccacaattgtcgcgaccttctgtggaccagcctgtctctcgcatgaccc

SEQ ID NO: 71896 - DNA, 1338 bp, Homo Sapiens
acaaatatacggtctaaggtacgaggcctgggttgagaattcggcacgagggaaagatggcagtggcaggcggggagaccgccgcagcagccgagacatggctgggggtgccgggcctcggtctgagtctgacctcgaggacgtgggacctacagctgagtggaatggggatggcagtggctccttgaggcgcagcggttcctttgggaaactccgggatgccctgaggcgcagcagtgagatgctggtaaagaagctgcaggggggcaccccccaggagccccctaaccccaggatgaagcgggccagttccctcaacttcctcaacaagagcgtggaagagccgacccagcctggaggcacaggtctctctgacagccgcactctcagctccagctccatggacctctcccgacgaagctccctggtgggctaatgctgaaggggcagccagtcaccagagcgcccacctggcacacccccctcaccccagccctgcgcatgggcctgctgcttgtcccgcctgtctctcccacagcccctgtcttttctgttcaatctcagggtaaccttctcccttgtcatctcagcctgagccctggaggctgggcctgcccactccagctccatcccttatttattccttccagcagggccctcttccctaggttcgggccagcaggaggtgccggctggagtctccaccatagactcagtggcctggcctccccagaccccagagccaagaacactaagcactcgccggcccttcggcaccctcgccctccctcccgactcaacccggccgttgcttctgtatatagagaaataagttattggccgcgcgcctcccttcagtccacggtactacccgggcctcccctcgtccctcttctagtggtaccgcccaggccttaatcacccccattccgtgcggtggtatctcccaggctctacattctcgggagcggcgcctcccaagggggtcctgggaccttctcgcgctcctcctggcctctgagggatgcgtcctacccgcgccatcgccccgtggcccaggacggggacctccccttagtccgtcctcccaccgccgggccctgccccgcatcccggccttatgcactgcccctcccacccggccccgcccaggcacggccgaccccgccccgggcaccgcccaccgagccatcctgcctcgcctccccccacgcctgcagcttctcgcgaggggcggcgacggtcccctggtggcaggaggggctccccctgttgcgggtgaggcggctgctctctattttcagatgttgctgtagaaataaagacggtttaaatctg

SEQ ID NO: 71897 - DNA, 927 bp, Homo Sapiens
agatttaaaccgtctttatttctacagcaacatctgaaaatagagagcagccgcctcacccgcaacagggggaacaggtcatccagtgtgtctttggggacgtcccccttctcctcgttaggggaggcgtcttcatccaacttgcggatctggctcatgaacagcaagtgctgcttctcctcctcgagctgggccacggcctgctcactgcgctgcagcttctgctgtgtccccgccagctcctcacgcagccactggttctcctgcaccagacgccgcacctgcgcccgcagcttctgcttctctgattctacagcccccaggtggctcgacaatgccaagatcacctgtgcaaccagcccaggtcttgctggacctacctccagaacatccagaactggtcccttttctccaccgtcatagccaccccttaattccaagcaccagctctcatttgaattccagcagtggcttcctaaccactcattggagagtgattccatcctcgacccactgaggtttattctccacatctcagccagagagagtttttagaaactcaagtcagactgtgttgcctgcctgcttaaagccctccagaggctttctgatttcctgagaataaaacccaaaccaaccaggccatgatctggttcttggcttctccccaggcctcttctgtccctgtctcccttccatgaagctccagtcacacagttcttccctgagttcctccaccacaagctctttcctaccccaggacctttgcacatgcaacttctcccctgcctccctttcctggaggctggttcatttcttccctcaggtttcagtttgtcatttcctcacagaagtcctgcctgaccagtagacaagactcgctgctgcgagctatcataaaatcttgttcttttctctgcagaactc

SEQ ID NO: 71898 - DNA, 902 bp, Homo Sapiens
  misc_feature (109)..(109): n is a, c, g, or t
gcagtgtgtctgccagttctccgagcaggtcatggcgtggcgctcttgatgtttatccgaagacatgcagatgtcacatgtgcaagtcaggtgtcgtgctgagtctctncagtctcgagtgctgctgcagagtgcacagtacatcgtagcggcctgtgaggcgtatggatcaccaggtgtgcagggtgcggagccgggccgggatctcgtagcccccatgctgaccagacacatcccctcctcctgcgctaggggctgggctctgctcagcctcattggggaacaggtcatccagtgtgtctttgggcacgtcccccttctcctcgttaggggaggcgtcttcatccaacttgcggatctggctcatgaacagcaagtgctgcttctcctcctcgagctgggccacggcctgctcactgcgctgcagcttctgctgtgtccccgccagctcctcacgcagccactggttctcctgcaccagacgccgcacctgcgcccgcagcttctgcttctctgattctacagcccccaggtggctcgacaatgccaagatcacctgggcctcccccagcccaagctcaatggcttccagggagcgacgcaggaggatgcagcgctcctgcgagccaggctcggcttcgccggcctcaggtgcaaccagaggagccagcagggcacgatgctccccacgcagagtctccagtccctggatgacagccttggtgcccagcacgatctcatcctggctcagcttctcctcccgcggaaacaccatcatggccatggctgtggcgtctgtgaggacgaggctgcgggcaggcgcggcgccgggcctcggtggcctcggaggggccgaacacgcttctcttggcccgttcgctgccttaaaggagcgcgggccg

SEQ ID NO: 71899 - DNA, 692 bp, Homo Sapiens
attcggcacgaggcaggctaccaagtccgtgctgtttgtgtgtctgggtaacatttgtcgatcacccattgcagaagcagttttcaggaaacttgtaaccgatcaaaacatctcagagaattgggtcattgacagcggtgctgtttctgactggaacgtgggccggtccccagacccaagagctgtgagctgcctaagaaatcatggcattcacacagcccataaagcaagacagattaccaaagaagattttgccacatttgattatatactatgtatggatgaaagcaatctgagagatttgaatagaaaaagtaatcaagttaaaacctgcaaagctaaaattgaactacttgggagctatgatccacaaaaacaacttattattgaagatccctattatgggaatgactctgactttgagacggtgtaccagcagtgtgtcaggtgctgcagagcgttcttggagaaggcccactgaggcaggttcgtgccctgctgcggccagcctgactagaccccaccctgaggtcctgcatttctcagtcggtgtgtaatcacgttccagggcccaaagcccagctctttgttcagttgacttactgtttcttaccttaaaaagtaattgtagatggaaatcagttgtgtttggcaggagaatcaataaaaatctttgattcagtcagctacca

SEQ ID NO: 71900 - DNA, 1176 bp, Homo Sapiens
  misc_feature (74)..(108): n is a, c, g, or t
  misc_feature (928)..(929): n is a, c, g, or t
  misc_feature (932)..(932): n is a, c, g, or t
  misc_feature (953)..(955): n is a, c, g, or t
  misc_feature (1045)..(1045): n is a, c, g, or t
  misc_feature (1113)..(1113): n is a, c, g, or t
aaactaatacacatatggcccatcctttcagcgaacgacgagcgcagcgagctatctagcgaggaagcggccgnnnnnnnnnnnnnnnnnnnnnnnnnnnnnnnnnnncagtcgacggtaccggacatatgcccgggaattcggccattacggccgggggaacgccgcggtgtctcggcgcctctgcgcgcgggaagatggcggaacaggctaccaagtccgtgctgtttgtgtgtctgggtaacatttgtcgatcacccattgcagaagcagttttcaggaaacttgtaaccgatcaaaacatctcagagaattggagggtagacagcgcggcaacttccggtgggtcattgacagcggtgctgtttctgactggaacgtgggccggtccccagacccaagagctgtgagctgcctaagaaatcatggcattcacacagcccataaagcaagacagattaccaaagaagattttgccacatttgattatatactatgtatggatgaaagcaatctgagagatttgaatagaaaaagtaatcaagttaaaacctgcaaagctaaaattgaactacttgggagctatgatccacaaaaacaacttattattgaagatccctattatgggaatgactctgactttgagacggtgtaccagcagtgtgtcaggtgctgcagagcgttcttggagaaggcccactgaggcaggttcgtgccctgctgcggccagcctgactagaccccaccctgaggtcctgcattcctcagtcggggtgtaatcacgttccagggccccaaagcccagcctcctttggttcagttggacttacctgttttcttacccttaaaaaaggtaattgtaagattggaaatccagttggtggtttggcaaggagaaatcaataaaaaatcctcttgattcccaccnnagnaagaaaaggaaaaagaaaaannnaaaacaatgtcggggccgccccttccggcccctccaaagaagacttttctcaacaccatttcgcgtttggggcgcgcgcggggcccccgntagagggaagagggaacacagtggggcccataaccgtgggtttccccttaagagaaaaacccgtgggnacactggacaataaaggggccttggggaatattctcccccccacaaattaaaaaagaacgcga

SEQ ID NO: 71901 - DNA, 1949 bp, Homo Sapiens
  misc_feature (16)..(16): n is a, c, g, or t
  misc_feature (82)..(116): n is a, c, g, or t
  misc_feature (1665)..(1819): n is a, c, g, or t
  misc_feature (1829)..(1843): n is a, c, g, or t
  misc_feature (1891)..(1908): n is a, c, g, or t
ccaacgtatcgacctnatatggcgcatcgcgttgtagtcgaacgaccgagcgcagcgaagctgtgagcgaggaagcggccgnnnnnnnnnnnnnnnnnnnnnnnnnnnnnnnnnnncagtcgacggtaccggacatatgcccgggaattcggccattacggccggggggcgcctctgcgcgcgggaagatggcggaacaggctaccaagtccgtgctgtttgtgtgtctgggtaacatttgtcgatcacccattgcagaagcagttttcaggaaacttgtaaccgatcaaaacatctcagagaattggagggtagacagcgcggcaacttccggtgggtcattgacagcggtgctgtttctgactggaacgtgggccggtccccagacccaagagctgtgagctgcctaagaaatcatggcattcacacagcccataaagcaagacagattaccaaagaagattttgccacatttgattatatactatgtatggatgaaagcaatctgagagatttgaatagaaaaagtaatcgagttaaaacctgcaaagctaaaattgaactacttgggagctatgatccacaaaaacaacttattattgaagatccctattatgggaatgactctgactttgagacggtgtaccagcagtgtgtcaggtgctgcagagcgttcttggagaaggcccactgaggcaggttcgtgccctgctgcggccagcctgactagaccccaccctgaggtcctgcatttctcagtcggtgtgtaatcacgttccagggcccaaagcccagctctttgttcagttgacttactgtttcttaccttaaaaagtaattgtagatggaaatcagttgtgtttggcaggagaatcaataaaaatctttgattcagacagcttatggggtattttaagcattcttagactagttgaacatctcactttgccccagttacaaaaatagtagaacaagcaacataaaacaatgaaggaaaacctcacttgaaggcccaggtcaacatctaagcctgttgagacttagataatcgagtctacctcttcagtaggtttgtgtggatggcctggagggcaggtgccctctgctccccagtgctacctctctcttccctagggccttttgtggattgacagtagtcccctccgtaggagctcacagtctagattagaagtgttttaatttctacacacccatagtgcacacttgtatattgaaaagatagggaagagagaaacatttatggaatcagtcgttggcaccttcaatacttcatgatttttgtcgagtttacttcatgaggaggtcagcccattggctcccatctgaaccactttgcctctgaaacttaattacatccagaaagaaggacacttgtatgctagtctatggtcagttgaggaatatgactgtttttatatgcacatgtaacccaaatgtccaatataaattggcttattttttaaaataattttaaaagttgggaaaagtgttattatttggcatgcttaaatattgaataagtattcttcatcagcatttaataaatgtataggcagatgtaaggtaatttctgtgtattttgagataatgtcaaaatcatgaatatttcaaaataaactggggagttataaaaatacaactagnnnnnnnnnnnnnnnnnnnnnnnnnnnnnnnnnnnnnnnnnnnnnnnnnnnnnnnnnnnnnnnnnnnnnnnnnnnnnnnnnnnnnnnnnnnnnnnnnnnnnnnnnnnnnnnnnnnnnnnnnnnnnnnnnnnnnnnnnnnnnnnnnnnnnnnnnnnttgggggcgnnnnnnnnnnnnnnnaaaaaaacattttttaaacaacccttgttggcgcgccggccccccccnnnnnnnnnnnnnnnnnncaggtttccttttttctttccacaaaaaaacacccgcggac

SEQ ID NO: 71902 - DNA, 825 bp, Homo Sapiens
  misc_feature (778)..(784): n is a, c, g, or t
  misc_feature (789)..(789): n is a, c, g, or t
  misc_feature (801)..(801): n is a, c, g, or t
  misc_feature (811)..(811): n is a, c, g, or t
cagtcgacggtaccggacatatgcccgggaattcggccattacggccgggggggaacgccgcggtgtctcggcgcctctgcgcgcgggaagatggcggaacaggctaccaagtccgtgctgtttgtgtgtctgggtaacatttgtcgatcacccattgcagaagcagttttcaggaaacttgtaaccgatcaaaacatctcagagaattggagggtagacagcgcggcaacttccgggtatgagatagggaacccccctgactaccgagggcagagctgcatgaagaggcacggcattcccatgagccacgttgcccggcagattaccaaagaagattttgccacatttgattatatactatgtatggatgaaagcaatctgagagatttgaatagaaaaagtaatcgagttaaaacctgcaaagctaaaattgaactacttgggagctatgatccacaaaaacaacttattattgaagatccctattatgggaatgactctgactttgagacggtgtaccagcagtgtgtcaggtgctgcagagcgttcttggagaaggcccactgaggcaggttcgtgccctgctgcggccagcctgactagaccccaccctgaggtcctgcatttctcagtcggtgtgtaatcacgttccagggcccaaagcccagctctttgttcagttgacttactgtttcttaccttaaaaagtaattgtagatggaaatcagttgtgtttggcaggagaaatcaataaaaaatcttttgaattcggacctnnnnnnnaaaanaggagcaaggangaaaacctgngcccctggtccgga

SEQ ID NO: 71903 - DNA, 843 bp, Homo Sapiens
  misc_feature (61)..(61): n is a, c, g, or t
  misc_feature (661)..(672): n is a, c, g, or t
caaaacccttactctgtagataagtgtatttaattttttcccctcgtatacttttattaancctggggaaggagcttttagggttggggggtggtttgctatctctttagctagcagaatagtgtgcctttgatcctcacacatcctgtattatggacacagtagccatgcttcacggggaggtcagagctggctaccagcagtcttgccctttactgagcttagtgtcatctttggatgctgtcatatgctgctttgagtgaaccagagaaacagccatttgcagcatgagaaagccccaaaagctctgggatttacctccactttagtaataatgaatattttttagcattagaatgtgttatgtcatttgaattaattttgactacactttggcttgggagaggaattattttaaatagacattggtactttttgaacttgatagctaaagattctaaaatgcatgttttatactaagttttaaccagtcaggaaaattttatgtaactagtgatagtttatttttttgtatgaattttgtttaggctgcaatgtttagcttttgttaactcctcactcttgctgtcttaagttcattactatgtttaatggcctacttgccaagatatttagcatgtaaaaagcagggttttgattnnnnnnnnnnnncggcttcatattgaagctgagacttacaataacaagttgagtggcaagcctggtatgctgtgtcttattgccagaatcttagtaaatgtaatgttttaaaagtttgttgtctttgtatattaataacaaattatgacaagttaagtttaaataagagttacattattgctc

SEQ ID NO: 71904 - DNA, 689 bp, Homo Sapiens
  misc_feature (14)..(14): n is a, c, g, or t
gagtcagcccatcntgtgggagcctggagagagtgcacatcagggtgcgaggggggacactcccagccccctctgtctcttgctattactgctgcttctgattcttcgtcttctgcgaattctgtgagccaagcagaccttccctctcatcccaaggagccagagtcctcccaagatcccctggaggaggagggatccctgctgcctgcactgggggtgccaattcagaccgacaagatggagcattgatgggggagatcagagggtctgaggtgactcttgcaggagcctgtcccctcatcacaggctaaagaagagcagtagacagccctggacactctgaagcagaggcaagacaaacacaggcgctttgcaggctgctctgagggtctcagcccatcccccaggaggactgggatttggtatgatcaaatcctcaagccagctgggggcccaggctgaagacctggggacaggtcgattgctggaccagggcaaagaagaagccctgccatctgtgccctgtgggccttttccctggggcagcaccttgccctccccaggggatcactcacttgtcttctatgaagacggactcttcatgaggttgaatttcatgccagtttgtatttttataagtatctagaccaaaccttcaataaaccactcatctttttgttgacctcccg

SEQ ID NO: 71905 - DNA, 939 bp, Homo Sapiens
  misc_feature (525)..(545): n is a, c, g, or t
  misc_feature (554)..(592): n is a, c, g, or t
  misc_feature (639)..(711): n is a, c, g, or t
  misc_feature (724)..(724): n is a, c, g, or t
  misc_feature (766)..(842): n is a, c, g, or t
cggtcctaggtagcgaggcctgggtggcgaattcggcacgaggcgactgtgaagcgggccgggacctgccaggccagaccaaaccggacctcgggggcgatgcggctgctgcccctgctgcggactgtcctctgggccgcgttcctcggctcccctctgcgcgggggctccagcctccgccacgtagtctactggaactccagtaaccccaggttgcttcgaggagacgccgtggtggagctgggcctcaacgattacctagacattgtctgcccccactacgaaggcccaggctgaagacctggggacaggtcgattgctggaccagggcaaagaagaagccctgccatctgtgccctgtgggccttttccctggggcagcaccttgccctccccaggggatcactcacttgtcttctatgaagacggactcttcatgaggttgaatttcatgccagtttgtatttttataagtatctagaccaaaccttcaataaaccactcatctttttgttgccctccccnnnnnnnnnnnnnnnnnnnnnctcgaggcnnnnnnnnnnnnnnnnnnnnnnnnnnnnnnnnnnnnnnncatggtcatagctgtttcctgacccagctttcttgtacaaagtggtnnnnnnnnnnnnnnnnnnnnnnnnnnnnnnnnnnnnnnnnnnnnnnnnnnnnnnnnnnnnnnnnnnnnnnnnntgcagtacccggngaatttaacccgcctaatgagcgggcttttttttgtgatccnnnnnnnnnnnnnnnnnnnnnnnnnnnnnnnnnnnnnnnnnnnnnnnnnnnnnnnnnnnnnnnnnnnnnnnnnnnnnggggtttggtttgcccggatcaagaagctaccaacttctttttttccgaaaggaaactgggctttcagccagagcgcaaaaatacccaaaatacctg

SEQ ID NO: 71906 - DNA, 1183 bp, Homo Sapiens
cagtcgacggtaccggacatatgcccgggaattcggccattacggccgggaggatgagaaggacatcctgcgctgtgctcacctccagaaggagttgctcctgagtgctattgactctgtcaatgcgacctccaagacaggaggctacctggtttactgcacctgttctatcacagtagaacgagaatgagtgggtggtagactatgctctgaaaaacgaggaatgtgcgactggtgcccacgggcctagactttggccaggaaggttttacccgctttcgagaaaggcgcttccaccccagtctgcgttctacccgacgcttctaccctcatacccacaatatggatgggttcttcattgccaagttcaagaaattttccaattctatccctcagtcccagacaggaaattctgaaacagccacacctacaaatgtagacttgcctcaggtcatccccaagtctgagaacagcagccagccagccaagaaagccaagggggctgcaaagacaaagcagcagctgcagaaacagcaacatcccaagaaggcctccttccagaagctgaatggcatctccaaaggggcagactcagaattgtccactgtaccttctgtcacaaagacccaagcttcctccagcttccaggatagcagtcagccagctggaaaagccgaagggatcagggagccaaaggtgactgggaagctaaagcaacgatcacctaaattacagtcctccaagaaagttgctttcctcaggcagaatgcccctcccaagggcacagacacacaaacaccggctgtgttatccccatccaagactcaggccaccctgaaacctaaggaccatcatcagccccttggaagggccaagggggttgagaagcagcagttgccagagcagccttttgagaaagctgccttccagaaacagaatgatacccccaaggggcctcagcctcccactgtgtctcccatccgttccagccgccccccaccagcaaagaggaagaaatctcagtccaggggcaacagccagctgctgctatcttagatggttgaaaactagacgggtggctcactgccattgtcaccaggttggaactcttgcctctgtgaggatgccttctctactgtgcatacccatgaaatttaatacacattttaaaacctctgaaaaa

SEQ ID NO: 71907 - DNA, 703 bp, Homo Sapiens
cagcacctgatgccttaaaaatcataacagaaaatgatcatgttcttctgttttggaaaagcctggctttaaaggaaaagcattttaatgaaagcaggggctatgagatacacatgtttgatagtgccatgaatatcacagcttaccttgggaatactactgacaatttctttaaaatttccaacctgaagatgggtcataattacacgttcaccgtccaagcaagatgcctttttggcaaccagatctgtggggagcctgccatcctgctgtacgatgagctggggtctggtgcagatgcatctgcaacgcaggctgccagatctacggatgttgctgctgtggtggtgcccatcttattcctgatactgctgagcctgggggtggggtttgccatcctgtacacgaagcaccggaggctgcagagcagcttcaccgccttcgccaacagccactacagctccaggctggggtccgcaatcttctcctctggggatgacctgggggaagatgatgaagatgcccctatgataactggattttcagatgacgtccccatggtgatagcctgaaagagctttcctcactagaaaccaaatggtgtaaatattttatttgataaagatagttgatggtttattttaaaagatgcactttgagttgcaatatgttatttttatatgggccaaaaacaaaaaacaaa

SEQ ID NO: 71908 - DNA, 3466 bp, Homo Sapiens
gggaggaggagccgccgagcagccgccggaggaccacggctcgccagggctgcggaggaccgaccgtccccacgcctgccgccccgcgaccccgaccgccagcatgatcgccgcgcagctcctggcctattacttcacggagctgaaggatgaccaggtcaaaaagattgacaagtatctctatgccatgcggctctccgatgaaactctcatagatatcatgactcgcttcaggaaggagatgaagaatggcctctcccgggattttaatccaacagccacagtcaagatgttgccaacattcgtaaggtccattcctgatggctctgaaaagggagatttcattgccctggatcttggtgggtcttcctttcgaattctgcgggtgcaagtgaatcatgagaaaaaccagaatgttcacatggagtccgaggtttatgacaccccagagaacatcgtgcacggcagtggaagccagctttttgatcatgttgctgagtgcctgggagatttcatggagaaaaggaagatcaaggacaagaagttacctgtgggattcacgttttcttttccttgccaacaatccaaaatagatgaggccatcctgatcacctggacaaagcgatttaaagcgagcggagtggaaggagcagatgtggtcaaactgcttaacaaagccatcaaaaagcgaggggactatgatgccaacatcgtagctgtggtgaatgacacagtgggcaccatgatgacctgtggctatgacgaccagcactgtgaagtcggcctgatcatcggcactggcaccaatgcttgctacatggaggaactgaggcacattgatctggtggaaggagacgaggggaggatgtgtatcaatacagaatggggagcctttggagacgatggatcattagaagacatccggacagagtttgacagggagatagaccggggatccctcaaccctggaaaacagctgtttgagaagatggtcagtggcatgtacttgggagagctggttcgactgatcctagtcaagatggccaaggagggcctcttatttgaagggcggatcaccccggagctgctcacccgagggaagtttaacaccagtgatgtgtcagccatcgaaaagaataaggaaggcctccacaatgccaaagaaatcctgacccgcctgggagtggagccgtccgatgatgactgtgtctcagtccagcacgtttgcaccattgtctcatttcgctcagccaacttggtggctgccacactgggcgccatcttgaaccgcctgcgtgataacaagggcacacccaggctgcggaccacggttggtgtcgacggatctctttacaagacgcacccacagtattcccggcgtttccacaagactctaaggcgcttggtgccagactccgatgtgcgcttcctcctctcggagagtggcagcggcaagggggctgccatggtgacggcggtggcctaccgcttggccgagcaacaccggcagatagaggagaccctggctcatttccacctcaccaaagacatgctgctggaggtgaagaagaggatgcgggccgagatggagctggggctgaggaagcagacgcacaacaatgccgtggttaagatgctgccctccttcgtccggagaactcccgacgggaccgagaatggtgacttcttggccctggatcttggaggaaccaatttccgtgtgctgctggtgaaaatccgtagtgggaaaaagagaacggtggaaatgcacaacaagatctacgccattcctattgaaatcatgcagggcactggggaagagctgtttgatcacattgtctcctgcatctctgacttcttggactacatggggatcaaaggccccaggatgcctctgggcttcacgttctcatttccctgccagcagacgagtctggacgcgggaatcttgatcacgtggacaaagggttttaaggcaacagactgcgtgggccacgatgtagtcaccttactaagggatgcgataaaaaggagagaggaatttgacctggacgtggtggctgtggtcaacgacacagtgggcaccatgatgacctgtgcttatgaggagcccacctgtgaggttggactcattgttgggaccggcagcaatgcctgctacatggaggagatgaagaacgtggagatggtggagggggaccaggggcagatgtgcatcaacatggagtggggggcctttggggacaacgggtgtctggatgatatcaggacacactacgacagactggtggacgaatattccctaaatgctgggaaacaaaggtatgagaagatgatcagtggtatgtacctgggtgaaatcgtccgcaacatcttaatcgacttcaccaagaagggattcctcttccgagggcagatctctgagacgctgaagacccggggcatctttgagaccaagtttctctctcagatcgagagtgaccgattagcactgctccaggtccgggctatcctccagcagctaggtctgaatagcacctgcgatgacagtatcctcgtcaagacagtgtgcggggtggtgtccaggagggccgcacagctgtgtggcgcaggcatggctgcggttgtggataagatccgcgagaacagaggactggaccgtctgaatgtgactgtgggagtggacgggacactctacaagcttcatccacacttctccagaatcatgcaccagacggtgaaggaactgtcaccaaaatgtaacgtgtccttcctcctgtctgaggatggcagcggcaagggggccgccctcatcacggccgtgggcgtgcggttacgcacagaggcaagcagctaagagtccgggatccccagcctactgcctctccagcacttctctcttcaagcggcgaccccctaccctcccagcgagttgcgctgggagacgctggcgccagggcctgccggcgcggggaggaaagcaaaatccaactaatggtatatatagtagggtacagaatagagcgtgtgctgttgataatatctctcacccggatccctcctcacttgccctgccactttgcatggtttgattttgacctggtccccccctgtgtgaaatgtattatcaccagcagacactgccgggcctccctcccgggggcactgcctgaaggcgagtgtgggcatagcattagctgcttcctcccctcctggcacccactgtggcctggcatcgcatcgtggtgtgtcaatgccacaaaatcgtgtgtccgtggaaccagtcctagccgcgtgtgacagtcttgcattctgtttgtctcgtggggggaggtggacagtcctgcggaaatgtgtcttgtctccatttggataaaaggaaccaaccaacaaacaatgccatcactggaatttcccaccgctttgtgagccgtgtcgtatgacctagtaaactttgtaccaattc

SEQ ID NO: 71909 - DNA, 1547 bp, Homo Sapiens
  misc_feature (1066)..(1094): n is a, c, g, or t
  misc_feature (1316)..(1325): n is a, c, g, or t
ctcgtgtgttacgttccctcccgtgcccccgttcccttattgccgtcctccttcgatttccttccgctcgtccttccccgtcctttcctgctattcgtaccttgcagatttcacaacgatgttgtccgtccgatcccggatatcgtgacccacggtcccccacgtgtgtcagatcagcaccagtcggtgatggactgtcaccaaactctaacgggtcctcctctgtcggaggatcgcaatccgttcatacggggtcccccctcaatcacgggtcgtgtgccgtgacgggttacgtctcatgatgcctatgcaagcctaagagtccgggatccccatgcctactgcctctcaagcacttctctcttgcaagcggcgaccccctaccctcccagcgagttgcgctgggagacgctggcgccagggcctgccggcgcggggaggaaagcaaaatccaactaatggtatatattgtagggtacagaatagagcgtgtgctgttgataatatctctcacccggatccctcctcacttgccctgccactttgcatggtttgattttgacctggtcccccacgtgtgaagtgtagtggcatccatttctaatgtatgcattcatccaacagagttatttattggctggagatggaaaatcacaccacctgacaggccttctgggcctccaaagcccatccttggggttccccctccctgtgtgaaatgtattatcaccagcagacactgccgggcctccctcccgggggcactgcctgaaggcgagtgtgggcatagcattagctgcttcctcccctcctggcacccactgtggcctggcatcgcatcgtggtgtgtcaatgccacaaaatcgtgtgtccgtggaaccagtcctagccgcgtgtgacagtcttgcattctgtttgtctcgtggggggaggtggacagtcctgcggaaatgtgtcttgtctccatttggataaaaggaaccaaccaacaaacaatgccatcactggaatttcccaccgctttgtgagccgtgtcgtatgacctagtaaactttgtaccaattcnnnnnnnnnnnnnnnnnnnnnnnnnnnnnggggggggcgcggccaaaaatttcccccggggggcccccaggttccgggttcccccaggttttgttggtcaccaagggtgcgcccctatatggggggcgccgatataattacgcgcttagggcacgggcgccggctgttttaacccaaccggtcggacgctggggagaaccccgtggaacccttggcgggaccctttgggcggaagagacccctttatttcnnnnnnnnnncgagacatatattggggagaaaaaattatccccttatcaaagagatttttaaagcgcctcaagggggaaaattttttaaaaatttctaagggtgttataacgggggcttaaaacacctaaaggctcgacattgaggccaggacggcctgaaaagtttggggcctacccgggagctattgcctttagaaaacatttttttaccacgggggccgcggttgaata

SEQ ID NO: 71910 - DNA, 581 bp, Homo Sapiens
tcatataagtcggtcctcgagaacgtgtatcggacagcgtcggagggacacggctcgcaggctgcggaggacgaccgtccccacgcctgccgcccgcgacccgaccgcagcatgatcgccgcgcagctcctggcctattacttcacggagctgaaggatgaccaggtcaaaaagattgacaagtatctgtatgccatgcggctctccgatgaaactctcatagatatcatgactcgcttcaggaaggagatgaagaatggcctctcccgggattttaatccaacagccacagtcaagatgttgccaacattcgtaaggtccattcctgatggctctgaaaagggagatttcattgccctggatcttggtgggtcttcctttcgaattctgcgggtgcaagtgaatcatgagaaaaaccagaatgttcacatggagtccgaggtttatgacaccccagagaacatcgtgcacggcagtggaagccagctttttgatcatgttgctgagtgcctgggagatttcatggagaaaaggaagatcaaggacaagaagttacctgtgggataacacgttcgcgaggg

SEQ ID NO: 71911 - DNA, 575 bp, Homo Sapiens
tccgtcctgagagcgtgtatgcaaaggtatgttcgtgtccttgatcttccttttctccatgaaatctcccaggcactcagcaacatgatcaaaaagctggcttccactgccgtgcacgatgttctctggggtgtcataaacctcggactccatgtgaacattctggtttttctcatgattcacttgcacccgcagaattcgaaaggaagacccaccaagatccagggcaatgaaatctcccttttcagagccatcaggaatggaccttacgaatgttggcaacatcttgactgtggctgttggattaaaatcccgggagaggccattcttcatctccttcctgaagcgagtcatgatatctatgagagtttcatcggagagccgcatggcatacagatacttgtcaatctttttgacctggtcatccttcagctccgtgaagtaataggccaggagctgcgcggcgatcatgctggcggtcggggtcgcggggcggcaggcgtggggacggtcggacctccgcagccctggcgagccgtggtactccggcggctgccggataacacgttcgcgag

SEQ ID NO: 71912 - DNA, 477 bp, Homo Sapiens
  misc_feature (264)..(272): n is a, c, g, or t
cttatttctatgtcctcaacacctagtggagtacgtagccaatagtagatgcttaataaacatttcttaaattaatattgttgaccttttctgaccctgttcttgacagtaaggtacataatctgccttcatccctttagtccttaggaacagataaagtcatggatatgaaagtgatcactgtcattaatatccacattaaaattgctcttgattttagtttctccataatcattttccctaaacaatgaactctgttcaccnnnnnnnnnaaaatatgcacagtgaatattactggtagcccaaatcttctaacataaaatttccattttgtaaaagcttctgataagcatatatgttatgaattgaatgtttgattattatactttaatattcttgaaaatattgatacctggactggaaagaaaacagacaaaagtaaatctcagaataaattactgctttaaacatgaaaaa

SEQ ID NO: 71913 - DNA, 1175 bp, Homo Sapiens
  misc_feature (1096)..(1130): n is a, c, g, or t
  misc_feature (1163)..(1163): n is a, c, g, or t
ggggagaggctcgcggccggagtgcggcgctgggcggaagctaccatggcggccgagcgaaagacaaggttgtccaagaatctactgcgcatgaagtttatgcaaaggggactggactcagaaaccaagaaacaactagaagaagaagaaaagaaaatcattagtgaagagcactggtacttggatttgccagagcttaaagagaaagagagtttcataatagaagagcagagtttcttactatgtgaagatcttctctatggaagaatgtcattcagaggatttaatcctgaggttgagaaattgatgcttcagatgaatgctaagcacaaagcagaagaagttgaagatgaaacagtagagcttgatgtgtcagatgaagagatggctagaagatatgagaccttggtggggacaattgggaaaaagttgccagaaagagagaccatgccaattatgaagaagatgaaaatggagacataacaccaattaaagcaaagaagatgttcttaaagccccaggattaagatggatgccttaagcgatggcccaggggtgcttggtggaagtcagcagggcatctggagctcatcccaatggtgtctctatagttattaatactgtaacgtttacttgtaaagagattatcattttagaaacatgctgtttttgaaacagatgtgtgatggatgttgtacatcctttgcttcttggtattcattcagagtggatttttagcccctgatctacaaatgtacattgttacagggctgcttcctaaagattttttttacctcaggtttctcttaatatagttctccagtcactgaccttgaattgacttacataaactactgccaatgtttaaattgcccttatgtttatgtttattatgtcaagccaattcgtacatacaatttggaatcaagtgtcataagaatttattatataaatttatcaagaataaaaatgcctctccagccttaagtatttacatgctcccaggtcattgtcagtttatggtattatgttgttttatttaaagcattgaattgatagaaaaatttgctctgtaataaaaatctactttcacatnnnnnnnnnnnnnnnnnnnnnnnnnnnnnnnnnnncctagcaggcggccgcaagcttattcccttgtnagtgaagggtta

SEQ ID NO: 71914 - DNA, 785 bp, Homo Sapiens
  misc_feature (677)..(725): n is a, c, g, or t
ctccttggataatgttaatattattagtattattaacaaaaaatatatatttttaaaaagttcccttaatctatgacatggtagcaatgatttccctttggtgtcttaatggcatgtcagataatttgtttttccagagaagagagctcaaagaggaattgggaaaaataaattgaactctggaatcttctctctcaagtcctaaaatgaacaaacagatatgattgtgtttgagggaaatatgtccctagcaggaaaagaattcaaagaggttcaaagaatatgtcacttactcctacttgctataggaataaccttgctgataagaaaaaaagggacaatattggagaaactacctcttgtttaattgatctgtccaactctgagatcacttggtaactggtttcatgtgtatccaaaaatcagcatttggatttaagctttctgaatttggtagtttaagaaacagatttagtttttcagtggttttaactcatgtgaaataatgattttccaccagctctgatgcaaagagatataattttaatgaacgatttatccagcagtttgttccaggggttgcctctccttatctacggggattactttgtacatgcagataagttttcgcaaacctatttccattttcttttgtaagcaaataaaactttaaaacnnnnnnnnnnnnnnnnnnnnnnnnnnnnnnnnnnnnnnnnnnnnnnnnngaccgcgtatgcggccgcaagcttattccctttagttgagggttaattttagcttggcac

SEQ ID NO: 71915 - DNA, 1669 bp, Homo Sapiens
  misc_feature (84)..(125): n is a, c, g, or t
aacttaggctagtacgagctcgcgtctaattcggccgagggagctggcccgttacggggagggccgctggacaaggcctcgctnnnnnnnnnnnnnnnnnnnnnnnnnnnnnnnnnnnnnnnnnncccgacccggacccggagatggagcacgtctagggcagaggccctgccgagagcccgtgctgcctgctggagccgcctgcagacgcggtcctcggccccacgtgaaccaggctcggcggcgaagcccagccttggagacacccaggaggaaggccgtgctcctggctccctcctcggcccgtccccacttcccggggcctcggggcacacagctggggctgcccccacccgaaagaccctccacgctcgtcctctacagagtccggcttcgggaagtgccgggtgctcctgggccctgcctggctccctacgacctttgggctcgaggccagctcctccccatgcccgctgtcccagctccttgagactggagagcagccagcaggtgcccggcagctcggcgccacggcttgctgacagctgggagggtttctcggtctggaggcgtagttttgaaactcacatcacccactgtgcagcgtgaggacgggactctggtctgctgtggggggcatgcaggacggcgccactctctgccctgccatgcggctggtggtgccacagagcctcaccgtgcctgagtggcgtgcccaggaggccgctctccttcagtaaatgtaacacagtcgaggcacgtcatcgggcagccttccctgtgtgccaacgccagccttcgcttctgaaaaccaaactccagccgctgccagtcgggacttggtcgcccggcgctgccagaatgctccactgccagccggcccccctgcctcggtttcccttctgtttagtggcgacacaggcacccagctttggggtggtgctgacgctcccaggggtgccaggagccactgggacagggtgaggctcccagacgctcctcgaggtgcccagctctccagggagcttctggcccaaggccgtctgagggatctgctccttaaccccccagtgccttggcgagggcaggttccaagccacagacgcctgccctgagtggactctgcggccagtccctggtgccctcctggccctgctgcccagtgagggctcctacgggtgggttcattggcctgggcccagcaagcccccacctgcattgaccttaggcccatagagagggcctgtcccggtgctgccccagccaggatctggtcgctgccccagggggactgatgggcagagtcgcccctgtggctggactgtgaccatccctgatggggcctgaccgcgggagctgaggaagcgccgctccaccgtctgccctccaaggacccgcatggaggcagtgggctggcagcttcctgctgctccctgtcagagtcaaagcacaaatcctcaggacgggctcaagggccagggcagccgagggaagctccaggtggggaccacgtcttcctgaggttggtgcccactggctgggaccctttgcagtggggtggcctcccctctgtctgcctggtggagggagccgtgggcgtggggacgtgactgaataaagccaccatgggtggatgtgcttggagcctggagtccggcgcgtccgctag

SEQ ID NO: 71916 - DNA, 1084 bp, Homo Sapiens
  misc_feature (919)..(937): n is a, c, g, or t
ggatgaaggtctggggtctcgccagggttggggtctggggctggggccagggcctgcctgggtttggggtcagggccgtgttggggtctggggctggggtcgcgacctgaagctggggctgggactgggtttgggtctgcggccgaggcctgggtttggggtctggggtccgcccggggcgccgaccgtcccgcctccccgcagcccgagcgggaagaagttccgcagcaagccgcagctggcgcgctacctgggcggctccatggacctgagcaccttcgacttccgcacgggcaagatgctgatgagcaagatgaacaagagccgccagcgcgtgcgctacgactcctccaaccaggtcaagggcaagcccgacctgaacacggcgctgcccgtgcgccagacggcgtccatcttcaagcagccggtgaccaagattaccaaccaccccagcaacaaggtcaagagcgacccgcagaaggcggtggaccagccgcgccagctcttctgggagaagaagctgagcggcctgaacgccttcgacattgctgaggagctggtcaagaccatggacctccccaagggcctgcagggggtgggacctggctgcacggatgagacgctgctgtcggccatcgccagcgccctgcacactagcaccatgcccatcacgggacagctctcggccgccgtggagaagaaccccggcgtatggctcaacaccacgcagcccctgtgcaaagccttcatggtgaccgacgaggacatcaggaagcaggaagagctggtgcagcaggtgcggaagcggctggaggaggcgctgatggccgacatgctggcgcacgtggaggagctggcccgtgacggggaggcgccgctggacaaggcctgcgctgaggacgacgacgcaggaaaaccnnnnnnnnnnnnnnnnnnnccccccacccggaaccgggagatggaccacgtctagggccagagcccctgccgagagcccgttgctgcctgctgggaaccgccctgtcaaacccggtccctcgggccccacgtggaaccagggcttcgcgggggaaaaccccagccc

SEQ ID NO: 71917 - DNA, 1067 bp, Homo Sapiens
  misc_feature (892)..(892): n is a, c, g, or t
  misc_feature (909)..(909): n is a, c, g, or t
  misc_feature (917)..(917): n is a, c, g, or t
  misc_feature (1029)..(1029): n is a, c, g, or t
tttaagttaaaaaatatttaatattatcagataaaaacattgattgtgacagctttacatgtttcattccatacacagtgaaaaaggcaaagtattactaggaaggaaatgagtagttgggtttgtaaaagatttattgatcacataaaagcaatgaataggagatgacatatatctaactcatgattacaaaacttttagagacaactaggttaaatatttcatgttttggctaagggaaaagaattcatgatctcgttaaagaagttcaaagtcaacactgatattgtacaactaccagtgcttttctaatgatctagaaatttgctataaatagctttactttttgctagttaatcacttactatgattgggttttatttaacagtgaggactaaagaggcagaatccttttttaaccactggataaaacagagacataaattaatgatgggtgctaagctttacattttatgttaaaaagatggaatatatttaagtggattgaatatatttcatgaggagttggacatattaaacccccaaatctgtttaggaagttttgtgagaaagtgtgtatatgccttgactcactctggcttacttttaaaatggaatacatttggcactaaataaaataaatagacaagcaaactgtgagactaagctgctccatctgagttgcccatcttgacttacaattcatactatttcttagttcttgactgagcacaacagacctaccgtatagcactctgtgatgcatgaaaatagaatctagagctaagatactgcgcttcactgatgagccaatcctctattctgccaaaatcatagttaccaatggggaaattcatccaagaaatcacatttttacaaatgcttatacttnttcaagttccttgcttngattgttncttggttgggggccagctaaaaatgacctttgaattaaggaaatcatataaaagaaacatcatttttaaggaacctcattcacttggaacttctttaccaaccacaaacccnaacttgtgacccaactcttggacaaaaaactggggcct

SEQ ID NO: 71918 - DNA, 685 bp, Homo Sapiens
agggaaagggtctattactaaagctaaaaagaggcgaatgaatactagagttaaagacaaaaatgatagcagccaatggcccatgccgtgataatctgctgagcaggcatgatggagatcccttgcccagcagaaagtgttccttggtgaaatcatgaatctgctatctaggagaaactcccttgtccattgtcttctgtggccactagtttgacctctaggaaagtcttgctcgtcagcttctgtggccccgtctgaaacttttgagggacatcgcagcttttgcagcccctgcttgctggtgcagacttttagacctagattgccttagagactgaaaaatatacgcttttataggccggggttttagttcatttgactgtaataaagacttcaatgccgtttttaatgtttgactgctgacatctttcaagactcacctttcccttctcccttatgctgcacatctgggcaagctgatggaagcatgggtgcctcctcctttggccccagcaggaagttcaaatcacgcaagccctggcatgcatgcaggaagcttcaccccagcctcacactctaagacggataaaagccaaaccaattaagccgtttctcgaccctcctgggagcctgccctatctccctggaaagtctcagtatgtgagtaataaacctttttataccc

SEQ ID NO: 71919 - DNA, 1026 bp, Homo Sapiens
  misc_feature (92)..(92): n is a, c, g, or t
  misc_feature (595)..(606): n is a, c, g, or t
aaaagctagttgttgaccagctaccctgagccaggcaccaccctgaaggagcttcttttcctctggggagaagcaaattcatgatgtgtgtnctggagatctggcactcatggccagtgctttccagtatcttgaactcttcgggggtcctgttgacccatttcgtgacctacctccgtgactgctctttttcctctgtctcttaagtgtgatggttttccagagtccaatcctcaggactttcccgtccacacacaggcctggtagtcaggtggctctaaaccattaggtgggttgtagacctctctcaagctgccacctccttgctgtcgccagatcgtatttcagtctgtcaggggttatctgtatctggaggttccactgttgcttcagtctcagttacttagaatggaacccagagtcctgcccctttccacctacatgctcttacttgaaagcacctgagacttattgggtccctgattcctgcttcgtctgtatccgcagagtagttgcatgtcatttggcctgttttctaaataatcccacatcatgtcctccctgcacttacattgccactgctctgatttgggcnnnnnnnnnnnngggacaatgcctctgtcccaattctgagtaacagctctggttcttgccactaccagagttctctagcaaatctgagcatctgacagggtgaaaaattctgaatggcttcctgatgcctgactttatgggatcaaattcaagttgcacgctggcactcagtgcccttctggtatcatctgccaagaccagggcctgcttcaccacagccacaataaagtcctttcaagccctgataatgccatgttttgtcctaaccttttgctgcagttaattactcttcctatttatcttccatgaacttaagactggggcaaaaatggttccttatctgtgagccactctgaacacaaacaggtcatgaagatagtgttgaaatcaataaatgccacccaaaagaaaagtgtatagtgtcatagtaca

SEQ ID NO: 71920 - DNA, 1524 bp, Homo Sapiens
ccgcagcgccggaacctcagaggcgggtcgcagcggcgcagaggaggtcagctgcgggagcgtttccggggacggtgccgccatgagattgaccccgcgcgcgctgtgcagcgccgcccaggccgcctggcgggagaacttccccctgtgcggtcgcgacgtggcgcgctggttcccgggccacatggccaaggggctgaagaagatgcagagcagcctgaagctggtggactgtatcatcgaggtccacgatgcccggatcccactttcaggccgcaaccctctgtttcaggaaacccttgggcttaagcctcacttgctggtcctcaacaagatggacttggcggatcttacagagcagcagaaaattatgcaacacttagaaggagaaggcctaaaaaatgtcatttttaccaactgtgtaaaggatgaaaatgtcaagcagatcatcccgatggtcactgaactgattgggagaagccaccgctaccaccgaaaagagaacctggagtactgtatcatggtcattggggtccccaacgtgggcaagtcctccctcatcaactccctccggaggcagcacctcaggaaagggaaagccaccagggtgggtggcgagcctgggatcaccagagctgtgatgtccaaaattcaggtctctgagcggcccctgatgttcctgttggacactcctggcgtgctggctcctcggattgaaagtgtggagacaggcctgaagctggccctgtgtggaacggtgctggaccacctggtcggggaggagaccatggctgactacctgctgtacaccctcaacaaacaccagcgctttgggtacgtgcagcactacggcctgggcagtgcctgtgacaacgtagagcgcgtgctgaagagtgtggctgtgaagctggggaagacgcagaaggtgaaggtgctcacgggcacgggtaacgtgaacgttattcagcctaactatcctgcggcagcccgtgacttcctgcagactttccgccgtgggctgctgggttccgtgatgctggacctcgacgtcctgcggggccaccccccggctgagactttgccctgaacttgtccgggtagggagggccggaggcatgtggcctcccagacctcctgacctgggtggttgaggctcaagacagctcacccggtccagaagctccatgctggtcactagggtgctgtgctctctggcgccccacagcctggccagctccagggaccccagttgcagggcccaagcaggtgggagtggacaccaggcttcccagtggacgtccctgagcagctccgcatgcttggttctcccggagcttcctgctcaggcctcttgagaaatggatgctgtctcagaaggagttaaagctataacctgtaacctttaaaatctccagttaaagggcctgtttcttactggcctgtgaggtgcaccgtagtgccttgggcctgtgtgttaaagctgctctcaccagtggaacctaagaaatgagcaggttggcagct

SEQ ID NO: 71921 - DNA, 896 bp, Homo Sapiens
gttccccagaggatctaattcccacttaatttggagaataaataaaagcgtcaggtcccacagcttgtcttctgctcccaaggagaacacaaggaagggagtggaggtgggcgcggggcccacactcaggtctgtcctgaccactgcatggcctggacagtggcctcctcatctggaaatggggaaaacagcgtgccttccccaaaggtttggcgcaaagactatgacgactgtggaataagggcaggggcagtgcctgccccgggggtgctcagcggggacactgagtggaggggagggaagcgtggtcagcagccggaagccacacagaggtcggcaggtgccagacgcctgcagagctcttgacagagtgctgggcctggcccctgaggactccacctgaattttggacatcacagctctggtgatcccaggctcgccacccaccctggtggctttccctgtaggaaaaggagaaaaggaggctcaaatgtatactaaacacagaagctgcagaacaagtagggagacgtatgtaacaaacacatctgaccagccaagcagggagactatgtaacaaacacaacttaccagccaagcagggagactatgtaacaaacatatctggccaaaatggaaactaaaagccagatgagcttcccaaggctataatttgtttcactttcagtcacaaaccagctcacagcaagggcactttccaagccacacagagactgagattcttcaacaaatgcaccagaacctaactccccaggactggaaaggcactgtcagactgcggaggtcagacctgagctgctccttccacgcagtcccccacctccctcctagacccacccctgcaccccagttcctgtcaggcatcctgtagatca

SEQ ID NO: 71922 - DNA, 810 bp, Homo Sapiens
  misc_feature (804)..(807): n is a, c, g, or t
  misc_feature (810)..(810): n is a, c, g, or t
ggccaggattcgcccgagcccaacgaggtgtcacagttagacagggaaaaaattttaaacaaatgttaaaaagagaatcagctcatgcttaggatttttagaaaagaaatggatacagtctaaagattaactcacccggtactttattctaagaagggtctggcatccatatgaggaaaaatgctcagctccaggaaagatggggagtccaagtggattaatgatgtcatgcataattttaagagacaagggagaaaacacaatgtatagccagagaaggagaagctcccatccaaatcctactaggaagagagtgggctgcagatgaatctgtgactcatgtttccctgtttcaaagggatcctggggaaggaggggaacatgcttgcagtatctctccctgtctgtctgctcacataagcattccgtccatctgagctcatcgtgctactggtatgtgtatgtgcagttacacagttttctgtatcatagattctagtgtgtttatacaaggagacatctgtggtttccccaaccgttccaaaaggctatttcaaaggaaccagccaacgtatgagaaatgaatgtaacactgtggacattgacttcccgcataaggcagggtgaccccctgaactccagatgtctgcacagtatcttatgtgttgttttccgttgtgacgaatgtgattggaacatttggggagcacccagagggatttctcagtgggaagcattacactttgctaaatcatgtatttattcctgattaaaacaaacctaataaatatttaacccttggcnnnnaan

SEQ ID NO: 71923 - DNA, 1184 bp, Homo Sapiens
  misc_feature (12)..(12): n is a, c, g, or t
  misc_feature (41)..(41): n is a, c, g, or t
  misc_feature (117)..(117): n is a, c, g, or t
  misc_feature (193)..(193): n is a, c, g, or t
  misc_feature (1001)..(1018): n is a, c, g, or t
aggcccccaagnagaagatggtgccctaagatgcccacagnagaagaggcaaacctcaaatgcctgagaacccccaagctgatatccagaaatgctgtgtgcctgcctttgtatccnaaatgtagtgcaggtgaaaagccccagaaggaaaatttcaagaagaccaagtactggagctgtcagaatgcaaccnaaaatcagctgagttgaagtttgtcacccaagaacgatggatatgtacacattcacccttcatcagtgaactatcaggtgagacactttgacagcccctacctgttgtaccacgagaagataaaaactagtcgagtattcacccgagactgcagcatggtgtctgtgcacccgctggtcttgtttggaggaggccaagtgaatgtgcagcttcaaagaggagagttcgttgtctccctggatgatggttggatccgttttgtagctgcttcccatcaggtggctgaactggtaaaggagcttcgttgtgaacttgatcagcttctccaggataaaattaaaaacccaagcattgatctgtgtacgtgtcctcgaggatcccggatcatcagcacaattgtgaaacttgtcaccacacaataaaaagcagtcttagagagtgcttgctactcacctgcttctagctcacctgggaaataacagcagaacctctacctcgaactaaagacctattggggctggccctggtggaggagcccagggcatgaagcccaaggcagctgaggcagtgtatatacccttagggccatttctaacaaagccttggccactcccagcacaatttggagtgtcaagggtgagagcctaaaacccagcttgcctgtctttgtctctgtgattgttctggagtgaattaagttcacctgataactcaaaagtgaatgtataatacaattctgttttaatctgtgtattctttttctcctactttttactggggtgagaggggcatgaagagaaatacgccnnnnnnnnnnnnnnnnnncctgtcgccaaggctcgactgagagaagtcagaacagagaaggggaaaaaaaacccaaaattatgtgaacaagcaaaattaaaatttcattttaggctattggctactgagtaaacttgacttgtgaggggtttttatttttactcattaaaagtcaacttaaaaa

SEQ ID NO: 71924 - DNA, 1359 bp, Homo Sapiens
aatttaggctaggtacgaggctgggttgtgaatcggcacgaggactgggaatgtgactttgaccagagacgtaacgtggaatgtggactcctggcacaatggcattccaggcagaggaacaggatgtgcactgcccccaaagtgagaacttgctctacgtggtcaggaagagagcagggcagaccaagcagcagtcgtgggcaggggtagaatggaaggagaggcggcttggggaggacaggtggtggagggccttggcttctgctaagtgagatgggaaccactggagggtttgaacagaggagtgccttgattgatttatattttgcaagggtcattctagctgcaatattgtgaaaaactttagtggacaagggcagaaggaagagggaagacctgttaggaagctactgcaaggttccaggcttgggcctgggccacagcaacagcagtggtcaaatatctagatttattttgaaaagagccaataggatttgctgagagtttgaatgtggagtgtaagagaaggaagagttaatgatgacattaaggtttttggcctgaatagcaggaaagatggagttaccagttactgaaatagggaaggatgggctgggtaagtaaggaatttggtgcaaagcaggctgtctgtggttggaatgggaggttctggctgcaaatcaaagtggagagttctctcaggtcaggtctgcagcagagctcgagacagggatctgaatgcacttggtttattgttgggggtgctctcagaaggaacctgtgaaagcctttatcagtcatttattggctgtgagaagttctctgggagtgtgggtacatttgaaggcaagtgacttcagttgagggcaagtctctggaaaagaggctgtaggcatctggcagctaccatgcatggtagtgtgttgggggtgggggtcctgggcactggctgtgtgaagggatctggcagggcaccacagcgccccctactgaaccatcagcatgtcagtggcatttaaagccatgcagctggaggggccactgagattgtctctgagtattactgagaagcaacagaaaagagccatggatggagcccttgggctctctgggaaatgggaaatcagccaaaggactgagaaggagttaccttaaggtcagagaaaaccaagagagtgtggtgttctggaagctgagctttctttattcaacctcattcccttctccaaataagccacttgtgtagttgggcccctccagggttgaaggcaagaggagaaaggcacagcgtttgggaaacaagacttttcctgcaatagcctgggaaggaataaaagggatagaggtgtttgggggaaa

SEQ ID NO: 71925 - DNA, 510 bp, Homo Sapiens
actatatggataagaatgcaggtagataatattctaggcataaaacatttaatgtaccttacctcatgcaatattctttggattctttgttgatttatgatattgctaatataatattttcttaaaatatataacaatatcttttatgcattttgagttccagctggtgcttctttatatttagaaattataatgggaaggtcatttaatttacagatggttttaaaattgaggtaatatctgaggtggcataatttaaaaatatttagcaaatttgtttcatatatactgtcttatttctagatttgtttaaaattggaatatgaaaaactaatggataaagctagcataaaattgatattttagtttgtattattaatatatcatgttaccttatatattaatctactcttgattctgctaattattaccaacaaaattgtattcatgacattttattaatcctctgtgaattttctgtaaataaaattatttctgaaaatctctaaa

SEQ ID NO: 71926 - DNA, 1233 bp, Homo Sapiens
tacatgaatgtgaagtggatcccactgtcctctgatgcacaggctcctctggcccagcctgagtcccccaccgcctcagctggagatgagccccggtccactcctgagtctggagactcagacaaggagtcagttggcagcagttccaccagcaacgagggcggccggcggaaggagaagtcaaagcgagatcgggagaaggacaagaagagagcagattctgtggctaacaaactgggcagctttggcaaaaccttgggcagcaagctcaagaagaacatggggggcctgatgcacagcaagggttcaaagcctggaggggtggggacagggttgggaggaagcagcggcactgagacactggagaagaagaagaaaaactcactgaagagctggaagggtggcaaggaggaggcagctggggatgggcctgtgtctgagaagcccccagctgagtctgttggtaacggagggagcaagtatagccaggaggtgatgcagagcctgagcattctgaggactgccacatttgatctaaagcacttgagcgtgcatgcatgtgcgtgcgtgcatatgtgtgtgtgttttcctcctcggtagccagtcaagattgtccttgttggaaatgctcacggtttataaaggttattttctcctcaacaaactcagaagtcacctattttccaaatctgatttaataatttcctatggctattaattcttagggttttctttgaaaatagatttgtgttaaggaagcagtgagattccaaaggaagggatgtgtatatgtctaggcaggtctggaacctggtatgagatgagcactcccctaagttgcaaaatttaagggttttttggcactccttaaattttgtgcccaaggtgagtgctttgctcacctcaccctagttacgtccctgtttctgtgatttgaacactagcgagaacaccactgtgtgcgcctccacccccatcacacaccaaacaacaggtggctcagacaccctgaatttgcacagctcacctagctttcctaatttaggccttcatatcatagaatggtggcctggaccaataggaatgaaaacagaccaggggttttcccagagaataaagccggaaaagttttgattctccactggactgctgtgtttggatttgatctgttgttagattctagttaacacttttgtttttaaaaactaaggacaaatgaacaaaaaaccttgt

SEQ ID NO: 71927 - DNA, 586 bp, Homo Sapiens
caaaatttccatctttttttatttgaaaataaagcaaacggaattgggattggctaacttataaataaaaacaaacatgatacaaggttttttgttcatttgtccttagtttttaaaaacaaaagtgttaactagaatctaacaacagatcaaatccaaacacagcagtccagtggagaatcaaaacttttccggctttattctctgggaaaacccctggtctgttttcattcctattggtccaggccaccattctatgatatgaaggcctaaattaggaaagctaggtgagctgtgcaaattcagggtgtctgagccacctgttgtttggtgtgtgatgggggtggaggcgcacacagtggtgttctcgctagtgttcaaatcacagaaacagggacgtaactagggtgaggtgagcaaagcactcaccttgggcacaaaatttaaggagtgccaaaaaacccagtaaccaagataaatactattttaatgcaacatttttaaaaaatcacaatcaatgcaaaaagtctatgatggacaatgtatcaaaaatttaaataagaaggattcatccccatacttagtc

SEQ ID NO: 71928 - DNA, 391 bp, Homo Sapiens
atgtgcccagaacccttctttgctgctgatccataatcagtaagacaggatatacaggcaagtctactggtgaaacagctctggatttatcccatttctagtctcactgtaaccaacatgtagcaggcccttatcacacagtatcttcccgcatggtctcctgactctaaagtccaatctaacaacagatcaaatccaaacacagcagtccagcggagaatcaaaaacttttccggctttattctctgggaaaacccctggtctgttttcattcctactggtccaggccaccagttctatgatatgaaggcctaacattaggaaagctaggtgagctgtgcaaagttcagggtgggcttctggcggcacacaggggctaccggagctcgaa

SEQ ID NO: 71929 - DNA, 1215 bp, Homo Sapiens
  misc_feature (60)..(60): n is a, c, g, or t
  misc_feature (170)..(211): n is a, c, g, or t
ctgcctgctccccgggggagaggaccgccggcctcagctactagcccaccagcccaccanggagaaaagaagccatgagaggcagcgcccgccaccctgtgtccacagcccccaccttcccgcttcccttagaaccctgccgtgtcctatctcatgacgctcatggaacnnnnnnnnnnnnnnnnnnnnnnnnnnnnnnnnnnnnnnnnnngttctaaagaaaagtcattttgatgcaaggtcctgcctgccatcagatccgaggtgcctcctgcagtgaccccttttcctggcatttctcttccacgcgacgaggtctgcctagtgagatctgcatgacctcacgttgctttccagagcccgggcctattttgccatctcagttttcctgggccctgcttcctgtgtaccactgaggggcagctgggccaggagctgtgcccagtgcctgcagccttcataagcacacacgtccattccctactaaggcccagacctcctggtatctgccccgggctccctcatcccacctccatccggagttgcccaagatgcatgtccagcataggcaggattgctcggtggtgagaaggttaggtccggctcagactgaataagaagagataaaatttgccttaaaacttacctggcagtggctttgctgcacggtctgaaaccacctgttcccaccctcttgaccgaaatttccttgtgacacagagaagggcaaaggtctgagcccagagttgacggagggagtatttcagggttcacttcaggggctcccaaagcgacaagatcgttagggagagaggcccagggtggggactgggaatttaaggagagctgggaacggatcccttaggttcaggaagcttctgtgcaagctgcgaggatggcttgggccgaagggttgctctgcccgccgcgctagctgtgagctgagcaaagccctgggctcacagcaccccaaaagcctgtggcttcagtcctgcgtctgcaccacacattcaaaaggatcgttttgttttgtttttaaagaaaggtgagattggcttggttcttcatgagcacatttgatatagctctttttctgtttttccttgctcatttcgttttggggaagaaatctgtactgtattgggattgtaaagaacatctctgcactcagacagtttacagaaataaatgtttattttgtttttcagaaaaaaa

SEQ ID NO: 71930 - DNA, 1478 bp, Homo Sapiens
taagtagcgaggcctgggtggcgaattcggcacgaggcgcagctcgcaggcgccgcgtagccgtcgccaccgccgccagcccgtgcgccctcggcgcgtacccgccgcgctcccatccccgccgccggccaggggcgcgctcggccgccccggacagtgtcccgctgcggctccgcggcgatggccaccaagatcgacaaagaggcttgccgggcggcgtacaacctggtgcgcgacgacggctcggccgtcatctgggtgacttttaaatatgacggctccaccatcgtccccggcgagcagggagcggagtaccagcacttcatccagcagtgcacagatgacgtccggttgtttgccttcgtgcgcttcaccaccggggatgccatgagcaagaggtccaagtttgccctcatcacgtggatcggtgagaacgtcagcgggctgcagcgcgccaaaaccgggacggacaagaccctggtgaaggaggtcgtacagaatttcgctaaggagtttgtgatcagtgatcggaaggagctggaggaagatttcatcaagagcgagctgaagaaggcggggggagccaattacgacgcccagacggagtaaccccagcccccgccacaccaccccttgccaaagtcatctgcctgctccccgggggagaggaccgccggcctcagctactagcccaccagcccaccagggagaagagaagccatgagaggcagcgcccgccaccctgtgtccacagcccccaccttcccgcttcccttagaaccctgccgtgtcctatctcatgacgctcatggaacctctttctttgatcttctttttcttttctccccctctttcctgttctaaagaaaagtcattttgatgcaaggtcctgcctgccatcagatccgaggtgcctcctgcagtgaccccttttcctggcatttctcttccacgcgacgaggtctgcctagtgagatctgcatgacctcacgttgctttccagagcccgggcctattttgccatctcagttttcctgggccctgcttcctgtgtaccactgaggggcagctgggccaagagctgtgcccagtgccctgcagccttcataagcacacacgtccattccctactaaggcccaaacctcctggtatctgccccgggctccctcatcccacctccatccggagttgcccaagatgcatgtccagcataggcaggattgctcggtggtgagaaggttaggtccggctcagactgaataagaagagaaacaatttgcccttaaaattacccgggcagtgggcttttgctgcccgggcctgaaaacaccctggttcccacccttcttggaccgaaaatttcccttgggaacccagaagaaagggcaaaagggcctgaagccccaacaagcttgacggggaaggggagctatttccccgggggttttccactcctcccggggggcttccccccaaa

SEQ ID NO: 71931 - DNA, 1028 bp, Homo Sapiens
  misc_feature (276)..(316): n is a, c, g, or t
ggagcgaggcctgggtggcgaattcggcacgagggggggagccaattacgacgcccagacggagtaaccccagcccccgccacaccacccccttgccaaagtcatctgcctgctccccgggggagaggaccgccggcctcagctactagcccaccagcccaccagggagaagagaagccatgagaggcagcgcccgccaccctgtgtccacagcccccaccttcccgcttcccttagaaccctgccgtgtcctatctcatgacgctcatggaaccnnnnnnnnnnnnnnnnnnnnnnnnnnnnnnnnnnnnnnnnngttctaaagaaaagtcattttgatgcaaggtcctgcctgccatcagatccgaggtgcctcctgcagtgaccccttttcctggcatttctcttccacgcgacgaggtctgcctagtgagatctgcatgacctcacgttgctttccagagcccgggcctattttgccatctcagttttcctgggccctgcttcctgtgtaccactgaggggcagctgggccaggagctgtgcccagtgcctgcagccttcataagcacacacgtccattccctactaaggcccagacctcctggtatctgccccgggctccctcatcccacctccatccggagttgcccaagatgcatgtccagcataggcaggattgctcggtggtgagaaggttaggtccggctcagactgaataagaagagataaaatttgccttaaaacttacctgggagtggctttgctgcacggtctgaaaccacctgttcccaccctcttgaccgaaattttccttgtgacacagaggaagggcaaaggtctgaacccagagtttgacgggagggaagtattttcgggggttcactttcagggggctccccacagccgaaccagattgtttaagggaaagacaaggccccagtggtgggggacctgtggcatttttaaggagagaggctggggaaaacgggatcccctttaggtttccagggaaaagctttccgggc

SEQ ID NO: 71932 - DNA, 688 bp, Homo Sapiens
  misc_feature (1)..(1): n is a, c, g, or t
naagggggtggggctggaaagatcagaaaaaactggcagaagtgttaacagtgtgtctattttcaaactctcgtaaaaatgaaaatgaaacaatgattactcaacgaacacgcaagcctttttctatagacctttgctggatttaaatcagcctatgtgagaacttcaccagccagaggcatcccagccagcccagctttgggtgctgaaaagggccctttctgggacagactgactggctgccttcagctgccaggtggaatgtattatttgacttcccagcaaacttgccagttgtcctgtaggaaaggcccagttcccactgccgtgcaaacactaggccctcggacaaggccatctggcattgcggttagagcttgcttggttgtccaaagtttattatggtgaagaaagcagaagaaagaacagtagttacacatgaatatgatgggcagtattatcatgtcttcctaaaaaatgagatgatgccaccgtaaagatgtttctgtgcttgtactcaactccagaagatagtctctctccagaatgtcaagttaccgaagataaattaaattaatctcatgttcttcatcattcactggtatgccaaacacatgaattgatatatcataatatttaatatttgcaattatcttaagaacagataataattacacctgactttttc

SEQ ID NO: 71933 - DNA, 972 bp, Homo Sapiens
ttctttcaacatttcttgaaggacatggagtggagattggatcatttaacaatataacaaaacttcctgatttgattttacgtatcttctatctacgcccttcctgtgcctgtgactctccccaaattgccctgttgccttgagctcttctgagctaaggcagccttcagtccctatcagcgcctcctttacttcccagagaacttcacagagactctgtccttccatgcaaaggcttcctgaaatagggagactgactgagtagctcattcttgtgacttacagtgccaacatttaaaaaagtatgaaaatgatttatttttatatgatgtatacccataaagaatgctcatattaatgtacttaaattacacatgtagagcatatctgttatatgtttatgtaactatcaaatggttatttgttactaaagctatatttctgataaaaaatattttaggataattgcctacagagggatttatttttatgatgctggaaatatgaaatgtattttaaaatttcactctggcatatgatttatctatcaccattactttttttaaagtcacaatttcagaattttgggacatttgcattcaatttacaggtaccagtacgtacatattttaatagaaagatacaacctttttattttcactccttttatttctgctgcttggcacatttttgagttttcccacattatttgtctccatgataccactaagcagtgtgctggacctaaaatactgactttagttagtatccttggatttttagattcccagtgtctaattccctgttataatttgcacaaacaaaacaaaatgttatgataatctttctccactgttctaatatatattgtatttttatttgatagcttgggatttaaaacatctctgttgaaggcttttgatccttttgagaaataaagatctgaaagaaatggcataatcttaaaacttg

SEQ ID NO: 71934 - DNA, 1277 bp, Homo Sapiens
  misc_feature (660)..(699): n is a, c, g, or t
  misc_feature (797)..(851): n is a, c, g, or t
ttttttttgtttatactggtttaatccatgtcaaatgtagtttacaaagggaaaggacaagtacctttgtatagaatatacagacacagcatcacaccacagggcccacgggagggtcggggagacgacactttttccctgggaaaggcagctctaatcccaggaatggttctcagcagaggctgggtggccaggagcactgtcctctagccccctaactcagcctctgcttcagctcggttcccatttcctgcctctaccccccaactccttataaagagccccatgagctaagactaaggagaggatcatgtcccttggggcgtgtgccccatgtctgggagaagaaatatacaccactgaacaccgagcacatgggagagggaagggacaccacaggagagagagaggcaggtaccccaagaggtggatgggccgagctcccagccaaccctgaaggaggcgctgcttccaggggttcttaaaaaagaagaaaatcatacaaccaaagggggaggggacaggtagagggcgaggagttgtcccatttatacacaacattgtaaacatacacggtctatattacatgtgcttcagtctggtgtttgcatgtctgtctgtccgtctgtcagtatgggggctggatcttaggagccgtgnnnnnnnnnnnnnnnnnnnnnnnnnnnnnnnnnnnnnnnngggaacagagctggaacaggtatggcccccaaaccataggtgggagccagcaggtagtgcctgggccacagcctctactctggctccagagtcctgcnnnnnnnnnnnnnnnnnnnnnnnnnnnnnnnnnnnnnnnnnnnnnnnnnnnnnnngggaacctgtgtgcaagtatgtacaaagggagacggtcactgtcacagaggctgggggcaggtggggctgctggaggcgaggcctgcctggggcagatagctcacaagtagatcctccgcaggtctccgggcgctgtgatcgtgttgcactgagggcagagcttcttggcacccagggtccgcagccagcactcctcgcagtgcacgtgccaacactggatggacgttaggggcatcgagtacgagtccatgcagatgaggcatttgtaacggtccccacgagatagctgccgttcaagttctctgacccgagccttcagagcctcaaacgtggtcacagctgaatcttcggtgattttctcgatgtcgctgttcttgcaggtcttctgcatggcctcctgcttgctgctttcaccattgctggtg

SEQ ID NO: 71935 - DNA, 1538 bp, Homo Sapiens
  misc_feature (1221)..(1242): n is a, c, g, or t
cggcagtactcttacggttctaaggtagcgaggcctgggtggcgaattcggcacgaggcatggccgccgccgccgcttggagctgaagtgccgccgccgccgggcagccacggggaatccgcccgcatcgccgccctcgccggccgggcggccgtggggcccagagcgccggaggccagggctggggcggcaccgcgcagcggccacggggtcccgttagagcagcgcccggcggctatgccgagagcccggagcggccggaggagcagaggggccggcgggagggaggaaacctttctgcgagtacgagccaaccggcagacccgactgaatgctcggattgggaaaatgaaacggaggaagcaagatgaagggcagagggaaggctcctgcatggctgaggatgatgctgtggacatcgagcatgagaacaacaaccgctttgaggagtatgagtggtgtggacagaagcggatacgggccaccactctcctggaaggtggcttccgaggctctggcttcatcatgtgcagcggcaaagagaacccggacagtgatgctgacttggatgtggatggggatgacactctggagtatgggaagccacaatacacagaggctgatgtcatcccctgcacaggcgaggagcctggtgaagccaaggagagagaggcacttcggggcgcagtcctaaatggcggccctcccagcacgcgcatcacacctgagttctctaaatgggccagtgatgagatgccatccaccagcaatggtgaaagcagcaagcaggaggccatgcagaagacctgcaagaacagcgacatcgagaaaatcaccgaagattcagctgtgaccacgtttgaggctctgaaggctcgggtcagagaacttgaacggcagctatctcgtggggaccgttacaaatgcctcatctgcatggactcgtactcgatgcccctaacgtccatccagtgttggcacgtgcactgcgaggagtgctggctgcggaccctgggtgccaagaagctctgccctcagtgcaacacgatcacagcgcccggagacctgcggaggatctacttgtgagctatctgccccaggcaggcctcgcctccagcagccccacctgcccccagcctctgtgacagtgaccgtctccctttgtacatacttgcacacaggttccccatgtacatacatgcacatactcaaacatgcgtnnnnnnnnnnnnnnnnnnnnnngcaggactctggagccagagtagaggctgtggcccaggcactacctgctggctcccacctatggtttgggggccatacctgttccagctctgttcccagggtggggcagggaggtgggggttgggggagtagtggggcacggctcctaagatccagcccccatactgacagacggacagacagacatgcaaacaccagactgaagcacatgtaatatagaccgtgtatgtttacaaaggtacttgtcctttccctttgtaaactacatttgacatggattaaaccagtataaacaa

SEQ ID NO: 71936 - DNA, 399 bp, Homo Sapiens
agtatctcatgggaacctgttgcaagtattcaaagggagacggtcactgtcacagaggctgggggcaggtggggctgctggaggcgaggcctgcctggggcagatagctcacaagtagaccctccgcaggtctccgggcgctgtgatcgtgttgcactgagggcagagcttcttggcaccctgcagggagaacagggagggctctggtctacacaatgagccatgttgtgcgcatgtgagcacctgggcctgcagccatgtctctctgcaccagtgtgtgctgagaccttggtcctgtcagcccaggctggggacgcataggcagcttctgtgagcaggcaggcacgctcctgtgttggggggacgccaggagtcatccctctgccagccttacacaca

SEQ ID NO: 71937 - DNA, 1240 bp, Homo Sapiens
gatcgctggctgccgggacttttctcgcgctggtctcttcggtggtcagggatggcgcggaagtcgaacttgcctgtgcttctcgtgccgtttctgctctgccaggccctagtgcgctgctccagccctctgcccctggtcgtcaacacttggccctttaagaatgcaaccgaagcagcgtggagggcattagcatctggaggctctgccctggatgcagtggagagcggctgtgccatgtgtgagagagagcagtgtgacggctctgtaggctttggaggaagtcctgatgaacttggagaaaccacactagatgccatgatcatggatggcactactatggatgtaggagcagtaggagatctcagacgaattaaaaatgctattggtgtggcacggaaagtactggaacatacaacacacacacttttagtaggagagtcagccaccacatttgctcaaagtatggggtttatcaatgaagacttatctaccagtgcttctcaagctcttcattcagattggcttgctcggaattgccagccaaattattggaggaatgttataccagatccctcaaaatactgcggaccctacaaaccacctggtatcttaaagcaggatattcctatccataaagaaacagaagatgatcgtggtcatgacactattggcatggttgtaatccataagacaggacatattgctgctggtacatctacaaatggtataaaattcaaaatacatggccgtgtaggagactcaccaatacctggagctggagcctatgctgacgatactgcaggggcagccgcagccactgggaatggtgatatattgatgcgcttcctgccaagctaccaagctgtagaatacatgagaagaggagaagatccaaccatagcttgccaaaaagtgatttcaagaatccagaagcattttccagaattctttggggctgttatatgtgccaatgtgactggaagttacggtgctgcttgcaataaactttcaacatttactcagtttagtttcatggtttataattccgaaaaaaatcagccaactgaggaaaaagtggactgcatctaatccatctttactgtcaacatctgtatttaaagaagaaagaaacaaaggctgaaaaggctgctcactctcatcatctagtgttcctcatgtgttctaaagtctttttgtaaaataaacacaaaaataaatttatgttgaattggcaaaa

SEQ ID NO: 71938 - DNA, 1092 bp, Homo Sapiens
  misc_feature (58)..(58): n is a, c, g, or t
  misc_feature (100)..(100): n is a, c, g, or t
  misc_feature (148)..(148): n is a, c, g, or t
  misc_feature (167)..(167): n is a, c, g, or t
  misc_feature (175)..(175): n is a, c, g, or t
  misc_feature (177)..(177): n is a, c, g, or t
  misc_feature (182)..(182): n is a, c, g, or t
  misc_feature (303)..(303): n is a, c, g, or t
  misc_feature (379)..(379): n is a, c, g, or t
  misc_feature (403)..(403): n is a, c, g, or t
  misc_feature (982)..(1023): n is a, c, g, or t
  misc_feature (1061)..(1062): n is a, c, g, or t
gagcgcatggccatgcatatgtgagtgctcatcatagcaccccacttacattatgtcnggctgttgtgttggatgtgacggtacattcacacaggacagntagactgatacgagttatagactcatatagggattgccctcgagccangaatccgcacgagtcagcnccaggacngncctcnttcagtgagatgccagcgccttggagacagcaccgtgacagcagccgtgagaaggacccgctcaggatgcctgggcagggaggacatctctagagggagctcacagcatgatggcacgatncctgtcctcttggccatgagcccctgccttagtgcaacaggcattgctgaggtctgagcagggcatggcctttccntcatgttccctcaccctcatcctntgcgaggctgacttggacccaaactgggcgactagggctttgagctgggcagttttccctgccacctcttcctctatcagggacagtgtgggtgccacaggtaaccccaatttctggccttcaacttctccccttgaccgggtccaactctgccactcatctgccaactttgcctggggagggctaggcttgggatgagctgggtttgtggggagttccttaatattctcaagttctgggcacacagggttaatgagtctcttggcccactggtcccacttgggggtctagaccaggattatagaggacacagcaagtgagtcctccccactctgggcttgtgcacactgacccagacccacgtcttccccacccttctctcctttcctcatcctaagtgcctggcagatgaaggagttttcaggagcttttgacactatataaaccgccctttttgtatgcaccacgggcggcttttatatgtaattgcagcgtggggtgggtgggcatgggaggtaggggtgggccctggagatgaggagggtgggccatccttaccccacacttttattgttgtcnnnnnnnnnnnnnnnnnnnnnnnnnnnnnnnnnnnnnnnnnnacactcgctgctctcaataaataagccttttttgaccnntcgccgatccgctatcccccaataccctgt

SEQ ID NO: 71939 - DNA, 818 bp, Homo Sapiens
  misc_feature (728)..(728): n is a, c, g, or t
gctggaccggtccggaattctccggatgtgacttctctacaagtctgatgtctgggccttcggtgtgctgatgtgggaagtgtttacacatggagagatgccccatggtgggcaggcagatgatgaagtactggcagatttgcaggctgggaaggctagacttcctcagccccgaaggctgccccttccaaaactctatcggctgatgcagcgctgctgggccctcagccccaaggaccggccctccttcagtgagattgccagcgccctgggagacagcaccgtggacagcaagccgtgaggagggagcccgctcaggatggcctgggcaggggaggacatctctagagggaagctcacagcatgatgggcaagatccctgtcctcctgggccctgaggcccctgccctagtgcaacaggcattgctgaggtctgagcagggcctggcctttcctcctcttcctcaccctcatcctttgggaggctgacttggacccaaactgggcgactagggctttgagctgggcagttttccctgccacctcttcctctatcagggacagtgtgggtgccacaggtaaccccaatttctggccttcaacttctccccttgaccgggtccaactctgccactcatctgccaactttgcctggggagggctaggcttgggatgagctgggtttgtggggagttccttaatattctcaagttctgggcacacagggnttaatgagtctcttggcccactggtcccccttgggggtctagacccaggattatagagggacaccagcaaagtgaggtccttccccactt

SEQ ID NO: 71940 - DNA, 1110 bp, Homo Sapiens
  misc_feature (75)..(109): n is a, c, g, or t
aacatatctgaactcatatgggcccgcgtttagcgaacgaacgagcgcagcgagctgtgagcgaggaagcggcgnnnnnnnnnnnnnnnnnnnnnnnnnnnnnnnnnnncagtcgacggtaccggacatatgcccgggaattcggccattacggccggggggtgcagccacagatcagcaggacccctcaagcggcccagctagactgaggccctggccagccactgggagtcaggcccagtctgcgtcctaaccccggcctgggatgaggacactgcacaaattggccccaagagaattaggaaagctgccaagaagagagctgatgccttgtgacttccctggctgtggaaggatcttctccaaaccggcagtatttgaatcaccacaaaaagtaccagcacatccaccagaagtctttctcctgcccagagccagcctgtgggaagtctttcaactttaagaaacacctgaaggagcacatgaagctgcacagtgacacccgggactacatctgtgagttctgcgcccggtctttccgcactagcagcaaccttgtcatccacagacgtatccacactggagaaaaacccctgcagtgtgagatatgcgggtttacctgccgccagaaggcttccctgaactggcaccagcgcaagcatgcagagacggtggctgccttgcgcttcccctgtgaattctgcggcaagcgctttgagaagccagacagtgttgcagcccaccgtagcaaaagtcacccagccctgcttctagcccctcaagagtcacccagtggtcccctagagccctgtcccagcatctctgcccctgggcctctgggatccagcgaggggtccaggccctctgcatctcctcaggctccaaccctgcttcctcagcaatgagctctcctccagctttggctttgggaagccagactccagggactgaaaaggagcaacaaggagagggtctgcttgagaaatgccagatgcttggtccccaggaactaaggcgacagagtgcagggtgggggcaagactgggctgtaggggagctggactactttagtcttcctaaaggacaaaataaacagtattttatgcaggc

SEQ ID NO: 71941 - DNA, 1160 bp, Homo Sapiens
agaaactacggctaggtacgagtgctgggttgtgaattcggcacgaggtagcagccgacgccgtagaggcaccggtttcttcttaaaagagaaacgctgcgcgcgcgatggtgggcccctgtcttccagcagctccgggcctgctcgctagtgcccgggaggcgcagtgcgcaggcgcagtgggggtgagggcgcgtgggggcgcacagcctctggtgcacatggcttcctccccggcggtggacgtgtcctgcaggcggcgggagaagcggcgtgcagctggacgcgcgccgcagcaagtgccgcatccgcctgggcggccacatggagcagtggtgcctcctcaaggagcggctgggcttctccctgcactcgcagctcgccaagttcctgttggaccggtacacttcttcaggctgtgtcctctgtgcaggtcctgagcctttgcctccaaaaggtctgcagtatctggtgctcttgtctcatgcccacagccgagagtgcagcctggtgcccgggcttcgggggcctggcggcaaggatggggggcttgtgtgggagtgctcagcaggccataccttctcctggggaccctctttgagccctacaccttcagaggcacccaaagccagcctcccttccacatactactcggagaagttggtgttccgaggccacgagtgggcaggagcttgcggattgggaatctgagcatgatgagaggactcaagagtgccaggttgcccaggagggtgggacccccaccagagaccttcccacctccaggagaggaagagggtgaggaagaagaggacaatgatgaggatgaagaggagatgctcagtgatgccagcttatggacctacagctcctccccagatgatagtgagcctgatgccccagatactgcttcccctgtcactgcacacctaaagaggggagacaccaccagcctgcagcatctcagtctctgctgggcggcttggcagcatcctcattgagttcagagtctccactgaggaataggtggagcaaggtcagggaccctagggcaggaatgggccggcggattcaaaaagtgcctgtggaccgggggaggcttccacgggtagacccaagcgcccaagttcgcccgcggggtctaaaaggagagggcgcag

SEQ ID NO: 71942 - DNA, 1111 bp, Homo Sapiens
cggtccggaattcccgggatgggagaagggcttgggggagggacccaggcagcagcccctagcctcctctccagggcctgtcctgctgctcttttccaccctcaggtttctcactttaccaggacggcctgtgtgacttgtggcctccgagggtcctgctcccctcctcatggtctcagcgaatagcggcccttagggctggccccttacatgtgtgagtgcccagggctgagggtggctggccacctgagtcctgacttgcctcttctcctgctggcaggtacacttcttcaggctgtgtcctctgtgcagccgagagtgcagcctggtgcccgggcttcgggggcctggcggccaagatggggggcttgtgtgggagtgctcagcaggccataccttctcctggggaccctctttgagccctacaccttcagaggcacccaagccagcctcccttccacatactactcggagaagttggtgttccgaggccacgagtgggcaggagcttgcagatttggaatctgagcatgatgagaggactcaagaggccaggttgcccaggagggtgggacccccaccagagaccttcccacctccaggagaggaagagggtgaggaagaagaggacaatgatgaggatgaagaggagatgctcagtgatgccagcttatggacctacagctcctccccagatgatagtgagcctgatgcccccagactactgccttcccctgtcacctgcacacctaaagagggggagacaccaccagcccctgcagcactctccagtcctcttgctgtgccggccttgtcagcatcctcattgagtcccagagctcctccacctgcagaagtcagggtgcagccacagctcagcaggaccccctcaagcggcccagcagactgaggccctggcaagcactgggagtcaggccaagtctgctccaaccccggcctgggatgaggacactgcacaaatttggccccaagagaattaggaaagctgccaaagaaaactgatggcctgtgacttcccggcttggggaaggatcttctcaaccgggcagtattttgattccccaaaaaggtccggccatttcccccagag

SEQ ID NO: 71943 - DNA, 923 bp, Homo Sapiens
ggtaccggtccggaattcccgggatatcgtcgacccacgcgtccggcaagacataggtactaatttggttgaagcagataaccaagcagagtggaccgacgttcagaagaagattatcccgtggaacagtcgtgtttccgacttagacctggagctcctgtttcaggatcgtgctgccagacttggaaagtcaattagtagactcatcgttgtggcctcgctcatcgacaaaccgaccaatttaggaggactgtgcaggacctgtgaggtatttggggcttcagtgctcgttgttggcagccttcagtgtatcagcgacaaacagtttcagcacctcagtgtctctgcagaacagtggcttcctctagtggaggtaaaaccacctcagctaattgattatctgcagcagaagaaaacagaaggttataccatcattggagtggaacaaactgccaaaagtttagacctaacccaatattgctttcctgagaaatctctgctcttgttgggaaatgaacgtgagggaattccagcaaatctgatccaacagttggacgtttgtgtggaaattcctcaacagggcattatccgctccctgaatgtccatgtgagtggagccctgctgatctgggagtacaccaggcagcagctgctctcgcacggagataccaagccatgatgtgccttccttagtgaactgctgctgctgttcagacttttttaaaaaaaactatttggactaaagaaacagattctgaaatttattgtgataatttgtatttcttttttcttgcaatttaatgccaaaagtttgccatgtgccttaaacatattactatatattttcccctttaataaacactttttgttaaattgtattcttcctttaataaaatattttaagcaattgtggaaataaaaaa

SEQ ID NO: 71944 - DNA, 1018 bp, Homo Sapiens
gattcggcatgaggcaaaataaattggaaatgtgaatcgcagctgtgggttttaccaccgtctgtctcagagtcccaggaccttgagtgtcattagttactttattgaaggttttagacccatagcagctttgtctctgtcacatcagcaatttcagaaccaaaagggaggctctctgtaggcacagagctgcactatcacgagcctttgtttttctccacaaagtatctaacaaaaccaatgtgcagactgattggcctggtcattggtctccgagagaggaggtttgcctgtgatttcctaattatcgctagggccaaggtgggatttgtaaagctttacaataatcattctggatagagtcctgggaggtccttggcagaactcagttaaatctttgaagaatatttgtagttatcttagaagatagcatgggaggtgaggattccaaaaacattttatttttaaaatatcctgtgtaacacttggctcttggtacctgtgggttagcatcaagttctccccagggtagaattcaatcagagctccagtttgcatttggatgtgtaaattacagtaatcccatttcccaaacctaaaatctgtttttctcatcagactctgagtaactggttgctgtgtcataacttcatagatgcaggaggctcaggtgatctgtttgaggagagcaccctaggcagcctgcagggaataacatactggccgttctgacctgttgccagcagatacacaggacatggatgaaattcccgtttcctctagtttcttcctgtagtactcctcttttagatcctaagtctcttacaaaagctttgaatactgtgaaaatgttttacattccatttcatttgtgttgtttttttaactgcattttaccagatgttttgatgttatcgcttatgttaatagtaattcccgtacgtgttcattttattttcatgctttttcagccatgtatcaatattcacttgactaaaatcactcaattaatcaataa

SEQ ID NO: 71945 - DNA, 719 bp, Homo Sapiens
  misc_feature (33)..(33): n is a, c, g, or t
ctgcttcctctctcaccaccccatctccctctnttccccagcaagatgtcaattaagcagtgtgaattctgactgcaataggcaccagtgcccaacacatacagccccaccatcatccccttctcattttataaacctcaaagtggattcactttctgatagttaacccccataaatgtgcacgtacctgtgtcttatctatattttaacctgggagactgttgtcctggcatggagatgaccatgatgctggggttacctcacagtccccaccctttcaaagttgacatatggccatcccattggccagaatccacagacacacctaagcctgtggcactgggacagaatagattttccatttgagaggcacttcctgtgtcagtcttgtttgaaggaggtggtgatggtggatagaggtgaaggaggtagggagtgccctccaagtgcaaaaataacaaatatgattattgaccatcggggaattctcacacattgatttgttttttaagcaattgccagaaacccccttttttagcttttgcttggggtgggggtaggagttaaggtttattcaatcctgtcctgggtagggcgaaagttaatctagccatgtgatttttcagaaaagtaagtggaacatgctgccacttttcaattctgtcagtgcttccacatggaaacaaaatgcaataaaatttttccaaaacctgaaaaaa

SEQ ID NO: 71946 - DNA, 1067 bp, Homo Sapiens
  misc_feature (65)..(65): n is a, c, g, or t
  misc_feature (133)..(133): n is a, c, g, or t
  misc_feature (146)..(146): n is a, c, g, or t
  misc_feature (206)..(206): n is a, c, g, or t
  misc_feature (229)..(229): n is a, c, g, or t
  misc_feature (284)..(284): n is a, c, g, or t
gggcgcacgcattaattgagtactcatcatagcaccccagcttacattatgctcccgctcgtagntggtgaatgtgagcgatacaagtccacacaggaacagctgtgacatgatacgaatttatacgactcantatagggatttgnccctcgagcccaggaatcggcacgaagcaggaacatggagcaggcagggactccatttancagaatacttgagatgtctcagntgtaaaacatgatgtcatcctgcatgcctcctgaaatctccatggggtcgccaancaacaaatggagaaaaaaagtttactcccttgcattcgtctacctgtaaatagcaaagtaccactaccaccaccacctcttgcccccttccctcttttcttaaacttctggcatttcagagctcagcaggctacccctggtttctggagagttgggctaggcctgaagctccccctcccccacctctgataggcagcccaggcctggtctgggagacagcccctcaccctgcctgggctcttggccaagcggccttggatggatgaagtcagagaggtggggtgagggtgagcttactcagggcccccagaggaagccctcagcctctgccctccccccacacagggcgggagcccaggcctgttcctggcagctgtggctgcagctgtgctcctgctccctcctggaatgtgcgacaagcccaaatgttccggggaggcggccggggcagggggcttagaagtgctaatatggttctgtgttttgcctgaaacgataccaggttcccctgaatagcaactttacaaggtccatgtgggagggaccaacccagatgccctgctgagtgtccctgaaaccatggcagctccatctgtcaagatggcaggggccggagtgagggggctgctggcttaacagcaggcatctgggcaggccagtcctcaaagcagctcctgaaggtctgtgttgcactgtcaccagtctcaagctatgcctctaatttcaccagggatattgactaagaagacaataaaatctttttctttgtgtaataacctcaaa

SEQ ID NO: 71947 - DNA, 1013 bp, Homo Sapiens
  misc_feature (171)..(171): n is a, c, g, or t
  misc_feature (186)..(187): n is a, c, g, or t
  misc_feature (213)..(213): n is a, c, g, or t
  misc_feature (226)..(226): n is a, c, g, or t
  misc_feature (238)..(240): n is a, c, g, or t
  misc_feature (265)..(265): n is a, c, g, or t
cacgctgccaccatattatgtctctgcccagctacattgctcgtctattgttgattgacgtacatcaccagaacgttactgatcgattatcgatccttaggattgcctcgagccagaatcgcacgagtggttgtcctcccacatgacctgtaaagtgctatcagggggacnttgtatcgttcagcnnaaaacacagacccatattagcacttntaagccccctgcnccgccgcgtccnnntgaacatttggcttgtcgcacattncaggagggagcaggagcacagctgcagccacagctgccaggaacaggcttgggctcccgccctgtgtggggggagggcagaggctgagggcttcctctgggggccctgagtaagctcaccctcaccccacctctctgacttcatccatccaaggccgcttggccaagagcccaggcagggtgaggggctgtctcccagaccaggcctgggctgcctagcagaggtgggggagggggagcttcaggcctagcccaactctccagaaaccaggggtagcctgctgagctctgaaatgccagaagtttaagaaaagagggaagggggcaagaggtggtggtggtagtggtactttgctatttaaaggtagaagaatgcaaggaagtaaaactttttttctccatttgttgtttggcgaccccattggagaattccaggaggcatgcaggatgacatcatgttttacaactgagaaatctcagtaattctgtaaaatggagtccctgcctgctccatgttcctgatggaagctgctttatatttatgtgcttaaagctgtattttatgtcacatttaaatgagggtttaataatcttaattatctaccaaaagtagattacgacgcatgaagatcacataaaatgaacttcacttctcagcatcacaaacatttggaatacaaaaagtccagggatggatattagaagtaagaaaagtacaaaagaggtttgcttagaaataacaaaaaatt

SEQ ID NO: 71948 - DNA, 994 bp, Homo Sapiens
cagtcgacggtaccggacatatgcccgggaattcggccattacggccggggtatgagtttcctatcgctgtgtgaaaaattaccccaaattgagcagtgtaaaaaacaatacccatagcagttctgtagctcatgagtctggcacagtgtggctggattctctgctcagggtcttaaaggtctagacaaccataacgggtggcaggacaacattccttcatggaggctctggggaagaatctgcttctaagttcattcaggttgttggcggaattcagttctttgctggctctcagctggaggcccctctctcacctcaaggctgcctgcattccttcttatgtggtcccctccagcttcaaaccagccttcctgctctttctcatgcttcatatctctctcccgtcctcctgttttaggggcatatgattagctcaagcccacagatatattttaaggttgattgtgcgatagaacataattgcaggagtactgtctcatctcatcatattcacgggttctggagattagctcattgaaagtgggaggggcattttcaaattctgcctaccacaggcaataactgcccatctcagctgtaggtggaatttttacccagaaaagataggccctagaagcctcatttcttttctccatggaaaaggacagccctctgctgcagcgttcaacttgtgtgtttactgacagagtgaactacagaaatagcttttcttcctaaaggggattgttctacattttgaagttattttttaataaaattgaattatgttgtgtattgtgcttcttaataggaaatgcattattggactgtttttgtaacatcctgtttattgcaaatagctagtatcgttcaaaaactgtataaaatacttttgtacatattagcaatgtctaatttgtatacacttcagttaaatttccctaaaacttgaaaggggaccttgtagaaattaaaatatatacttagtctaaa

SEQ ID NO: 71949 - DNA, 380 bp, Homo Sapiens
agagaaagagcaggaaggctggtttgaagctggaggggaccacataagaaggaatgcagcaagccttgaggtgagagaggggcctccagctgagagccagcaaagaactgaattccgccaacaacctgaatgaacttagaagcagattcttccccagagcctccatgaaggaatgttgtcctgccaacccttatttcagcctttaagaccctgagcagagaatccagccacactgtgccagactcatgagctacagaactgctatgggtattgttttttaaactgctaaatttggggtaatttgtcacacagcaatagaaaactaatacactgcccagggtaacttttcttaacctaattacatttggcagttctgcctt

SEQ ID NO: 71950 - DNA, 1039 bp, Homo Sapiens
ttccccgttagacacccggttttgtcccaaaaaacaggggtggggacccgttccgggaatttcccggggtatttttggggacccccgggttcccgggcttttttccctcccctccccgtgggcatgccaaccaagagggccatgggagccaccccagggagatgggcagcccccttcaagcccaagaggagaagcctcacaaatcaaactcttcgctgctggcgagagtcttggactctgtcttggacttccagcctcccagactgtgagaaacaaatttccgtttgtttcagcttctcagtctctggtgttttgttattgcagcctgagaacacagctgtacgattatttgtcaaacagaaaacactgatacttaacaatgctaatgcaattatttatttgcttttcagtctctacaaaacgttctaaaacactaatctaaatattaacagtaaaatatttgcataactaatggaaactaagaaatcatatgaccaatatttcacttattggtaatcttactctactgatttccccccagactgtgatttttgaacttccttgcctttctcctgtctttctgtgtttattcatggaattccagttatctgggcttgaaattgcaggctctcctaacttaagcaaaatctgacagatcagcaaaatgagataaatgtttcttttttctttctgactgcattaaatcagatacaactcagcattaaaaagctatctttgtaaatgttgttactaataaattagtcttataagatccctggactttggagttgttgcaatgtctttgagagtaattctttaaaagtctaatttcgactggttgtatctctttatgatttattgccccactaacaacatttgaaacaatataatattttaaaatgtataaataattatgaatttttgtttagaacaaagaggattactgatatttgtttccctatgaatggcaaaaggtttagcttactactgcatttctgttttaaataaaaagttgagagtttgtgtctcattaaaatga

SEQ ID NO: 71951 - DNA, 759 bp, Homo Sapiens
  misc_feature (467)..(505): n is a, c, g, or t
aagtgaatagttgaagctagtaaaaatgataccagtataaaaatggtacttgtagtccatgagcttgaacccaatgactgattgtttgacttttaaaataagtaatagcagccatttgggagtagggggtaggtggggaagatgtactccgtatcaaataataatgatgttgaaataatgatagtaggtatgtattatggattggagaagcacttattacactatctaacctaatatgtagaacaattcttgagagtttgtatctgtcgttatttctgaatgtgaagctcagagaagtgacacagagtaaatggctgatcttctatattgtagtatattttgtccttccctcttccctgaggaacaaagcacgtatctttagtctttttgatatttattctgagaccaagggcttgcttgacctgatgattttccttcagctctctgaaggtgctttttccacaatnnnnnnnnnnnnnnnnnnnnnnnnnnnnnnnnnnnnnnncactagatcactttgtgttttctgattttcaaggttgatacatagctttaatacagctcttctgttgacagttattactttaattttgcatttgttccttgtaagaatggctggaaactgtgtgttgacatttgaggatgggtatgcaaggaaaaaatatacttctgtttacttactctgactttgaaatagtgttatttttctatatctgaaataaatgcttctaccatagaaataaatttgcctatactaaa

SEQ ID NO: 71952 - DNA, 580 bp, Homo Sapiens
  misc_feature (285)..(316): n is a, c, g, or t
cagtattcttggttaatatttaatttcaactatttatgagatgtatcttttgctctctcatgctctcttatttgtaccggtttttgtatataaaattcatgtttccaatctctctctccctgatcggtgacagtcactagcttatcttgaacagatatttaattttgctaacactcagctctgccctccccgatcccctggctccccagcacacattcctttgaaataaggtttcaatatacatctacatactatatatatatttggcaacttgtatttgtgtgnnnnnnnnnnnnnnnnnnnnnnnnnnnnnnnntgattctgataaaatagacattgctattctgttttttatatgtaaaaacaaaacaagaaaaaatagagaattctacatactaaatctctctccttttttaattttaatatttgttatcatttatttattggtgatactgtttatccgtaataattgtggggaaaagatattaacatcacgtctttgtctctagtgcagtttttcgagatattccgtagtacatatttatttttaaacaacgacaaagaaatacagatatatctt

SEQ ID NO: 71953 - DNA, 485 bp, Homo Sapiens
  misc_feature (94)..(94): n is a, c, g, or t
  misc_feature (158)..(221): n is a, c, g, or t
ttcatgtttccaatctctctctccctgatcggtgacagtcactagcttatcttgaacagatatttaattttgctaacactcagctctgccctcnccgatcccctggctccccagcacacattcctttgaaataaggtttcaatatacatctacatacnnnnnnnnnnnnnnnnnnnnnnnnnnnnnnnnnnnnnnnnnnnnnnnnnnnnnnnnnnnnnnnntgattctgataaaatagacattgctattctgttttttatatgtaaaaacaaaacaagaaaaaatagagaattctacatactaaatctctctccttttttaattttaatatttgttatcatttatttattggtgctactgtttatccgtaataattgtggggaaaagatattaacatcacgtctttgtctctagtgcagtttttcgagatattccgtagtacatatttatttttaaacaacgacaaagaaatacagatatatctt

SEQ ID NO: 71954 - DNA, 406 bp, Homo Sapiens
  misc_feature (57)..(136): n is a, c, g, or t
ctgccctccccgatcccctggctccccagcacacattcctttgaaataaggtttcannnnnnnnnnnnnnnnnnnnnnnnnnnnnnnnnnnnnnnnnnnnnnnnnnnnnnnnnnnnnnnnnnnnnnnnnnnnnnnntgattctgataaaatagacattgctattctgttttttatatgtaaaaacaaaacaagaaaaaatagagaattctacatactaaatctctctccttttttaattttaatatttgttatcatttatttattggtgctactgtttatccgtaataattgtggggaaaagatattaacatcacgtctttgtctctagtgcagtttttcgagatattccgtagtacatatttatttttaaacaacgacaaagaaatacagatatatcttaaaaaa

SEQ ID NO: 71955 - DNA, 2184 bp, Homo Sapiens
  misc_feature (1876)..(1906): n is a, c, g, or t
  misc_feature (1908)..(1908): n is a, c, g, or t
  misc_feature (1910)..(1930): n is a, c, g, or t
  misc_feature (1932)..(1935): n is a, c, g, or t
  misc_feature (1937)..(1939): n is a, c, g, or t
  misc_feature (1941)..(1943): n is a, c, g, or t
  misc_feature (1950)..(1951): n is a, c, g, or t
  misc_feature (1953)..(1953): n is a, c, g, or t
  misc_feature (1997)..(1998): n is a, c, g, or t
  misc_feature (2004)..(2004): n is a, c, g, or t
  misc_feature (2060)..(2081): n is a, c, g, or t
ggggctggagccgcggctgacgggcccgcggtctgggcgtgagtgcagggaagtggagtatttgctgggccgggtaccatggacgtgggcgaacttctgagctaccagcccaataggggcacaaaacgtccccgggatgatgaagaggaggagcagaagatgcgtcggaaacaaactggtactcgagaacgcggccgctatcgggaagaagaaatgactgtggtggaggaagcggatgatgacaaaaaaaggctgctgcagattattgacagagatggggaagaggaagaggaagaggaggagccattggatgaaagctcagtgaagaaaatgatcctcacatttgaaaagagatcatataaaaaccaagaattgcggattaagtttccagacaatccagagaagttcatggaatccgagctggacctaaatgacatcattcaggagatgcacgtggtggccaccatgccagacctgtaccaccttctggtggagctgaatgctgtacagtcgcttctcggcttgctcggacacgataatacagatgtgtccatagctgtggtcgatttgcttcaggaattaacagatatagacaccctccatgagagtgaagagggagcagaagtgctcatcgatgctctggtggatgggcaggtggtagcactgctggtacagaatctggagcgcctggatgagtctgtgaaagaggaggcagatggcgtccacaacactctggctattgtggaaaaaatggctgagttccggcctgagatgtgtacagagggtgcccagcagggtcttctacagtggctgttgaagaggctgaaggcaaagatgccttttgatgccaacaaactgtattgcagtgaagtgctggccatattgctccaggacaatgatgaaaacagggaattgcttggggagctggatggaatcgatgtgcttcttcagcagttatccgtgtttaaaagacacaatcccagcacggctgaggagcaggagatgatggagaatctgtttgattccctctgctcctgtctaatgcttagttccaatcgtgagcgcttcctgaagggcgagggtcttcagctgatgaatctcatgctcagggaaaagaagatctcccggagcagtgccctgaaagtgctggaccatgccatgattggcccccgaaggcacagacaactgccataagtttgttgacattcttggcttacgaaccatctttcccctctttatgaaatctcccaggaagatcaagaaagtgggaaccactgagaaggaacatgaagagcatgtctgttcgatcctggcttccctcctgcggaacctgagagggcagcagcggacccggcttctgaataaattcactgaaaatgacagtgagaaggttgacagactaatggagttgcattttaaatatctgggtgcaatgcaggtggcggacaagaagattgaaggggaaaaacacgacatggtccggcgaggagagatcatcgacaatgacaccgaggaggagttctacctccggcgcctggatgcggggctctttgttctccagcacatctgctacatcatggccgagatctgcaatgccaatgtcccccagattcgccagagggttcaccagatcctaaacatgcgaggaagctccatcaaaattgtcaggcatatcatcaaggagtatgcagagaacatcggggacggccggagcccggagttccgggagaacgagcaaaagcgcatcctgggcttgctggagaacttctagaggcaccttggccctgcgcatcatggactctctcagcttccctcccaggatcagtttctacacaactctgtgtggcttttggacaaattaaagctagttttggtnnnnnnnnnnnnnnnnnnnnnnnnnnnnnnntncnnnnnnnnnnnnnnnnnnnnncnnnncnnntnnnccctttnncntccccccctccttctcttttcccctttgaaaccctcctcccccnncccttnctcctcccttttgtggggcgcccttcgggccctttaaaaaattcttctaaaaaccnnnnnnnnnnnnnnnnnnnnnncccccgtaagggaacgggcaaactggggcccaacacggtttccccaggaaaaaacccggggaataaacataaggggcctgggaattctcccccccaataaaaa

SEQ ID NO: 71956 - DNA, 1025 bp, Homo Sapiens
  misc_feature (961)..(961): n is a, c, g, or t
  misc_feature (964)..(964): n is a, c, g, or t
tctataactcctaggtagcgaggcctgggtggcgaattcgccacgagggtttccagacaatccagagaagttcatggaatccgagctggacctaaatgacatcattcaggagatgcacgtggtggccaccatgccagacctgtaccaccttctggtggagctgaatgctgtacagtcgcttctcggcttgctcggacacgataatacagatgtgtccatagctgtggtcgatttgcttcaggaattaacagatatagacaccctccatgagagtgaagagggagcagaagtgctcatcgatgctctggtggatgggcaggtggtagcactgctggtacagaatctggagcgcctggatgagtctgtgaaagaggaggcagatggcgtccacaacactctggctattgtggaaaacatggctgagttccggcctgagatgtgtacagagggtgcccagcagggtcttctacagtggctgttgaagaggctgaaggcaaagatgccttttgatgccaacaaactgtattgcagtgaagtgctggccatattgctccaggacaatgatgaaaacagggaattgcttggggagctggatggaatcgatgtgcttcttcagcagttatccgtgtttaaaagacacaatcccagcacggctgaggagcaggagatgatggagaatctgtttgattccctctgctcctgtctaatgcttaattccaatcgtgagcgcttcctgaagggcgagggtcttcagctgatgaatctcatgctcagggaaaaaaagatctccccgaagcagtgccctgaaagtgctggaccatggccatgattggccccgaaagcacagacaactgcccataagtttgttgacattcttgggcttaaaaaccatctttcccccccttatgaaatcccccaggaaaaatcaagaaaggggggaacccctggagaaggaacatgnagnagcctgtctggttccattcctggcttccctcctgccggaacctgaaaagggcagcaccgga

SEQ ID NO: 71957 - DNA, 678 bp, Homo Sapiens
  misc_feature (122)..(149): n is a, c, g, or t
ctttatctgaatatacaagaacattcattatcaaatgttcatcatcaatactacaaagaacgagacacaagtcgcaagaaacaatggaaaatgttaataaagctgaaagaatcgttgagtannnnnnnnnnnnnnnnnnnnnnnnnnnnaaatttgagtttctgtagtttcatctttttttggtatcgaagtcaggtttttctgggcagaaaaacaaagagcaggaaagagagagacagagagaaagatgtgtgagaaaagacaaccagcaaataaagaatcaccaccatagcaaaataaaacataaattgaaagaaggtgccacttggcaaatgtactgcacgggcgtcaattccatgccagagggaggatgaattagggatgaaaaggaggagataaggaagagttacaaggtgggcaaacccagggtctagcatcgtttctcaggggaaattcgctgtcggggaaaatggagcactcccacatctattagaaaatgaagaaatcctggggtgcatcttgctctctgtaggactggcctcatgtgaattcccaggaagctgtgtttccagaggcatgctctttccaaacccatcctgctgctctcagtgttctcctgcttcgcctaatgtggacagatctcacggatgccacgttggaagtcgcctcgtgccgaat

SEQ ID NO: 71958 - DNA, 2168 bp, Homo Sapiens
  misc_feature (19)..(19): n is a, c, g, or t
  misc_feature (27)..(27): n is a, c, g, or t
  misc_feature (64)..(833): n is a, c, g, or t
  misc_feature (865)..(884): n is a, c, g, or t
  misc_feature (1115)..(1124): n is a, c, g, or t
  misc_feature (1503)..(1512): n is a, c, g, or t
gccgcctactacctcgctntgtaatcntgtaccagtgctgctccagtgcgatagtcgttctacnnnnnnnnnnnnnnnnnnnnnnnnnnnnnnnnnnnnnnnnnnnnnnnnnnnnnnnnnnnnnnnnnnnnnnnnnnnnnnnnnnnnnnnnnnnnnnnnnnnnnnnnnnnnnnnnnnnnnnnnnnnnnnnnnnnnnnnnnnnnnnnnnnnnnnnnnnnnnnnnnnnnnnnnnnnnnnnnnnnnnnnnnnnnnnnnnnnnnnnnnnnnnnnnnnnnnnnnnnnnnnnnnnnnnnnnnnnnnnnnnnnnnnnnnnnnnnnnnnnnnnnnnnnnnnnnnnnnnnnnnnnnnnnnnnnnnnnnnnnnnnnnnnnnnnnnnnnnnnnnnnnnnnnnnnnnnnnnnnnnnnnnnnnnnnnnnnnnnnnnnnnnnnnnnnnnnnnnnnnnnnnnnnnnnnnnnnnnnnnnnnnnnnnnnnnnnnnnnnnnnnnnnnnnnnnnnnnnnnnnnnnnnnnnnnnnnnnnnnnnnnnnnnnnnnnnnnnnnnnnnnnnnnnnnnnnnnnnnnnnnnnnnnnnnnnnnnnnnnnnnnnnnnnnnnnnnnnnnnnnnnnnnnnnnnnnnnnnnnnnnnnnnnnnnnnnnnnnnnnnnnnnnnnnnnnnnnnnnnnnnnnnnnnnnnnnnnnnnnnnnnnnnnnnnnnnnnnnnnnnnnnnnnnnnnnnnnnnnnnnnnnnnnnnnnnnnnnnnnnnnnnnnnnnnnnnnnnnnnnnnnnnnnnnnnnnnnnnnnnnnnnnnnnnnnnnnnnnnnnnnnnnnnnnnnnnnnnnnnnnnnnnnnnnnnaagaattcggcacgaggcggcgcctgctaggnnnnnnnnnnnnnnnnnnnnaacagttgataaaaagaactttaatggaaggcactgttgtccaaaatcacataaagggtaagagcccacacggtaccaccctgctctcctacttctcaaacccacatccaccacccagacaggagggtgcagaccccacaggaaattacctcccggagcactgactgatatttttccttaaaacaaaaaaatggctgtctcagactaataacagaacatcttaagagaagnnnnnnnnnnctataccagctattacagcctggtaatagaagcagctttctaagaattcccaagtttataagaggcccaagaaatgcatttattctgttgtctattaagcctccatgacaaggagaaagttatgagtaaatccttggttcatcaggagttaagagctgtgtgcctcatgaggagttaagagctgtgtgcataagcaggttcaagaaacaaactcctgtttgtttgcctcttgatggttcagaaacattcagctgctttcacctctaggacaaatgcttaagaatttactctcatcaacattggaactttacgaaaacaggattcctggttcatcagaagcctgtattaatgaaaaatgcattttgttctttagtgcttnnnnnnnnnngaaactcatctacttttttgcggaactttttttgggatagccattcctcctatggatagtcatcagcaagacacctaaaagacatgttttccctagttcttatcaaaaattcatctcacagaaaaagtcattcaagaaagcaaaactttgctttaagtagataaagtactgtttatatgcattaaaccaagcaatccactcagggttttaacggtgtaaaaactaaatcacagtacagctgaacagtgaatggatgggatggttctgatgaggtattattttgacattttggtctcagaaggtgtttccccagtatccaatgtcttcaacaaccggaaaagaccagcagcttctcgtatcctactgaattcaatacagaatgcctgcacttctataaacaaatcctgtacattaataattttgttacggatcaaggattggagaaacacacacacaagacgcaccaaccgattctgcatatatttatccttaatctgttcacaagtagagatgcaatttgatatataaaggtgaataaattcaggaggtagatcaacagctgtagttagtcgatttacaacttccattgaatgtaaagacatgtcccccggccgtaatggccgaattcccgggcatatgtccggtaccgtcgactg

SEQ ID NO: 71959 - DNA, 2368 bp, Homo Sapiens
  misc_feature (1871)..(1967): n is a, c, g, or t
  misc_feature (2100)..(2108): n is a, c, g, or t
  misc_feature (2210)..(2218): n is a, c, g, or t
cagtcgacggtaccggacatatgcccgggaattcggccattacggccggggggggcagacgctcggttccccgccgtgcctcctcgctggccgcgctccctcccggtgccggcttctctgagtcaccaacctgaggctgccccggccgcctgcgcacccggcagcaccatgacagatcaggcctttgtgacactaaccacaaacgatgcctacgccaaaggtgccctggtcctgggatcatctctgaaacagcacaggaccaccaggaggctggtcgtgctcgccacccctcaggtctcagactccatgagaaaagttttagagacagtctttgatgaagtcatcatggtagatgtcttggacagtggcgattctgctcatctaaccttaatgaagaggccagagttgggtgtcacgctgacaaagctccactgctggtcgcttacacagtattcaaaatgtgtattcatggatgcagatactctggtcctagcaaatattgatgatctttttgacagagaagaattgtcagcagcaccagacccagggtggcctgactgcttcaattccggagtcttcgtttatcagccttcagttgaaacatacaatcagctgttgcatcttgcttctgagcaaggtagttttgatggtggggaccaaggcatactgaacacattttttagcagctgggcaacaacagatatcagaaaacacctgccgtttatttataacctaagcagcatctctatatactcctacctcccggcatttaaagtgtttggtgcaagtgccaaagttgtgcatttcctgggacgagtcaaaccatggaattatacttatgatcccaaaacaaaaagtgtcaaaagtgaggcccatgatcccaacatgactcatccagagtttctcatcctgtggtggaacatctttaccaccaacgttttacctctgcttcaacaatttggccttgtcaaagacacctgctcatatgtaaatgtggaagatgtctcaggagccatatcacatctgtcccttggggagatcccagctatggcacagccgtttgtatcctcggaagaacggaaggaacgatgggaacagggccaggctgattatatgggagcagattcctttgacaacatcaagaggaaacttgacacttacctccagtagaaacactgcatttttctgtgaacacatccacttcacaagccttgtttctgatacttagtatctagagctgggttgagaaaagtctgttacagttgctagaggttttcattaaaacttatcagatgagaggcttttttaggataagaggtgagaactgggcaaaagttgtgaagcagcaattctgttatatggacagtgttctgctttttaatcctatttagcttgtttcagaaattctcacttttgttgactgccaacatacaaagtaagggaaactcaagatattaagatggctgtatcagttcttaaaatctgcagagcctggttcaaaatcagtcactcccttcagaagcagacatggcatctgttccttgcttgcttgttggttgtgtacctttcacgagacctgaattttagaattgcccagtgctgccagagtgagtgagtgtaattctcctttcaggtaaagataggctatctcaacactgctgagtgattcataaacatatcaaccaatagcattaacccattttatttcctgtccttagtgtctgaagatgctcaccagttttctgtgtacagtaaggcagcatgctaaaatgcttttgttcagttctgtatatttgaaaatagcagtgtgttctctgatggttacctgcagtggcaccctgtacaaaaaataaaagacttattgctgtagnnnnnnnnnnnnnnnnnnnnnnnnnnnnnnnnnnnnnnnnnnnnnnnnnnnnnnnnnnnnnnnnnnnnnnnnnnnnnnnnnnnnnnnnnnnnnnnnntttgtgggccgcctcgccccccgaaaaattttttaaacaattctttgggggcggggccccccaaggaaagagaaaagggtcatacttgtttcttaaaaaaacctggccataataagggttggtattctccccnnnnnnnnncccccgggggaaaccaacggttttaaaaaaatccaaagggagttctgaggactttatgggagttttcaccaggggtccaccgaagttctatataaatttatnnnnnnnnntgccgcctattcaagaaggggggaaattattaaagaatgctgccgccggggagcccctcccaaccggcttgttgaacctgattctcccggggggttaacaccttggtgccctgggggaaaaaaatttgcccccgcgggaaaacggggggg

SEQ ID NO: 71960 - DNA, 866 bp, Homo Sapiens
  misc_feature (68)..(77): n is a, c, g, or t
tgagccactgcatcctgccgagaaaatcattttttatttaaataatgtcaaatggaagtatgtagcannnnnnnnnnaccttcttttcccctttctttcctctttgagtctgctgtcattccctttttcatgagttttctctgctccccaaataggctaaacaataaccgtaaagtgagattagagaaaataagaatggagtagatgatggaattcaaaatagctgtctacattcttcactgagaaagatagctttgagttaaaggtgagaggagcaaatctggggaaaaacgggtgaaacggcatgatttaagtagcataccagatgcgtttctgcatggcatggctcttgcttgatgaataatgttctgtatagtagaagaggaaaatacagtgagtgaaggagctggcagaaggtgggctgggggagttggggaagagtgaaatgagtatggagaggtgagagagctgactgcaaaggcatgtggggtgtggattttaaaaggaaagccctgaggtggaaatcactaacatggtgcctggctacaagcagagggagctcaggacttgactgtgctgggggtggcctgcccttttgtagtgcagttgaggagagctcaggggctgtcagaatgctgtgtgggaaggtggaggacgaaagaggacctgggagcagcaactttgttctggtttgttgttttctcttccctacctcgtatgtactcccactcaggaaaagatcctgagacctctctgtaccagatcctcttatacccaggttctccttaatcccaatcaactttaatctataaagttacgatttgtttacttataaatttatttttaataaagttgtgaaaccgaaa

SEQ ID NO: 71961 - DNA, 1108 bp, Homo Sapiens
gcggccgccgcgccgcgcacccatggacggcccggccatcatcacccaggtgaccaaccccaaggaggacgagggccggttgccgggcgcgggcgagaaagcctcccagtgcaacgtcagcttaaagaagcagaggagccgcagcatccttagctccttcttctgctgcttccgtgattacaatgtggaggcccctccacccagcagccccagtgtgcttccgccactggtggaggagaatggtgggcttcagaagggtgaccagaggcaggtcattcccataccaagtccaccagctaagtaccttcttccagaggtgacggtgcttgactatggaaagaaatgtgtggtcattgatttagatgaaacattggtgcacagttcgtttaagcctattagtaatgctgattttattgttccggttgaaatcgatggaactatacatcaggtgtatgtgctgaagcggccacatgtggacgagttcctccagaggatggggcagctttttgaatgtgtgctctttactgccagcttggccaagtatgcagaccctgtggctgacctcctagaccgctggggtgtgttccgggcccggctcttcagagaatcatgtgtttttcatcgtgggaactacgtgaaggacctgagtcgccttgggcgggagctgagcaaagtgatcattgttgacaattcccctgcctcatacatcttccatcctgagaatgcagtgcctgtgcagtcctggttcgatgacatgacggacacggagctgctggacctcatccccttctttgagggcctgagccgggaggacgacgtgtacagcatgctgcacagactctgcaataggtagccctggcctctgcctgcctcccgcctgtgcactctggaacctctggcctcaggggacctgcctgtcctcagctccctgggagctgaaagtgaggatactccgtgctccaggccacagggtgaatgtggccatgcctacctgttttgtttttttaagaacagaaacaactattttaaaagaactcttttaagaaatttcataaagggacatgcattttactgggtttgcttttcttaaaacataccaaaaaagaaa

SEQ ID NO: 71962 - DNA, 478 bp, Homo Sapiens
  misc_feature (442)..(442): n is a, c, g, or t
gcggccgccgcgccgcgcacccatggacggcccggccatcatcacccaggtgaccaaccccaaggaggacgagggccggttgccgggcgcgggcgagaaagcctcccagtgcaacgtcagcttaaagaagcagaggagccgcagcatccttagctccttcttctgctgcttccgtgattacaatgtggaggcccctccacccagcagccccagtgtgcttccgccactggtggaggagaatggtgggcttcagaagccaccagctaagtaccttcttccagaggtgacggtgcttgactatggaaagaaatgtgtggtcattgatttagatgaaacattggtgcacagttcgtttaagcctattagtaatgctgattttaatgttccggctgaaatcgatggaactatacatcaggtgtatgtgctgaagcggccacatgtngacgagttcctccagaggatggggcagctttttgaa

SEQ ID NO: 71963 - DNA, 1717 bp, Homo Sapiens
  misc_feature (1478)..(1478): n is a, c, g, or t
cacacatatggccctgtcggccaacagaaagactgtgcactacaatcccaccagcacaaagcacttctccttctccgtgggtgctgtgccccgggccctgcagcctcagctgggtatcctgcggtacttcgcctcctacatggagcagcacctcatgaagggtggagatctgcccagtgtggaagaggtagaggtacctgctccgcccttgctgctgcagtgggtcaagacggatcaggctctcctcatgctgtttagtgatggcactgtccaggtgaacttctacggggaccacaccaagctgattctcagtggctgggagcccctccttgtgacttttgtggcccgaaatcgtagtgcttgtacttacctcgcttcccaccttcggcagctgggctgctctccagacctgcggcagcgactccgctatgctctgcgcctgctccgggaccgcagcccagcctaggacccaagccctgaggcctgaggcctgtgcctgtcaggctctggcccttgcctttgtggccttcccccttcctttggtgcctcactgggggctttgggccgaatcccccagggaatcagggaccagctttactggagttgggggcggcttgtcttcgctggctcctaccccatctccaagataagcctgagccttagctcccagctagggggcgttatttatggaccacttttatttattgtcagacacttatttattgggatgtgagccccaggggggcctcctcctaggataataaacaattttgcagaattggactccccctcactcgcagtagagcccgtggaccgtggccaccgcgaagagcgaggtgttggtgtaggagaccgaggccagcccatcgcgcgccacgtcccagagcgcacggctgaccacgtgaacgccctggcccgcgcgcggccccagcaccacactgcataccagcttgtagcgtggcgggctgagctcgcgcaggcgaacgtgcacctgctcgcagagctcccgcaccagccgcgcggcctcatcgctggagtagcacgcgtcgtgcagccctgcggccagcgccgcctccagggcacgctgtgcacgcgcagcctcccagcgctccccgggcactggctccgtgcggtaggagggcgccacccaacgggcgggcgccaggggcaaccctgagaagctgacccttgagcccagagggggcaccgggcccagggatggccgctgacccccaggacccgcgcctggcccgaccagcgagttgcggcgggagaaggacgcggtcaggcccatcatggagccccggcgcgagggcggggctggacctggacctgccggtcgggcctcatcaatgctgggcaggcagcctcggggccgcaccggtgagggtttccgcccggagtctttggcattctcctcctcctggcgtccggggggcagaggcctgctggccatggacctgctggttgtgttttancacacgtggttagatagtcccaggctgcctgggttcctaagtgcttctgcctttggcctctgatcccacttcctcaggatcagttctgagatggctgccctctgctccgaaactcctcaggcctcttgccgattcttgggctctatggccaattcctataggagtctattaattcgaaacatgtatagctgtttctgtgtgaaatggtatcgctcacattctaacaaaatagagccggg

SEQ ID NO: 71964 - DNA, 1370 bp, Homo Sapiens
  misc_feature (131)..(131): n is a, c, g, or t
  misc_feature (159)..(159): n is a, c, g, or t
  misc_feature (189)..(189): n is a, c, g, or t
  misc_feature (1035)..(1226): n is a, c, g, or t
  misc_feature (1235)..(1249): n is a, c, g, or t
  misc_feature (1280)..(1288): n is a, c, g, or t
ttggccggtacattcaacagaacagttgcatgatagaattatcgactcctataggattgccctcggcccagattcgcaggggcttcaacacagaacaggtgtcccccgagccattcctggagaccctggtntaccccagtggtcgtcatgtggcccatntgccatacttctctggagcatacccacccntcagttacgtcccagaccttgaaccacattctcctgccctgtcatggagctgccccctggctgccttggaggaccctgagtagatcctgaggggtggaatggagaagagggcactgctgtggtgtgagagcagtcctgaggcttcctggtggctgtgaccagttgaggggctgttcctgggtggggtggcaatgggaggacaggtcagagcgccctcatttgtggggctgcccctccgggtttctcatcctgtccttggtgcctttttctgcccaacaagtccagggaaggccgaggtctcagactcctgggtaggggtgggggtttgagttgaggaccaaagtgccatagcgacatccagaacacaagcccaccaggggtccagcccaggctacccactcccctagggtctcccaggctcagaaggggatgcacgccccctgtggtcaagcctctggtgggcgtcttgcccagttcctgatggttcaaggggaggggggatgttggccaggccccagggcacagccctgacacaggtgtggctactggaggggccttcatacctgcggccccaaagcccctgggcttggctgtttgaggcagaggtgatggactccgggggcctgacacttgggatttgggaggcttcctagagcgctcagcaggtgaaggcagcaggggccatggccgggagccaggcctagctttgaactgagtttcaagggctgccaaagaggggcagtgggttggggttgtttttactacaaaataagttacttagttttataaagacaaaccgattgtagccaaatgacaccatatttaataaaatttagtctgaagtgnnnnnnnnnnnnnnnnnnnnnnnnnnnnnnnnnnnnnnnnnnnnnnnnnnnnnnnnnnnnnnnnnnnnnnnnnnnnnnnnnnnnnnnnnnnnnnnnnnnnnnnnnnnnnnnnnnnnnnnnnnnnnnnnnnnnnnnnnnnnnnnnnnnnnnnnnnnnnnnnnnnnnnnnnnnnnnnnnnnnnnnnnnnnnnnnggggggcgnnnnnnnnnnnnnnnaaaaattttttctcacactttttgttggggnnnnnnnnnacccagaaaagagaaagacggatataatttttttcccccaaagaaaccccgggaaaaaagaatagggggtgtttttctcccc

SEQ ID NO: 71965 - DNA, 1984 bp, Homo Sapiens
tgaccttcactctcgcctatctggtgttcgccgtgtgcttcgtgttcacgcccaacgagttccacgcggcggggctcacggtgcagaacctgctgtcgggctggctgggcagcgaggacgccgccttcgtgcccttccacttgcgccgcacggccgccacgctgttgtgccactcgctgctgccgctcggctactatgtgggcatgtgccttgcggcttcagaaaagcggctccacgccctcagccaggcccctgaggcctggcggctcttcctgctgctggccgtgaccctcccctccatcgcctgcatcctgatctactactggtcccgtgaccggtgggcctgccacccactggcgcgcaccctggccctctacgccctcccacagtctggctggcaggctgttgcctcctctgtcaacactgagttccggcggattgacaagtttgccaccggtgcaccaggtgcccgtgtgattgtgacagacacgtgggtgatgaaggtaaccacctaccgagtgcacgtggcccagcagcaggacgtgcacctgactgtgacggagtctcggcagcatgagctctcgccagactcgaacttgcccgtgcagctcctcaccatccgtgtggccagcaccaaccctgctgtgcaggcctttgacatctggctgaactccactgagtacggggagctctgcgagaagctccgggcacccatccgcagggcagcccatgtggtcatccaccagagcctgggcgacctgttcctggagacatttgcctccctggtagaggtcaacccggcctactcagtgcccagcagccaggagctggaggcctgcataggctgcatgcagacacgtgccagcgtgaagctggtgaagacctgccaggaggcagccacaggcgagtgccagcagtgttactgccgccccatgtggtgcctcacctgcatgggcaagtggttcgccagccgccaggaccccctgcgccctgacacctggctggccagccgcgtgccctgccccacctgccgcgcacgcttctgcatcctggatgtgtgcaccgtgcgctgagtgggctggggccttgaggtgactctgtgtctccccgcaaagccacagggcagggaagggggtggctgggcctcctggctggcaaagggctctacttaaagcacatgatgtagagcaactcgcctctgccctgggtctgcagaaggctgaggacttttggttaaaagcaatcctcatgaaaacaccccaccctgcttggcagccagggtacaagtcctgggcacctcctctttgcctccctcctgcccctttcctgctggtgggggcagatcctgcacacacagacacagcgtctgcccccgagccattccctggagaccctgggtctaccccaggtggtcgtcatctgggccatttgccttacttctctggagcatacccaccctcagttacgtgccagacctggaccgcattctcctgccctgtcctggagctggcccctggctgcctggaggaccctgggtaggtcctgagggtgggatggagaagagggcactgctgtggtgtgggagcagtcctggggcttcctggtggctgtgaccagttgaggggctgttcctgggtggggtggcaatgggaggacaggtcagagcgccctcatttgtggggctgcccctccgggtttctcatcctgtccttggtgcctttttctgcccaacaagtccagggaaggccgaggtctcagactcctgggtaaggggtgggggaaagagatgaggaccaaagtgccatagcgacatccagaacacgaggcccaaccagggggtccagcccagggttagccagtacgccgtagaggtctcccagggctcagaaggggatgcacgaccacctgtgggacagagctctggtgagcagtattgaccagatcctgatgggtcaaggggaggggggaatgtggccaaggacca

SEQ ID NO: 71966 - DNA, 694 bp, Homo Sapiens
gttttatgtatatgttgcattttttagcattgtgtttgtccagttttgtgaaaatttctgctagtatgaaagaaaacattttctatatgaagacatttgttttatgttaggtagcttacattttctcctctgcgtgtgtgtgtatgtgtgtaaaatcagaaatttagcatactatggaaagaaggcatggagcacttgggtttagaggaacctaaaacatcatagcttcattgttccagatgtaacaggtttgaaagagctcatcgccaagttcttgatccacttgcattccaggggagttttcttttgagtagtatgtttcttgtttgcatgttcctgttctttgtggaaactatgcatggtagcatttttgcttgctgtgttttccatacttaagaaaaagaggtttcagttggctgatagaatatcttttatgtaggacaaaacttttctgtgaagagtgttgagggggtgaagataggtaagaggtaagcacaatttttaatttaggctctgaaaaagtgtattgttctaaacgtatttggtatgcctatataggtctttaaaaatgggtatgtatgctgtttaatgtgcactgaacattttacattaatattgtactgttttacattaatactgcatgcttttctatgtgaattgaataaagaatgtcataagcactgtgttccttgaa

SEQ ID NO: 71967 - DNA, 371 bp, Homo Sapiens
  misc_feature (70)..(78): n is a, c, g, or t
tgctgaaagtgtaaggaagctttcttcttacaccttgggcttggatattgcccagagaagaaatttggcnnnnnnnnncttaatggacaagagacagttgctgttctcatgttccaagtctgagagcaacagaccctcatcatctgtgcctggaagagttcactgtcattgagcagcacagcctgagtgctggcctctgtcaacccttattccactgccttatttgacaaggggttacatgctgctcaccttactgccctgggattaaatcagttacaggccagagtctccttggagggcctggaactctgagtcctcctatgaacctctgtagcctaaatgaaattcttaaaatcaccgatggaaccaaa

SEQ ID NO: 71968 - DNA, 1946 bp, Homo Sapiens
ggtccggaattcccgggatatcgtcgacccacgcgtccggcatctccctgtaactctcccaatcttgaggagtgatccctgtcccagcccctggaaaggggcaggaacgacaaactcaaagtccaggatgttcaccatgacaagagccatggaagaggctctttttcagcacttcatgcaccagaagctggggatcgcctatgccatacacaagccatttcccttctttgaaggcctcctagacaactccatcatcactaagagaatgtacatggaatctctggaagcctgtagaaatttgatccctgtatccagagtggtgcacaacattctcacccaactggagaggacttttaacctgtctcttctggtgacattgttcagtcaaattaacctgcgtgaatatcccaatctggtgacgatttacagaagcttcaaacgtgttggtgcttcctatgaacggcagagcagagacacaccaatcctacttgaagccccaactggcctagcagaaggaagctccctccataccccactggcgctgcccccaccacaaccccctcaaccaagctgttcaccctgtgcgccaagagtcagtgagcctggaacatcctcccagcaaagcgatgagatcctgagtgagtcgcccagcccatctgaccctgtcctgcctctccctgcactcatccaggaaggaagaagcacttcagtgaccaatgacaagttaacatccaaaatgaatgcggaagaagactcagaagagatgcccagcctcctcactagcactgtgcaagtggccagtgacaacctgatcccccaaataagagataaagaagaccctcaagagatgccccactctcccttgggctctatgccagagataagagataattctccagaaccaaatgacccagaagagccccaggaggtgtccagcacaccttcagacaagaaaggaaagaaaaggaaaaaagatgtatctggtcaactccaaaaaggagacataagaaaaaaagcctcccaagagggacagcctcatctagacacggaatccaaaagaagctcaaaagggtggatcaggttcctcaaaagaaagatgactcaacttgtaactccacggtagagacaagggcccaaaaggcgagaactgaatgtgcccgaaagtcgagatcagaggagatcattgatggcacttcagaaatgaatgaaggaaagaggtcccagaagacgcctagtacaccacgaagggtcacacaaggggcagcctcacctgggcatggcatcccaagagaagctcccaagtggtggataaggtgactcaaaggaaagacgactcaacctggaactcagaggtcatgatgagggtccaaaaggcaagaactaaatgtgcccgaaagtccagatcgaaagaaaagaaaaaggagaaagatatctgttcaagctcaaaaaggagatttcagaaaaatattcaccgaagaggaaaacccaaaagtgacactgtggattttcactgttctaagctccccgtgacctgtggtgaggcgaaagggattttatataagaagaaaatgaaacacggatcctcagtgaagtgcattcggaatgaggatggaacttggttaacaccaaatgaatttgaagtcgaaggaaaaggaaggaacgcaaagaactggaaacggaatatacgttgtgaaggaatgaccctaggagagctgctgaagagtggacttttgctctgtcctccaagaataaatctcaagagagagttaaatagcaagtgaatttctactaccctctcagtcaccatgttgcagactttccctgtctggaggctcaccttagagcttctgagtttccaagctctgagtcacctccacatttgggcatggcatcttcaaaacaattaatttgcatagttaatttgggatggggaagcaaatgactct

SEQ ID NO: 71969 - DNA, 1263 bp, Homo Sapiens
  misc_feature (228)..(238): n is a, c, g, or t
aaattttctttgatggtgagactgttgtcttagttcaggaaattatttaataatcctttgttacctgtgaatgaaggaactttgtaattctgatttatcgtaaaacatgagcctttccagagtcagcttagacactgttgtcgcaaatagccatgctttgccttatgccaaggaggcccagagggagggcctagtcttcctctgttgctgtacatatattgaaatgcnnnnnnnnnnnattttgcatttgttatctataatgagctttctgagccctgatattatgtgagacaaacaggagttattgatgttatacactcccttccattcaggattttctgcttggagggaaatatgttgaccttagagaattgtgaatattgttgcaattcttgaatatattaccatgtgaataatagagactgtgttgctctctagtataagctatatttatttttgattcatttgaattactagttataactggagaaattttgttacctctatcctggcttgcctgactggctgtataatagcagcagcctcttttagagcatcttaatgaaaacatggatgaaaggaattaatgatgatatctgcagactgcgtagaaaatggcttttgttcccagcgttaacattttcttctcaatcacatttcaatgtttgtggagagtggcagattcacaccagaaacactaggtgttcatatccatagcatggatgcagaataagcagttgggagagaagcttcttcctacctggtactcctcccattcacctcagcccagccccagacaggcgttagcattcagtgtgggccctcaggcagccctgaagcctggctgggtcatcagatgggggcagcctgtgacgggcaccagcggcctgattccagggaagagttcctggagggtgttggctgtttttgttagctcagtttttttctgggctccaccattcctaactccaggtagacaagatagatgtcacacacaacaattttaaagtattttgcttagtgcattttgtttatgattgcagtgtttgtttcttatttaataggctttttacttcattctattaaattttagtgtttagaagaggcgggtactgtcactgtgtaaaatatgtaatattttatatgttataccatgtcatatatacttgcaatatcagaccttgcattcaatatacaatgcaattgactctttgcagacctgcatttttcagtgaacaataaaaagattgtctggcactcccc

SEQ ID NO: 71970 - DNA, 896 bp, Homo Sapiens
  misc_feature (142)..(142): n is a, c, g, or t
  misc_feature (833)..(833): n is a, c, g, or t
caggaacagggaggctccacaagcggtctgcattcccacccaccatgaagactgatacgcacctggaaacaaaaggactatggaagctgttcaagatacatttgatcttcagaaaagcagaatttggttcaactgttgacangaggacacaaatacgttgttccagagctcagccttctcactctaaaagaaagatatttttctatttattttctacatctggccagtggctctggtgctagatgccactgtagccagatctccaacagtgccttggaccatggactcatactcaactgagtaagaaggggctggtgcccagtcggggtggctgagctggtccttaataggttgtttcttggtcttgctttcttcatgccctccccactgctcctgccacctttagataagtttctctagctaattttgtggccaatgtaaaattcgtcatcaacctaacaaacacaaccttctcagcagcatttctcccctgtgatggaaataaagtgtttagggcagtgggaggagaaaattctccaggtgaatggggaagggtctgttccagcctctccctactcccatcccatttccaccaactggggaactgtgactatctatctcccccgacttctaccagggatgccttcacgccaaggctgttctcaccagctgcctcagatgacaaatgaggctaatggacataatctacagtgtcctttttcacttgcaccttttttataagaatatattgtaatactaaaaaatattaaattcataccatccctacccagtctgcctttaaacttgtgccttcttcctatgaggggatctgnggtgggctgagagtgtgctggagcagcttgtacagctctgtgagaaccaatgtttacattttc

SEQ ID NO: 71971 - DNA, 709 bp, Homo Sapiens
atgtttttattcttggctgcagctatgttttctgtcagcttgtcttctctgtctggctatcattgttggctagtcagcaaaacataaatctacattagaggcattcagaagtccagtatttcgacatggaacagataagaatggattcagcttgggtttcagtaaaaacatgcgacaagtttttggtgatgagaagaagtactggttgctacccattttttcaagtctaggtgatggctgctcctttccaacttgccttgttaaccaggatcctgaacaagcatctactcctgcagggctgaattccacagctaaaaatctcgaaaaccatcagtttcctgcaaagccattgagagagtcccagagccaccttcttactgattctcagtcttggacggagagcagcataaacccaggaaaatgcaaagctggtatgagcaatcctgcattaaccatggaaaatgagacttaactcttcaagcaagataaattcatactttataaaagtatcaatgctgtagatggatggaagaggcttcccacaggaaggtgccaccagtcagttgtgcctatgtccctttggctggaaatgcagaatatgaattgattagttctctccaagccattgcttaaaatataacatgttttggatccaatacacacattgttacaactaacacaaattcctattaaatattaaaagtaaaaa

SEQ ID NO: 71972 - DNA, 871 bp, Homo Sapiens
  misc_feature (618)..(802): n is a, c, g, or t
  misc_feature (811)..(827): n is a, c, g, or t
agtagaagtggcccttgcaggcaagagtgctggagggcggcagcggcgaccggagcggtaggagcagcaatttatccgtgtgcagccccaaactggaaagaagatgctaattaaagtgaagacgctgaccggaaaggagattgagattgacattgaacctacagacaaggtggagcgaatcaaggagcgtgtggaggagaaagagggaatccccccacaacagcagaggctcatctacagtggcaagcagatgaatgatgagaagacagcagctgattacaagattttaggtggttcagtccttcacctggtgttggctctgagaggaggaggtggtcttaggcagtgatggaccctccattttacctctttaccctgtcgctcataatgaggcatcatatatcctctcactctctgggacaccatagccactgccccctcccctggatgcccagtaatgtatgtctactggtgggagactgtgaggatcccaggattcagtattcctggcccagagggcccttgctggctactgggtgttagtttgcagtcctgtgtgcttccctctcttatgactgtgtccctggttgtcaataaaatatttcctggcctcctggnnnnnnnnnnnnnnnnnnnnnnnnnnnnnnnnnnnnnnnnnnnnnnnnnnnnnnnnnnnnnnnnnnnnnnnnnnnnnnnnnnnnnnnnnnnnnnnnnnnnnnnnnnnnnnnnnnnnnnnnnnnnnnnnnnnnnnnnnnnnnnnnnnnnnnnnnnnnnnnnnnnnnnnnnnnnnnnnnnnnnnnnnttttccggnnnnnnnnnnnnnnnnnaaaaaattttcaaaaaactctttttgggggcggcgcccccaccc

SEQ ID NO: 71973 - DNA, 566 bp, Homo Sapiens
acccctcctatcccaatgaagaccctgccttgcgaaactccttacctatcagaaggcttcggctatggcatgccccctctgtacccccagacggggcccccaccatcctacagaccgggcctgcggatgttccctgagactagggtgagtgagatcattggccgagacctgagtggcttccctgcacctcctggagaagagcctcctgcctgaaccacgtgaactgtcatcacctggcaaccccagccccagcctcagcccttccccctttccctccttcctggagtggtggctacagaagcttggggccaaccctggctcctctttccccagcttctgtctgtctcactgtcttccctcccctcccccagctgaggtgtggccctcaggcctggtgctgccttggagggctgggggaaggagtgtgtggaggagggaggagggtgaagactgaggctaggtgccagaatggactggagtgaaggcgtgtctagagtgtgggctggctgttgtgctggaaagctggggacaggttgatggtaataaactgctcaataaccagtaaa

SEQ ID NO: 71974 - DNA, 716 bp, Homo Sapiens
  misc_feature (82)..(82): n is a, c, g, or t
  misc_feature (112)..(112): n is a, c, g, or t
cacccatctctgcccctgctgataccgattcccctgacattccaggctaagccagcaggaaagggctaggacgggtgcctgngagcccacatggagggagttgggcaagatntgattcggagcaggtgtcaagacgtgttggggaaactgaggcccagtggaatagaagccagtagaggaggaatctagaggcctcctagattaaggcctgcctggaatggattgggggtgggtctttggaaaaggaggggacccacctctagcccagtctctcaactgcccctcctttacagtgagtgagatcattggccgagacctgagtggcttccctgcacctcctggagaagagcctcctgcctgaaccacgtgaactgtcatcacctggcaaccccagccccagcctcagccctgccccctttccctccttcctggagtggtggctacagaagcttggggccaaccctggctcctctttccccagcttctgtctgtctcactgtcttccctcccctcccccagctgaggtgtggccctcaggcctggtgctgccttggagggctgggggaaggagtgtgtggaggagggaggagggtgaagactgaggctaggtgccagaatggactggagtgaaggcgtgtctagagtgtgggctggctgttgtgctggaaagctggggacaggttgatggtaataaactgctcaatgaccagtgaaaa

SEQ ID NO: 71975 - DNA, 676 bp, Homo Sapiens
ggggctctctttctcctgggggctgcattctctccgcagcccccttcgcccgcctcctcttcctgcatccccaccgcttgaaggccccttcccttcccagagtgatgtgcatcccctacctgctgagggatacaataaggtagggccaggctatggccctggggagggggctccggagcaggagaaatccaggggtggctacagcagcggcttccgagacagtgtccctatccagggtatcacgctggaggaagtgagtgagatcattggccgagacctgagtggcttccctgcacctcctggagaagagcctcctgcctgaaccacgtgaactgtcatcacctggcaaccccagccccagcctcagcccttccccctttccctccttcctggagtggtggctacagaagcttggggccaaccctggctcctctttccccagcttctgtctgtctcactgtcttccctcccctcccccagctgaggtgtggccctcaggcctggtgctgccttggagggctgggggaaggagtgtgtggaggagggaggagggtgaagactgaggctaggtgccagaatggactggagtgaaggcgtgtctagagtgtgggctggctgttgtgctggaaagctggggacaggttgatggtaataaactgctcaatgaccagtgaaa

SEQ ID NO: 71976 - DNA, 680 bp, Homo Sapiens
cagaccatctcctgccttcttattttcctgtctgtcaaagacagaaattacaggagatagggagggttttttagcatctctttcaaaagatgtatgtcagaatttcctttgcacaccaagaactggagcttagagccccactattctctaagccaggttctagtgccttacactccagaatgtcagatggtgggtgcagattggaagaaagagaaaagttcatctcggtgtgtgggttcccatccgccccacatagcctctccttcttcggaacaatgggcgtggggtagaaagctctttcagtgaagggtgttctagcagctcagttaacactttactctccagtcaacacttgggacatataaaaatgccattgtaactactgtagagtcctgtgactcatcgtttgtgtttgtcagtgtgcagttcagcttagcccttccctgttcctgtgtagttacaatctggccctgaagacatccgaggcacttcagtaagtgggatcttttctagagatcctgggtgactttgggtgcacagggtgaccgagcatttctgcccctgtgaatgtggcactaacactgtgcactgtctccaccaagcaaggtttccactgagtttcttctcatgttactgggtttgtaaatgaataaacacattttaactactcttgcaaaaaa

SEQ ID NO: 71977 - DNA, 812 bp, Homo Sapiens
  misc_feature (16)..(16): n is a, c, g, or t
  misc_feature (683)..(695): n is a, c, g, or t
gtatttctttattttntgaagaaagtaagatcctgactctgaagcttcaaagtgacactgtggaaatctgaaacgaggggatgtcatgaaggcagcttttctttttctgaggaaaaaataggcatgggctacaggactatttaaaatgtctcatttacagtataaaactcaaaggtagatgtaatttttacacctatgagtatttgtccaatttctgtctcttcctcaccattgggtatctattctttatatgtaaataagataaggtcatctgatagccttattcagtcttcatcattttcatcattgttcctatgtagattattggacatttattgtagcactacataactgattataaaaatctgtaaatgaattagcactttcatattgaaacaagcctgctagcctatgtataaaatagcaaaatgtttgctgtttataaaaagatgtaatggggtggggggcaggggtaatttcaagttattaatttaaaaatgaactagcaattttgtacctggtgactttgtggtgcactcacctctgatagtgacttgaattcggtatgtaaaaaggggttagtggtatttcattgctgctaaaaatgacaactccctctgtgtcctgtttttcttaaagctgtcagtgtacaagtgggtatttgaataccagaccttactgtnnnnnnnnnnnnnggtggtatctagagcatgtaaattggatataaagttctgctcttaaagagttgatctaagagtatggctaaacatctatatatgcaatctattaaaagaacttaattcggcacaaaa

SEQ ID NO: 71978 - DNA, 1525 bp, Homo Sapiens
  misc_feature (57)..(57): n is a, c, g, or t
  misc_feature (117)..(117): n is a, c, g, or t
  misc_feature (182)..(184): n is a, c, g, or t
  misc_feature (382)..(382): n is a, c, g, or t
  misc_feature (1163)..(1177): n is a, c, g, or t
ttgtgttgatgtggcgatacattcaccagaacgttgacatgatcgattatacgatcnttagggattgcctcgagccagaattcgcacgagacactttcatatgaacagcctgctacntatgtataaatagcaaatgtttgctgttataaaaagatgtatgggtggggggcagggtattcagnnntataattaaaaaatgaactagcaatttgtacctggtgactttgtggtgcactcacctctgatagtgacttgaattcggtatgtaaaaaggggttagtggtatttcattgctgctaaaaatgacaactccctctgtgtcctgtttttcttaaagctgtcagtgtacaagtgggtatttgaataccagaccttactgtanaaaaataaaaaggtggtatctagagcatgtaaattggatataaagttctgctcttaaagagttgatctaagagtatggctaaacatctatatatgcaatctattaaaagaacttaattcggctattatgtcttgatttgattgcagttttttcctaattataacaaatttttcctcattggcctgtttttaatcctgtgcctagaaggagtacaaaatgcacactttacaaaattgatatttaacacttacccactcccctttccccatctcttctaccgctcttgttgatcgtggtatctgatcttgactagataggctgaaggcacatggttccctccaaaaaccactattgataccactacaaaaacaagccagcaaaaagatactgtagagaggttggcttgcttccctctcttcctaactgcatgttgaaaaataagccgttattgatcttaaacatcggtcagatgagtcatacattgggttattttttatatacatgtatacacaaaatatttcaaattgaaagcaacatcttaatggattcaaaactattacaagctgttgtctaaaacaggtgagaaaaaaatttataactgtaaaaacaaatgcacatattgatatttaaaatgcgtaattaagaaaacccattgttgttgtgtttttcttgtataccaataattaagccactactgttggcactgtttggttttctgttttaacactgaaggagtgaaagtatttcctatatttatgaatttactactaaaatcttggcnnnnnnnnnnnnnnnttgtctaacatgtgtgggtgaaaactgttaatcaagtgtttctactcccccccgaaaatcccctgaaagttggacaccaactgtataccctaggttgcttaaagggatttcactattatataaagtcaataaaaatgaagtagttgtatatatgcaacattgtgtacagaggggaaataatgaatagtattaaagaaacattctcgtcttcctttacctttaatcccctaatacctagtctactttttaaattttcagacttcactgctttttgaattcataattctaattttcacattattgttaatggaaaatcatatctaataaaggttttagttattcccatgc

SEQ ID NO: 71979 - DNA, 1074 bp, Homo Sapiens
  misc_feature (790)..(800): n is a, c, g, or t
gaagaaacaaattaactcagttaacaagtttaagctgagaacaagcaagaagcactatgactttcacattttggaaagggcaagttctcagtaacagccacctttggacccttcgcctttatggttcccctgccctctcccatctttgattggcttggtatttggagcttctgttaacattatagagactcctaggatgtgtgttcatggcattatagcttttgaagaaaggccagtgatccagcaaagggggaaaaatatgcatgtcaccccacatgactaggaatccacatcagaatgatacagagttagcaggtttttccaaggaaatgccattcaaatgcctcctaactttgatagttattgtgtttaatatttctaaattcttgtatcagatccaaagctctattgtacagcaaattattcttcaaaatgattataaccagttgcaccctgtatttctttttgcagccagcacaatgtgacccaacttaaaatttgggggaaaaagaatgcaggagtgaaataaccaagtcaaaaccatgtactatctccttgggggttagggatgctaagaagagcccacaaatagaggattactcttcccctgaatctctaaactcagaaacaattaccaaaaaatacataactcttccttgtagggccctttccttattcatttaggtagtgtgaacattaagtataaaataaattatgttcttaatgcctcttaaaccacttacattcaaaggggaacagaaatcattctaagcaggaaaatacttccacnnnnnnnnnnncaagtatctctctaataactaaatgccacttatttgcattctccttgtggattttttgtcacctaaggaaatgcatttgatgagtgctggaaacttcttaagtgctttacagtttgttttcattgtttgcagcggatcactggacatcaaagattcattgcacttatgaacaaggaaccttcttttcaatttctgtgtaatttgcaaggctgtacaatgtgtgctgatgcaagcctttttcagttcaagagaataaatgtttacaaatataaaa

SEQ ID NO: 71980 - DNA, 862 bp, Homo Sapiens
gctaggtaaggcctggggtctgaatcggcacgaggcactctgcggagattcacgcctggaaaacgctcttctgagaggatctgtggaggtcaacccaggagagagaagacaggactgaagcactgaaagggtcctgccgttaagggcgcaggattgtatagaatatataatagcagtagcagctctgtttacggagcattaaccttacgtggagttatttcctgcatttcctcctttcgtctttacaaggtagccgtttggcgtcgtgaggtatggatgttcccatccctaatttgcaaaataggtaactgaggctcaggagagctagactagtttgtgcacagccgagaagtggtcaagctagaatgggaccccaggtttgtgctccctactctccaccgataacctatcaaagggctttgcaagagcttttgactaatcgtctgtcaatggttcttcattcacgtattaattgcacatcagtatgtgccaaatctactagacattggagaaacagtaggaacaacacatggtaccggcacatggatctttcaggaaaacgaagtaggtaataaacaggaaaaagcccgagtctgatgctaagaagaacataaacaggatgctgagcggaaagtgaccagaagaggtgtgcagtttccaggcctggcccatacagacctccaacaggtgctcccctgtgctgttactccttctgccaactggaagcagatggtgaccaggctctggagaaggcaaggcctgaagatgggagattcctaagtggaggagaactgtgccttactgacctaaatatccactcagtattgttatgtgagaataaataaacttgtgttgaccgttt

SEQ ID NO: 71981 - DNA, 1055 bp, Homo Sapiens
  misc_feature (24)..(24): n is a, c, g, or t
  misc_feature (49)..(49): n is a, c, g, or t
  misc_feature (61)..(61): n is a, c, g, or t
  misc_feature (65)..(65): n is a, c, g, or t
  misc_feature (82)..(83): n is a, c, g, or t
  misc_feature (87)..(87): n is a, c, g, or t
  misc_feature (93)..(93): n is a, c, g, or t
  misc_feature (123)..(123): n is a, c, g, or t
  misc_feature (152)..(152): n is a, c, g, or t
  misc_feature (170)..(170): n is a, c, g, or t
  misc_feature (183)..(183): n is a, c, g, or t
  misc_feature (207)..(207): n is a, c, g, or t
  misc_feature (246)..(246): n is a, c, g, or t
  misc_feature (259)..(259): n is a, c, g, or t
  misc_feature (266)..(266): n is a, c, g, or t
  misc_feature (280)..(280): n is a, c, g, or t
  misc_feature (340)..(450): n is a, c, g, or t
gttggatgtccatccctattgcgnaaatagtaactgagctcaggagagntgactagttgtnccanccgagaagtgtcagctnngatnggaccncagttgtgctccctactctccaccgatacntatcaaaggcttgcaaagagctttgactnatcgtctgtcaatgttcntcatcaccgtatnaatgcacatcagtatgtccaaatntactagacatggagaaacagtagaacaacacatgtaccngcacatgaatctntcagganaacgaagtagtatnaaacaggaaaaagcccgagtctgatgctaagaagaacataaacaggatgctgagagattnnnnnnnnnnnnnnnnnnnnnnnnnnnnnnnnnnnnnnnnnnnnnnnnnnnnnnnnnnnnnnnnnnnnnnnnnnnnnnnnnnnnnnnnnnnnnnnnnnnnnnnnnnnnnnngaagatggatttaagacatattttggaggtaacattgtcaggacttcctgaaggattagatgtggaagggaaggataagaaacagaccaaggataactttcaaatgtatgcttaagcaactggatggataatgatgccactgagtgagtgaaaaacttgatggaagtggaagattcagagttcatttctatctaggttaatttgagacataccagagcataagttaagtaagtaattgaatattggagtggagacttatttgtctaccgaattattgttttctttgtcggacatacacctacactgcattcctcaaagtaaaatttaagtgtggctctgtgcctatgctctccccagcggaaagtgaccagaagaggtgtgcagtttccaggcctggcccatacagacctccaacaggtgctcccctgtgctgttactccttctgccaactggaagcagatggtgaccaggctctggagaaggcaaggcctgaagatgggagattcctaagtggaggagaactgtgccttactgacctaaatatccactcagtattgttatgtgagaataaataaacttgtgttgaccgtttaaaacctcgtgcc

SEQ ID NO: 71982 - DNA, 1038 bp, Homo Sapiens
  misc_feature (173)..(173): n is a, c, g, or t
  misc_feature (218)..(218): n is a, c, g, or t
  misc_feature (271)..(271): n is a, c, g, or t
  misc_feature (278)..(278): n is a, c, g, or t
cattggagttttggaggtataggactaactccgatgttcccatgttttgatgacaagattgaaccttcaccctgcagtttggggatgaggacggtccaaaccatgaagtgtgctcccaagccagccaagagtgaagcggcgggagatatgtcccaggacaccctcctgccgtntgtcctttgccccctccaactgcagcatgtcacaatgaccacatntgtagaaacttgagtgtagctgcagacggggaccagtgctcccatttcatttnagccatntgtcgcctgcaccccactcccttcataccatctagtcagaatagcagttctagagcacaggtctcagtctaagctatggaaaagctccccctatccaacaggagttaaaaagtagtgacttgggtttttgcgagtgcttgtttactaaggactttggggaggaaccatgctaagccatgaccagtgaggagaagcaacagagcctgtctgtccccatgagcggagtctgtcctctgctcttctgcagtcaggtcactgcctactgcctgggggctctagtcattccagtggaagacgaatgtaacctgcgtggtgatgtgacaactgtttcctccctgaccccagaggatctggctctaggttgggatcaatcctgaatttcgttatgtgttaatttacttttattaaaaaagtatagtatatataatacaaaacaataacccttctggggtttcttgtggcggttgaaatagtcccacatgtggtcatcagaaaataagccattcctcataccaatataggatcagctccttgacctctgaggggcaggagtgcttcctggtgtgtgtattagaatcccttcctgccttgtttcatggcagtgaaatgcctcttggtcctgtccaagtgtatctttcactgatttctgaatcatgttctagttgcttgaccctgccacatgggtccagtgttcatctgagcataactgtactaaatcctttttccatatcagtataataaaggagtgatgtgcaaaaaa

SEQ ID NO: 71983 - DNA, 880 bp, Homo Sapiens
cagtaactatacggtttaaggtagcgaggcctgggtggcgaattcggcacgaggctaatcccagtcggtgccgcatccccagcccgccgccatggccgcctacaaactggtgctgatccggcacggcgagagcgcatggaacctggagaaccgcttcagcggctggtacgacgccgacctgagcccggcgggccacgaggaggcgaagcgcggcgggcaggcgctacgagatgctggctatgagtttgacatctgcttcacctcagtgcagaagagagcgatccggaccctctggacagtgctagatgccattgatcagatgtggctgccagtggtgaggacttggcgcctcaatgagcggcactatgggggtctaaccggtctcaataaagcagaaactgctgcaaagcatggtgaggcccaggtgaagatctggaggcgctcctatgatgtcccaccacctccgatggagcccgaccatcctttctacagcaacatcagtaaggatcgcaggtatgcagacctcacagaagatcagctaccctcctgtgagagtctgaaggatactattgccagagctctgcccttctggaatgaagaaatagttccccagatcaaggaggggaaacgtgtactgattgcagcccatggcaacagcctccggggcattgtcaagcatctggagggtctctctgaagaggctatcatggagctgaacctgccgactggtattcccattgtctatgaattggacaagaacttgaagcctcatcaagcccatgcagtctctgggggatgaagagacggtgcgcaaagccatggaagctgtggctgccctgggtgtgtgtattagaatcccttcctgccttgtttcatggca

SEQ ID NO: 71984 - DNA, 988 bp, Homo Sapiens
ccccgtcccctccacaaacggccccctgtcaaaagaggctggtccggtccggaattcccgggatatcgtcgacccacgcgtccgctgctaatcccagtcggtgccgcatccccagcccgccgccatggccgcctacaaactggtgctgatccggcacggcgagagcgcatggaacctggagaaccgcttcagcggctggtacgacgccgacctgagcccggcgggccacgaggaggcgaagcgcggcgggcaggcgctacgagatgctggctatgagtttgacatctgcttcacctcagtgcagaagagagcgatccggaccctctggacagtgctagatgccattgatcagatgtggctgccagtggtgaggacttggcgcctcaatgagcggcactatgggggtctaaccggtctcaataaagcagaaactgctgcaaagcatggtgaggcccaggtgaagatctggaggcgctcctatgatgtcccaccacctccgatggagcccgaccatcctttctacagcaacatcagtaaggatcgcaggtatgcagacctcacagaagatcagctaccctcctgtgagagtctgaaggatactattgccagagctctgcccttctggaatgaagaaatagttcccccagatcaaggaggggaaacgtgtactgattgcagcccatggcaacagcctccggggcattgtcaagcatctggagggtctctctgaagaggctatcatggagctgaacctgccgactggtattcccatagtctatgaattggacaagaactcgaagcctatcaagccatggcagttctgggggatgaagagacggtgcgcaaagccctggaagctgtggctgccccgggcaaggccaaaaaatgaaagcccgccggggaagatctgtcccccagaacacccctccctgcccggcctgggccctctggccctcccacctggcaatgtcccccctgaccccctttg

SEQ ID NO: 71985 - DNA, 991 bp, Homo Sapiens
  misc_feature (41)..(51): n is a, c, g, or t
aaggggcaactagtaactatagaaccccgggctggtgtttnnnnnnnnnnngcagcggctgtacggtcggaattcccgggatatcgtcgacccacgcgtccgccgacgcgtcgggctaatcccagtcggtgccgcatccccagcccgccgccatggccgcctacaaactggtgctgatccggcacggcgagagcgcatggaacctggagaaccgcttcagcggctggtacgacgccgacctgagcccggcgggccacgaggaggcgaagcgcggcgggcaggcgctacgagatgctggctatgagtttgacatctgcttcacctcagtgcagaagagagcgatccggaccctctggacagtgctagatgccattgatcagatgtggctgccagtggtgaggacttggcgcctcaatgagcggcactatgggggtctaaccggtctcaataaagcagaaactgctgcaaagcatggtgaggcccaggtgaagatctggaggcgctcctatgatgtcccaccacctccgatggagcccgaccatcctttctacagcaacatcagtaaggatcgcaggtatgcagacctcacagaagatcagctaccctcctgtgagagtctgaaggatactattgccagagctctgcccttctggaatgaagaaatagttccccagatcaaggaggggaacacgtgtactgattgcagcccatggcaacagcctccggggcattgtcaagcatctggagggtctctctgaagaggctatcatggagctgaacctgccgactggtattcccattgtctatgaattggacaagaacttgaagcctatcaagcccatgcaggttttctggggggatgaaaaagacggtggcgcaaaagccatggaaagctgtgggctgcccagggcaaggcccaaaaaatgaaggccccccgccggggaaggatacttgtccccagggagccaccctcccctggcccggtctttgt

SEQ ID NO: 71986 - DNA, 1053 bp, Homo Sapiens
acgcacggggaaatgcaataggtgaacactattagaccccagtggtgtgaacaaaacaagcagggctggtacggtccggaatcccgggatatcgtcgaccacgcgtcgcagcaacatcagtaaggatcgcaggtatgcagacctcacagaagatcagctaccctcctgtgagagtctgaaggatactattgccagagctctgcccttctggaatgaagaaatagttccccagatcaaggaggggaaacgtgtactgattgcagcccatggcaacagcctccggggcattgtcaagcatctggagggtctctctgaagaggctatcatggagctgaacctgccgactggtattcccattgtctatgaattggacaagaacttgaagcctatcaagcccatgcagtttctgggggatgaagagacggtgcgcaaagccatggaagctgtggctgcccaggcaaggccaagaagtgaaggccggcggggaggatactgtccccaggagcaccctccctgcccgtcttgtccctctgcccctcccacctgcacatgtcacactgaccacatctgtagacatcttgagttgtagctgcagacggggaccagtggctcccattttcattttagccattttgtcgcctgcacccactcccttcatacaatctagtcagaatagcagttctagagcacaggttctcagtctaagctatggaaaagctccccttatccaacagagtttaaaagtagttgactgggtttttgcgagtgcttgttactaagactttggggaggaacatgctaagcatgaccagtgaggaaagcacagaagctgttgtccatgaggggagctggctctggcttctgagcagggcactgccacgccggggctagtcatccagggacaaaggaccggtgggttgccatgtctccggaccgaagtggcagggggcaccgatcgggtacttaacgtttttccacaacccggttggggaaccggcaaaccacaaacccgggggcgggaaccgaagcggatcacacacacattaaagagcg

SEQ ID NO: 71987 - DNA, 908 bp, Homo Sapiens
tgctaggtacgaggcctgggttgtaattctggcacgagggagcggtgctgagctgctcagtgcgcggccgacggggcgggctgctactccggaatctgctaatcccagtcggtgccgcatccccagcccgccgccatggccgcctacaaactggtgctgatccggcacggcgagagcgcatggaacctggagaaccgcttcagcggctggtacgacgccgacctgagcccggcgggccacgaggaggcgaagcgcggcgggcaggcgctacgagatgctggctatgagtttgacatctgcttcacctcagtgcagaagagagcgatccggaccctctggacagtgctagatgccattgatcagatgtggctgccagtggtgaggacttggcgcctcaatgagcggcactatgggggtctaaccggtctcaataaagcagaaactgctgcaaagcatggtgaggcccaggtgaagatctggaggcgctcctatgatgtcccaccacctccgatggagcccgaccatcctttctacagcaacatcagtaaggatcgcaggtatgcagacctcacagaagatcagctaccctcctgtgagagtctgaaggatactattgccagagctctgccttctggaatgaagaaatagttccccagatcaaggaggggaaacgtgtactgattgcagcccatggcaacagcctccggggcattgtcaagcatctggagggtctctctgaagaggctatcatggagctgaacctgcgactggtattcccattgtctatgaattggccaagaacttgaaggctatcagccatgcagttcttgcgggatgaagaaacggtgcgcaaggcatgaagctggggtgcccagggaagccaaatgaagcgggggaggaatggcccg

SEQ ID NO: 71988 - DNA, 859 bp, Homo Sapiens
tagtgctagtacgaggcctggtggtttaatcggcacgaggcccaccccagcccgccgccatggccgcctacaaactggtgctgatcctggcacggcgagagcgcatggaacctggagaaccgcttcagcggctggtacgacgccgacctgagccctggcgggccacgaggaggcgaagctgcggcgggcaggcgctacgagatgctggctatgagtttgacatccgcttcacctcagtgcagaagagagcgatccggaccctctggacagtgctagatgccattgatcagatgtggctgccagtggtgaggacttggcgcctcaatgagcggcactatgggggtctaaccggtctcaataaagcagaaactgctgcaaagcatggtgaggcccaggtgaagatctggaggcgctcctatgatgtcccaccacctccgatggagcccgaccatcctttctacagcaacatcagtaaggatcgcaggtatgcagacctcacagaagatcagctaccctcctgtgagagtctgaaggatactattgccagagctctgcccttctggaatgaagaaatagttccccagatcaaggaggggaaacgtgtactgattgcagcccatggccaacagcctccggggcattgtcaagcatctggagggtctctctgaagaggctatcatggagctgaacctgccgactggttattcccattgtctatgaattggacaagaacttgaagcctatcaagcccatgcagtttctgggggatgcaagagacggtgcgcaagccatgcaagctgtggctgccagggccaaggaccaagaagtgaaggcggcgggaggatattgtcccaggagc

SEQ ID NO: 71989 - DNA, 1313 bp, Homo Sapiens
gctagtgaatatagaacaagttgttaaaaaagcaggctggtacggtcggaatcccgggatatcgtcgacccacgcgtcggcatccccagcccgccgccatggccgcctacaaactggtgctgatccggcacggcgagagcgcatggaacctggagaaccgcttcagcggctggtacgacgccgacctgagcccggcgggccacgaggaggcgaagcgcggcgggcaggcgctacgagatgctggctatgagtttgacatctgcttcacctcagtgcagaagagagcgatccggaccctctggacagtgctagatgccattgatcagatgtggctgccagtggtgaggacttggcgcctcaatgagcggcactatgggggtctaaccggtctcaataaagcagaaactgctgcaaagcatggtgaggcccaggtgaagatctggaggcgctcctatgatgtcccaccacctccgatggagcccgaccatcctttctacagcaacatcagtaaggatcgcaggtatgcagacctcacagaagatcagctaccctcctgtgagagtctgaaggatactattgccagagctctgcccttctggaatgaagaaatagttccccagatcaaggaggggaaacgtgtactgattgcagcccatggcaacagcctccggggcattgtcaagcatctggagggtctctctgaagaggctatcatggagctgaacctgccgactggtattcccattgtctatgaattggacaagaacttgaagcctatcaagcccatgcagtttctgggggatgaagagacggtgcgcaaagccatggaagctgtggctgcccagggcaaggccaagaagtgaaggccggcgggggaggatactgtcccccaggagcaccctcccctgcccggtcttggtccctctggcccctcccacctggaacatgtcacactgacacatctgtagacatcttgagtcgtagctgcagacggggaccagtggctcccattttcatgtaagccatatgtcgccttgcacccaactccctgtcatacaatctagtcagaataagcagtctagaagcaaaggttcctcagtctacgctatgggaacaggtccccttaatccaccagagctacaagtacgtgacaagggatcacgcgagtgccatgaacaacggccttggggagaaccaggcaagcaggacccaggagcaaagacacgagcagtggccatgaaggagagcggccagcgccgcgagcgcaggagcacaggacggcagcaaaaccacggaagaagacgggggaggac

SEQ ID NO: 71990 - DNA, 2219 bp, Homo Sapiens
  misc_feature (1567)..(1728): n is a, c, g, or t
  misc_feature (1739)..(1752): n is a, c, g, or t
  misc_feature (1854)..(1909): n is a, c, g, or t
  misc_feature (1912)..(1970): n is a, c, g, or t
  misc_feature (1986)..(1996): n is a, c, g, or t
atagactagtacgagccgtgtggttgaattcggcacgaggtgacatctgcttcacctcagtgcagaagagagcgatccggaccctctggacagtgctagatgccattgatcagatgtggctgccagtggtgaggacttggcgcctcaatgagcggcactatgggggtctaaccggtctcaataaagcagaaactgctgcaaagcatggtgaggcccaggtgaagatctggaggcgctcctatgatgtcccaccacctccgatggagcccgaccatcctttctacagcaacatcagtaaggatcgcaggtatgcagacctcacagaagatcagctaccctcctgtgagagtctgaaggatactattgccagagctctgcccttctggaatgaagaaatagttccccagatcaaggaggggaaacgtgtactgattgcagcccatggcaacagcctccggggcattgtcaagcatctggagggtctctctgaagaggctatcatggagctgaacctgccgactggtattcccattgtctatgaattggacaagaacttgaagcctatcaagcccatgcagtttctgggggatgaagagacggtgcgcaaagccatggaagctgtggctgcccagggcaaggccaagaagtgaaggccggcggggaggatactgtccccaggagcaccctccctgcccgtcttgtccctctgcccctcccacctgcacatgtcacactgaccacatctgtagacatcttgagttgtagctgcagacggggaccagtggctcccattttcattttagccattttgtcgcctgcacccactcccttcatacaatctagtcagaatagcagttctagagcacaggttctcagtctaagctatggaaaagctccccttatccaacagagtttaaaagtagtgacttgggtttttgcgagtgctttgtttactaaggactttggggaggaaccatgctaagccatgaccagtgaggagaagcaacagagcctgtctgtccccatgagcggagtctgtcctctgctcttctgcagtcaggtcactgcctactgcctgggggctctagtcattccagtggaagacgaatgtaacctgcgtggtgatgtgacaactgtttcctccctgaccccagaggatctggctctaggttgggatcaatcctgaatttcgttatgtgttaatttacttttattaaaaaagtatagtatatataatacaaaacaataacccttctggggtttcttgtggcggttgaaatagtcccacatgtggtcatcagaaaataagccattcctcataccaatataggatcagctccttgacctctgaggggcaggagtgcttcctggtgtgtgtattagaatcccttcctgccttgtttcatggcagtgaaatgcctcttggtcctgtccaagtgtatctttcactgatttctgaatcatgttctagttgcttgaccctgccacatgggtccagtgttcatctgagcataactgtactaaatcctttttccatatcagtataataaaggagtgatgtgcaatnnnnnnnnnnnnnnnnnnnnnnnnnnnnnnnnnnnnnnnnnnnnnnnnnnnnnnnnnnnnnnnnnnnnnnnnnnnnnnnnnnnnnnnnnnnnnnnnnnnnnnnnnnnnnnnnnnnnnnnnnnnnnnnnnnnnnnnnnnnnnnnnnnnnnnnnnnnnnnnnnngcttggggcgnnnnnnnnnnnnnnaaaaattttttaaaccctccctttgggggccgggccccaaggggaaaggaaaaggggccaattgtttcccaaagaaaccccgggtaaaacaaagggtggggnnnnnnnnnnnnnnnnnnnnnnnnnnnnnnnnnnnnnnnnnnnnnnnnnnnnnnnnagnnnnnnnnnnnnnnnnnnnnnnnnnnnnnnnnnnnnnnnnnnnnnnnnnnnnnnnnnnnaataaccaaatcccgnnnnnnnnnnngcgtccttctctttagaaaaaagttgtgggaacaacctctttagagactttcttccgccccgctcggggggaaccccccctttacaaagccggggtgtagttaagaccctcttaacctccccgcacccggggggctcattcccaaacctctttttcgttcccgcttccgccacaaaatacatatctccccgctccccggcggagcaaaacaagggggcggtac

SEQ ID NO: 71991 - DNA, 1022 bp, Homo Sapiens
  misc_feature (908)..(908): n is a, c, g, or t
ggcagtaactataacggttctaaggtagcgaggcctgggtggcgaattcggcacgaggccccagcccgccgccatggccgcctacaaactggtgctgatccggcacggcgagagcgcatggaacctggagaaccgcttcagcggctggtacgacgccgacctgagcccggcgggccacgaggaggcgaagcgcggcgggcaggcgctacgagatgctggctatgagtttgacatctgcttcacctcagtgcagaagagagcgatccggaccctctggacagtgctagatgccattgatcagatgtggctgccagtggtgaggacttggcgcctcaatgagcggcactatgggggtctaaccggtctcaataaagcagaaactgctgcaaagcatggtgaggcccaggtgaagatctggaggcgctcctatgatgtcccaccacctccgatggagcccgaccatcctttctacagcaacatcagtaaggatcgcaggtatgcagacctcacagaagatcagctaccctcctgtgagagtctgaaggatactattgccagagctctgcccttctggaatgaagaaatagttccccagatcaaggaggggaaacgtgtactgattgcagcccatggcaacagcctccggggcattgtcaagcatctggagggtctctctgaagaggctatcatggagctgaaccttgccgactggtattcccattgtctatgaattggacaagaacttgaagcctatcaaggcccatgcagtttctgggggatgaagagacggtgcgcaaagccatggaagctgtggctgccccaggcaaggcccagaaagtgaagcccggcggggaaggatactgtccccaggagcaccctccctgcccggcttgtcccctctggccctnccacctggccttgtcacactgaaccactctgtagaacatccttgagttggaactgccgaaacgggaaccaggggctccccattttcctttttagccccttttgggcgcccgggc

SEQ ID NO: 71992 - DNA, 1288 bp, Homo Sapiens
gcagtaactataacggttctaaggtagcgaggcctgggtggcgaattcggcacgaggccccagccctctgggttggggagtggtcagggcttctctcactccttagttggggtccacatcagtattggagtttggttctttattgctccctcccagacactccctgtggctgccctttgtgattccctcagatctgccctaatcccgggcatttgggtgggggaatcttgcctttccctttcagagccccagggatctcatctggggaactgtcattgccagcagaggctgttccttcctgctgtttggagatgtgactcattcattcactcactccaccctgcctctgcatcccttaatggagaaacgggcctaaaaccaaacgggtaaaaagccctgggccatccctgtcttcctgtcccttgtctgcccagttgacacctactggtgacttctagggcactgaggagtgaaagcgcctagggctggagaatagcgctgagttgggtttgggactcttccctctccctgcctcacaggattgtgactccccagcccctgcacctcaaagcttacagacccctcaggtagcagcaggaccttgtgatcttggccccttggatctgagatggtttttgcatctttccaggagagcctcacattcttcttccaggttgtatcacccccgagttagcatatcccaggctcgcagactcaacacagcaagggtgggagacagctgggcacaaagggggaattccgttcagcatgggctctaaacccacagaactgacaaagcccctgcttccccaccccctcctcaggctcctgcgagcacacccccacccccaaatccctccctgttctacactggggacagcagaattttctccccgtcttccccttcctgccattttccctcccttgaaaggttgacactggacaaccttggggcagctgagccctggccgcctcctggctggaaccatgagaaggaagctcagtacttcccacagtgtccctgttgataactgtttttattaactgaattgtttttttcatggaccaaacttttttttgtactgtccccttattgatgttacccagttttaataaaagaatcttctgaaaaacaaacgacccacgaaaaagccgacggaaacgacaccccccaccgacccaccctcagtgacacccccagcgcgaagacggcggggcctccacagcaggaaagcgaaacaaccccaccacggtcccgctccccttggccgtcccacccaccgccctc

SEQ ID NO: 71993 - DNA, 851 bp, Homo Sapiens
ggcttaacagtggttaaaaagcaggctggtacggtcggaattcccgggatatcgtcgacccacgcgtcgcccagcccgccgcatggccgcctacaaactggtgctgatccggcacggcgagagcgcatggaacctggagaaccgcttcagcggctggtacgacgccgacctgagcccggcgggccacgaggaggcgaagcgcggcgggcaggcgctacgagatgctggctatgagtttgacatctgcttcacctcagtgcagaagagagcgatccggaccctctggacagtgctagatgccattgatcagatgtggctgccagtggtgaggacttggcgcctcaatgagcggcactatgggggtctaaccggtctcaataaagcagaaactgctgcaaagcatggtgaggcccaggtgaagatctggaggcgctcctatgatgtcccaccacctccgatggagcccgaccatcctttctacagcaacatcagtaaggatcgcaggtatgcagacctcacagaagatcagctaccctcctgtgagagtctgaaggatactattgccagagctctgccttctggaatgaagaaatagttccccagatcaaggaggggaaacgtgtactgattgcagcccatggcaacagcctccggggcattgtcaagcatctggagggtctctctgaagaggctatcatggagctgaacctgccgactggtattcccattgtctatgaattggacaagaccttgaagcctatcaagcccatgcagtttcttgggggatgagagacggtgcgcacaggcatgaagcctggggtgcccagggcacggcacaagtgcaggcgggg

SEQ ID NO: 71994 - DNA, 880 bp, Homo Sapiens
cgttgcttgctgtggacttggtggaggactcacaggggaggaaaggctgggccccgagtacaacggatgccttgggtgctgcctccgaagagactctgccgcagcttttcttctttttcctcatgccccgggaaacagtctttcttcagaattgtcaggctgggcaggtcaacttgtgttcctttcccctcacctgcttgcctccttaacgcctgcacgtgtgtgtagaggacaaaagaaagtgaagtcagcacatccgcttctgcccagatggtcggggccccgggcaacagattgaagagagatcatgtgaagggcagttggtcaggcaggcctcctggtttcgccactggccctgatttgaactcctgccacttgggagagctcggggtggtccctggttttccctcctggagaatgaggcgcagaggcctcgcctcctgaaggacgcagtgtggatgccactggcctagtgtcctggcctcacagcttccttgcaaggctgtcacaaggaaaagcagccggctggcaccctgagcatatgccctcttggggctccctcatccagcccgtcgcagctttgacatcttggtgtactcatgtcgcttctccttgtgttaccccctcccagtattaccatttgcccctcacctgcccttggtgagccttttagtgcaagacagatggggctgttttcccccacctctgagtagttggaggtcacatacacagctctttttttattgcccttttctgcctctgaatgttcatctctcgtcctcctttgtgcaggcgaggaaggggtgccctcaggggccgacactagtatgatgcagtgtccagtgtgaacagcagaaattaaacatgttgcaaccaaaaa

SEQ ID NO: 71995 - DNA, 1842 bp, Homo Sapiens
tttttggttgcaacaggtgtaatttctgctgttcacactggacactgcatcatactagtgtcggcccctgagggcaccccttcctcgcctgcacaaaggaggcaagcaggtgaggggaaaggaacacaagttgacctgcccagcctgacaattctgaagaaagactgtttcccggggcatgaggaaaaagaagaaaagctgcggcagagtctcttcggaggcagcacccaaggcatccgttgtactcggggcccagcctttcctcccctctgagtcctccaccaagtccacagcaagcaacgattcaccagaaaaaaacagaagacacaggaacagaagagctgctgatcactggctttggtgcttaagtgatgaggcattttcagtcacactcgcactgatctggctcctgggaggagacgccacggcatcctcccagggtgaggctctgatgaggctgcacatggacagggtcccctctcaggtgggaaaggcagcatcctgccattggaggcatgggtctggagagtttctacccaattcctccctcaatcatacctggaggtgacagctacccccaccactgctcctccaaaggcctcgagataaaaatccctgaaaagggggcaggggtgcttccaggtcaagctgtgcggcttccaaactattagctgttgtacaggggtatcacccgggtgatcgcctgtctgcagatagggcacttcttgggctctggcaaggcgcggtagcactcggtgcaggaacaaacgtgcccacactccagaaagacgcaggacttgaagctgctcagacacactacacaggcgctcttcagactctccctgtcctcaggcttggctcggctcagcagctgggcctcatgctcctggaactcctcctgcatctgcttgaggcgcaggcgctcctgccgctgcagatactgcttccggagaatgaagaagagggtggcacatgtggcaaagccaaaaaccagcgccagcaccttccagagcctgacgctcgactcctgcctctgcagcaggctgtcgaagtcctggctgcttagatagtactgcatgccttgtttgggcggctgcaggcggacagagttgttgtccaggaccagttcgccaacccctgtgagggtggcccccaccttcagcatctcctcggtctcttggatgcctttgggccgctcaccgctgatgtagtggccgatgacatcggtgaaggactgaatcgaggggtggaacttctcatacacagtctctagacccagatccactgagtccaggggcttcagcactcgcacagccacatccacgccatcctcgtggggcaccaggtcaaagggcactgtgttggtcctctgatgaatgatctttgagcaatcattccaaaggtgggtggttcgattccacaccatcttgtgctcctgaagtgtcagccgctgaattacccccttgcagttttccacaaactggctgttaagcgtttctttaacagaccgcacagctccttctataacagcataaggcacgcattttcctggagcttctgaaagaatactctttaaatcttcacccaaatgaacttttttagctcccttgagctcttgggagacccgggccttctgccggtacacggagtacagggcggcggtgaccacagaggtggtgcccaggaggatgaactggcacagcgagggccgccctccgctctccatgacggcggcgagccccggtggccgactgtggcgccaaggataggcctggtgacccccgactctccacctccttccgaccaggaccgcacccccccggatcccgggaattccggacc

SEQ ID NO: 71996 - DNA, 1028 bp, Homo Sapiens
  misc_feature (150)..(150): n is a, c, g, or t
ctatcatgggacatttaccaacaaccgttacaccagggagcacgatgcataatacgggctgcggaacgccaacaagagatatgccataagagccacgaatacagcaaaaagtggagaatgtaaaatgtaatacaaatacaggaaaggggnaaaaagcgaggtgtaaaaacaggtagcaagagggatagagtgcaagggtggcgtacagtatgatatcaaccagacagtggcaactggataaagaccaaataatagtgtgccctggattgcaatatgaatacgaaagtcgtagggattgatgagcacatcgctactacataacatttaaattctttttgtgacctcagaatgtctctggatctttcctcattgactgactctgtgccacgtcatccatagtttattgttagtatgaacacaactgtaacatttacctggtatctacatccttacctgcattggaaaatgtttgctacctcacaacaaccatttgcctcctttaagaacactgatgggctgcactttttggatagaaatagaatttgatttcagaatgtatgcttggtgagtctcagtgcccaggaacacttttggaataatttatcagacattgaacttctgtgattaatcgcttttatagatttactcagtctttaaaattcgtctctgatttgccagagaaaaacggtggtagccatggaaatcgggagtgaaggagcactgcttcattgtggctcagcccttcctaggggcctctgccctttgatgtccttgagctactcttcagctctggaagttgtggacaaactgtaggaatgtatgtgtgcgtgtggtggagtgattgtctgtgaatgacaggccctggctattgattgatgttgcatcaatttagcaaattcatttcctcattcttgatggcctgaatatatgtctgcacttttaatgctcctcttaaccagttgtaacatcttaccatttccctaacaaattgaattagtttaataaaatcttttgacacatgttaaaaa

SEQ ID NO: 71997 - DNA, 824 bp, Homo Sapiens
  misc_feature (18)..(18): n is a, c, g, or t
tcaatagataataaatgntgcaaggggtgtggagaaaagggaaccctagtacactgtcagtggggatgtagattggtatgggctatgatggaaaacagtatataggttcctaaagaaattaaaagtagaactactgtatgacccagtaatccctcttctgggtatatacccaaaggagatgaaattatcaccttataaagatatctgcactcccatattcactgcaacattactcacaatagccaagatatggaacaacctagttgttgatgaatggataaagaaaatgtcatgtatatatacataatggaatattattcagccttaaaaaacgatatcctactatttgtcacaacatggatggacctggaagaccttatactagatgatataagccagacacagaaagaaaagtgatttcacttatatgtagaatatatataaaagaaaaagctcaaaaacacagagaataaaacatggcgaccatggtagggaacaggaggaggaaacagagatataggtcaaaggatacaaaatagcagatatgcagaatgaacaagtgtagagagttaatgtataacatgaggactaaggttaataaaattgtattagggattttgttaactaagtagattttagctgcttttgtcacaaaaagtagttgtgtgagaatgatagatatgtaaatctgcttccctacagtaaccattttattatttctatgcatcccaaactaccatgttgtaaacctcaaatatacacaataaaatgtatttaaaaaacaaaatagagcttgtctcgatcaggactggcttttgtgtacc

SEQ ID NO: 71998 - DNA, 722 bp, Homo Sapiens
  misc_feature (31)..(31): n is a, c, g, or t
gcacaacagctatgcattgcatggcatccgntacaagaacgaccatatcaacctggccgtgctggcggatgccgagggcaagccctacctacacgtgtccgtggagtcccgtggccagcctgtcaagatctatgcctgcaaggcaggctgcctggacgagccagtggagctgacctcggcgcccacgggccacaccttctcggtcatggtgacacagcccatcacgccactgctctacatctccaccgacctcacacacctgcaggacctgcggcacacgctgcacctcaaggccatcctggcccatgatgagcacatggcccagcaggaccccgggctgcccttcctcttctggttcagcgtggcctccctaatcaccctcttccacctcttcctcttcaagctcatctacaacgagtactgtgggcctggagccaagcccctcttcaggagtaaggaagatcccagtgtctgagtgaactaacagtcctgctttcagccaccatttgcacaagacacccagcactgaaagtcccgctgccaggagcaagggatcctttggaagcacccgccctttgtgccttgttgggggaaaccggtgacgcagaagtgagtgtggatacaccagagtttgcattggaaggaatgagtgtcacgtggggagggaaggggccagtggaccttttgtaagctttccactcaataaaatgaacctgtatggc

SEQ ID NO: 71999 - DNA, 667 bp, Homo Sapiens
cggtccggaattcctgggatgtccgtggagtcccgtggccagcctgtcaagatctatgcctgcaaggcaggctgcctggacgagccagtggagctgacctcggcgcccacgggccacaccttctcggtcatggtgacacagcccatcacgccactgctctacatctccaccgacctcacacacctgcaggacctgcggcacacgctgcacctcaaggccatcctggcccatgatgagcacatggcccagcaggaccccgggctgcccttcctcttctggttcagcgtggcctccctaatcaccctcttccacctcttcctcttcaagctcatctacaacgagtactgtgggcctggagccaagcccctcttcaggagtaaggtaggaagccgccatctggtcgaaacccgaggccttggccttgctctcagccctgtgtctcggaaggggctagcctggcgagggggggtgaggcctgggcaggaatgggtgtcctgatgccctcagcccttgacaccagagagcgcgcgcaagtgttttgagaggagacgacgaggaagggaaagctggaaatccaggtgtgaattgatggtcttctggctttccagggcagccctcccctcctcccgcatcataaatctcagcatttaaaaataactgcaagctg

SEQ ID NO: 72000 - DNA, 826 bp, Homo Sapiens
cagtcgacggtaccggacatatgcccgggaattcggccattacggccggggggagggggctggtctggctgtggccaccatcacagtccaggatgaagaggagtacagggtcctgtgagctgtttgaccactgttctaagaaagactatgtgtgcccaaaagcacataagcatctatgttgagagtaagtttgtatcctgcgttggtctcagaaagaacgtgaatgcttaagattttgaaagtacataatattttatactttgggagagagctttaagagtccctggaaatactttttaatttttttaacttaaaattcaagagactgaatcacttttctcattgattaaatgtaaagattattgagaaacctatagtaaatgaaatttgtgagatgttttctcaaatatatgctgtgcctgtacttatatacagtctttcaagagagatacaaacaaggcagaaacatttaaactagtattaaaggtagtttaccaaagcattttttgttttcttaccttgaaaacacagaaccgttaattccttggtttaagcagttgctaagttttgtaattttaggctcagaggcccataggaggttttaagatttatgtttagtccgataggtgaggtctttgatattttgaattttaactccttttatgatacatcacagtaacctcatttttgaagtctttctttgtactttaatgttctctctgttctaatagttgaagtatgagatgtaactattataaactgttgctgaaaacataaatgtctgtaacttacaaacatgataaataaattaaaaattccatccagg

SEQ ID NO: 72001 - DNA, 1416 bp, Homo Sapiens
  misc_feature (72)..(106): n is a, c, g, or t
  misc_feature (1177)..(1177): n is a, c, g, or t
  misc_feature (1365)..(1365): n is a, c, g, or t
agactatatgacctattggcgctcctcttagcgaacgacgagcgcagcgagtagttagcgaggaagcggcgnnnnnnnnnnnnnnnnnnnnnnnnnnnnnnnnnnncagtcgacggtaccggacatatgcccgggaattcggccattacggccgggggaaatgtacagaccagctactgctcttgggtcaaacagacagagctgtgcagttgctgttggaaacaagtgcagataaccagcattattactgtgattcactgaaagcctgtttagtcactactgtcacctcgtcaggcccctctcagagcaccattaagttggtggcaacgaatatgattgccaatggcaaattggcagagggcgttcagttgctctgcctgatagataaggctgcagacgcctgccgctacctgcagacatacggcgagtggaatcgggctgcatggctggcaaaagtccgtttgaatcctgaggagtgtgccgatgttttaaggcggtgggttgaccacctttgttctccacaagtcaatcagaaatcaaaggctctcctggttctcctctctctgggctgcttttttagcgtggcagagacgcttcacagcatgaggatactttgatagagcagccttatttgtggaagcttgcctcaagtatggagcatttgaagtcactgaggacacagagaaactcatcactgctatatatgcagattatgcccggagtttgaagaacctcggttttaagcagggagcagttctctttgcttcaaaagccggagcagctggcaaagacttattgaatgagcttgagtcccccaaggaagaacccattgaagagtgacagcttaataaatgccagggaatctgacctggaaggcagatgggagggggctggtctggctgtggccaccgtcacagtccaggatgaagaggagtacagggtcctgtgagctgtttgaccactgttctaagactatgtgtgcccaaaagcacataagcatctatgttgagagtaagtttgtatcctgcgttggtctcagaaagaacgtgaatgcttaagattttgaaagtacataatattttatactttgggagagagctttaagagtccctggaaatactttttaatttttttaacttaaaattcaagagactgaatcacttttctcattgattanatgtaaagattattgagaaacctatagtaaatgaaatttgtgagatgttttctcaaatatatgctgtggctgtacttatatacagtctttcaagagagatacaaacaaggcagaaacttttaaactagtatttaaaggagtttacccaaagcattttttgttttcctaccctggaaaccccagaccgntaattccttgggtttaagcaggtgctatagttttgaaatttaggcctcgaa

SEQ ID NO: 72002 - DNA, 1178 bp, Homo Sapiens
  misc_feature (49)..(49): n is a, c, g, or t
  misc_feature (100)..(100): n is a, c, g, or t
  misc_feature (238)..(460): n is a, c, g, or t
  misc_feature (1088)..(1124): n is a, c, g, or t
ggcccgagatcagggacctgattatgctgcgtcgcacttgatgactgtnttgtgtgcagggcgacttgaaccagcagcgccttacgtctgcttgctgctntgtcaatgcttctgcgtaccctgatcttgatacctatacgcttgagtgagtgtacgctccgcagccgacgaccgaggcgcgatcatgacgagagcggagacgcccatacgcaacgcctctcccgcggttgccgatcannnnnnnnnnnnnnnnnnnnnnnnnnnnnnnnnnnnnnnnnnnnnnnnnnnnnnnnnnnnnnnnnnnnnnnnnnnnnnnnnnnnnnnnnnnnnnnnnnnnnnnnnnnnnnnnnnnnnnnnnnnnnnnnnnnnnnnnnnnnnnnnnnnnnnnnnnnnnnnnnnnnnnnnnnnnnnnnnnnnnnnnnnnnnnnnnnnnnnnnnnnnnnnnnnnnnnnnnnnnnnnaagaattcggcacgagggcagagcaagcctctgtgattcctgcccagcacctgtgaggcctgacgtgtcagttcccaataaatgctcttctgatttgtttcccgtacaggcaaggaggcttgggtagtgcagatttgtgtatttcaatctttgaaagctctgatgtaatttagaaatgaaatccaatcatgagtccaggtagagaacgcctgctgtaatctacactgttgctgggactgcgcattctgtatataactgtgttggatgagtgacagatgattgtccagactaggacagcggcatgaacatgactttggttgggattgcggatagttagggttacctctgaatcgtgtagcttttatgagagcagctgtgcaagtgaatccacattaatgccttgtcgtggtgccattcccagcgcctgacgatacgctcttctattgtcttattctggcaggttttgacgttttaaattttttaaagaaattttattccttggaccaaaaggtttggttaaccacccccctcttacttgctttcacattttgagtgtccagaggaaacagaaaggaatgagtgtgtgacgttgctgcacgcctgactctgtgcgagcttctttctgtgnnnnnnnnnnnnnnnnnnnnnnnnnnnnnnnnnnnnnaatcccgacagaacatcatgtgagatttctttaaaatggattaaaccctcgtgc

SEQ ID NO: 72003 - DNA, 1287 bp, Homo Sapiens
  misc_feature (1235)..(1235): n is a, c, g, or t
cagtcgacggtaccggacatatgcccgggaattcggccattacggccgggggtgacggctgcgtgcggcgggaatcatggctgctcgcagagctctgcacttcgtattcaaagtgggaaaccgcttccagacggcgcgtttctatcgggacgtcctggggatgaaggttctgcggcatgaggaatttgaagaaggctgcaaagctgcctgtaatgggccttatgatgggaaatggagtaaaacaatggtgggatttgggcctgaggatgatcattttgtcgcagaactgacttacaattatggcgtcggagactacaagcttggcaatgactttatgggaatcacgctcgcttctagccaggctgtcagcaacgccaggaagctggagtggccactgacggaagttgcagaaggtgtttttgaaaccgaggccccgggaggatataagttctatttgcagaatcgcagtctgcctcagtcagatcctgtattaaaagtaactctagcagtgtctgatcttcaaaagtccttgaactactggtgtaatctactgggaatgaaaatttatgaaaaagatgaagaaaagcaaagggctttgctgggctatgctgataaccagtgtaagctggagctacagggcgtcaagggtggggtggaccatgcagcagcttttggaagaattgccttctcttgcccccagaaagagttgccagacttagaagacttgatgaaaagggagaaccagaagattctgactcccctggtgagcctggacaccccagggaaagcaacagtacaggtggtcattctggccgaccctgacggacatgaaatttgctttgtcggggatgaagcatttcgagaactttctaagatggatccagagggaagcaaattgttggatgatgcaatggcagcagataaaagtgacgagtggtttgccaaacacaataaacccaaagcttcaggttaacggaagacatgatgcagagcaagcctctgtgattcctgcccagcacctgtgaggcctgacgtgtcagttcccaataaatgctcttctgatttgtttcccgtacaggcaaggaggcttgggtagtgcagaattgtgtgatttcaatctttgaaagctctgatgtaattttagaaatgaaatccaatcatgagtccaggttaaagacgcctgctggaaatctacactgttgctgggactgcgcatttctggaaaataactgggnttggatgaaatgaccaaatgattgttccaaactaggcacaccgggatggaaa

SEQ ID NO: 72004 - DNA, 1238 bp, Homo Sapiens
gttcagataccttaaaagttactttatttaaaagcatttattaatcttagtctgaaatcaaaatatagattaattggctcagctttaatacctttctaggaggtgtcacaatgtagggtaccaaagggttggattgtgatggggcatggtcgtacactgctcattgtgccacaggtgtgactggaaagcatgatattctagggttggtttgtagattcaaataatccagaaatatacctaataagattgagtgaaaaatttgagtcaaatatctagggcattcacagagtagctgtgagttcttggtaatgtgaaaaaggccttgtttttcagaaactcctgggtttcctgttaaaaaatcttaaagcccaaccttaggaatatagtgccccaaaaggcggatgcttcttccattatcttattttctttgatactttatttaattagatgtttataaagaaatgggtttatttttccagcataaacctcagaatttaaggaaagaaaatgatgtctgttgttatagttcattgttttgcctactcagcagaagtgatgactcttaaaaattggctttgaccaaagttctcttgttttcagggaaagaacataaaagctttttgaactacagcctttttaaaagagggatgggaggatattacagtaagaaattaggctttctaaaagtatgaaacatccttcaactgggctctcttgttaataggacatcatatggtaatagactggtttgactatattgttagctgccacagtaagcaggtcattgtataggtaaatgcctgcacccataattttctagtaatagccacgaccaatttattaacagtcagggcctatccttgcctgtagttctcagtcactggatgcacaaaatcactgtgtaacattggctcacttggtgagcatagggttgactgataaaatgtttaattcccttgctagcttgtgagaagaatgagttgatgacatgctccataccagtggctagatggagtattaaggtggagcagaaaagaagtgagaacatcttgattcccctttcttttacttgatggtgtttatgaacatgccgtagtgcctttatggccagtttgagtcctgcctactttgacttttacgttcccattcctgtgttaccaccttcctcccgatttgttcacctattttgtgctttaaatctcaataaaatacttactgagggaagaaagtataaaaaa

SEQ ID NO: 72005 - DNA, 635 bp, Homo Sapiens
gggtcccttcttccgagcctctcctctggccgccgcgcgggagagaggccgagatggcagatgagattgccaaggctcaggtcgctcggcctggtggcgacacgatctttgggaagatcatccgcaaggaaataccagccaaaatcatttttgaggatgaccgggtaggtactgggcaccacctctctcgcctgctgagtgccttgctttccatgacatttcccctcaagcaccaacacattttctggtgatacccaagaaacatatatcccagatttctgtggcagaagatgatgatgaaagtcttcttggacacttaatgattgttggcaagaaatgtgctgctgatctgggcctgaataagggttatcgaatggtggtgaatgaaggttcagatggtggacagtctgtctatcacgttcatctccatgttcttggaggtcggcaaatgcattggcctcctggttaagcacgttttggggataattttctcttctttaggcaatgattaagttaggcaatttccagtatgttaagtaacacacttatttttgcctgtgtatggagagattcaagaaataattttaaaaccgcatacataataaaagacattgttgcattagcaccccaaaaca

SEQ ID NO: 72006 - DNA, 1407 bp, Homo Sapiens
  misc_feature (947)..(977): n is a, c, g, or t
  misc_feature (1263)..(1263): n is a, c, g, or t
  misc_feature (1318)..(1326): n is a, c, g, or t
gggggggcgccagagccggggcacctgcgcaggcttggctgcgccctctcgcgccgcacgctctgcgggttcctcccttcttccgagcctctcctctggccgccgcgcgggagagaggccgagatggcagatgagattgccaaggctcaggtcgctcggcctggtggcgacacgatctttgggaagatcatccgcaaggaaataccagccaaaatcatttttgaggatgaccggtgccttgctttccatgacatttcccctcaagcaccaacacattttctggtgatacccaagaaacatatatcccagatttctgtggcagaagatgatgatgaaagtcttcttggacacttaatgattgttggcaagaaatgtgctgctgatctgggcctgaataagggttatcgaatggtggtgaatgaaggttcagatggtggacagtctgtctatcacgttcatctccatgttcttggaggtcggcaaatgcattggcctcctggttaagcacgttttggggataattttctcttctttaggcaatgattaagttaggcaatttccagtatgttaagtaacacacttatttttgcctgtgtatggagagattcaagaaataattttaaaaccgcatacataataaaagacattgttgcatggctaaaaaaaaaaaacaaacggcatcaacggaagagggaacaggcaccgaaaaaaccacgccaaaaccaaacgcgccacaaaacgggcaaaacggcaacgcgcgcggggaacggcaaaacccttgtgggggccgcctctggggccctggggaaaactttttcaaaaccccttctggattggggcgccgcggggcccccactagggtaaaagggaaaaaaggggcccatagcctgttttccccaaaagaaaacaccccgggcccatggacataaaggggctcggggaatttnnnnnnnnnnnnnnnnnnnnnnnnnnnnnnngcgggggcgcaaaccccgaagtggtttttttggagcacaaaactccccaaagaggcggacgtccttcgcggggggaccctttactggggggatacttattcccaacggggaggggctccaacaggggcgggggccttcgaaaatatttaaaatatttagcggcccggcggccctcttggggcgctcttttattttctaaacgaacgagggtggtgcgaaaatttctctgcttagaagaatttttctccgccgcgcacaacattgggagaaacgccccctctcccanaaaagggtggggtttgtggtgtggaaaaacccctgtgaaaactcccgccccacannnnnnnnncgttatacaccccacaccccttttgtgttccgcccctcttggccgcagaataataaaaatatatatcggccccccgctggg

SEQ ID NO: 72007 - DNA, 875 bp, Homo Sapiens
  misc_feature (211)..(232): n is a, c, g, or t
  misc_feature (799)..(808): n is a, c, g, or t
attgggggaaaattcaaagcgcttagttcataacccggggtttccctggggaacagggttatgaccaagtttcccctttcctaagggggggccgcgggccaaaaggagatggttttggaaggttttggagggggcgagagcggccggcacaggggttttattaggagggggtgtgggtagtagatggtgttggatttgggttgtgtgttgnnnnnnnnnnnnnnnnnnnnnnagccatgcaacaatgtcttttattatgtatgcggttttaaaattatttcttgaatctctccatacacaggcaaaaataagtgtgttacttaacatactggaaattgcctaacttaatcattgcctaaagaagagaaaattatccccaaaacgtgcttaaccaggaggccaatgcatttgccgacctccaagaacatggagatgaacgtgatagacagactgtccaccatctgaaccttcattcaccaccattcgataacccttattcaggcccagatcagcagcacatttcttgccaacaatcattaagtgtccaagaagctggaaaaggaaaaaaagtttcttaggcacaggcaatttattacttcttgccattaaataacaaactgtcaagctgaaatatcaaatcttaaaactctcattgaaacacaaccctttgagcaaatatttggaaactcttaatcccaacagagcataatctacaactggagactcattaagattaggtatttatcattactaatttcaagaaacaaattagaaataaaatctgctgttcaattaaacnnnnnnnnnnaagagatggggtcttgctctgtcactcagactggagtgcagtggcaacaagaacgaaactccgtctc

SEQ ID NO: 72008 - DNA, 372 bp, Homo Sapiens
  misc_feature (165)..(188): n is a, c, g, or t
cccaactaaagaatggatttaattaaactatgtattgaaaaaaaagtagcctaagtgttagagatggtgaatatattccattttagttaaagaacaaatttcctgaattttaagcattcagtgagctgccaattttgattttgtgttgctctttacccaaattannnnnnnnnnnnnnnnnnnnnnnngggggaggaggggaaaaaagcagcaatactgtgtttggaaattatactctgtatctggttttcctgtgtatgttaaccacttaaatgttattatcctgctttggttttagagtgattgtgaggcattcaatgcaagtatacagttattttctcattaaaatccaatgtgtgttgagtttttctc

SEQ ID NO: 72009 - DNA, 1656 bp, Homo Sapiens
  misc_feature (1049)..(1079): n is a, c, g, or t
gcgcttcatgttttctctgactcatggatctggtagagaccatagacatgatatagactaacttccccatttttcacaagaggaaaccatccttatgacttaccttaaagttttttgttctgttttgaaggaaaccatgtgcttcatgaaacctacagttgacaagagaatgtacagctaagagaaaagcttaagaggccacactattcgcggaatggctttagaggcagatgaagtggtctttgaccacagttgattgaaccagagcacttattgcttaaagaataacagagttctagagctgggggttcttgggccatgctccgtgtgtggataaggaaagaaatactgtttctgggactctcccacagtcacaaagctgttttcactgtggcccctacatctcttaacttttgctattactcctatgctgccttccggattactgctgtctatcttcttgctccactcactgaagatcctattataatcccatgaaaatgtaaattacagtttacttgggagagccagattttctctgtgctcttgagttttttattcattcaagaaaccttgggccaccgctttgtacatagcaccgtgctaggctctgggatcccaaatggacccttttaactttctgaagatgggaccgtcccctggaggaaagtcattcctgcctaatccatcgagagaaagaggcttacgaaaaactttgcctctgatgctcagccccacccccaaatagcacacaagcttgttaaccccacctcttacaaaatgtttagattctgtaggtgttaaaagcctttctggaagtattgcattctgccgtgtttataggtgttcactttcctccagagctgattaactactgacatgacttggctttctcatccagaaattatggaaacagggtctgtcagtggcaggaggccgtgctgtgttttacttggatgacacaatgcagtttacttgcctcttcatacccatgcatgctgctcaccctagacaatgacatataagccgtatatagatcaatgtccacnnnnnnnnnnnnnnnnnnnnnnnnnnnnnnnaagtgtaacaaggaacactaaaacagtgttgattcttgtctctgaagacaaataattaaaccttttttttcccaactaaagaatggatttaattaaactatgtattgaaaaaaaagtagcctaagtgttagagatggtgaatatattccattttagttaaagaacaaatttcctgaattttaagcattcagtgagctgccaattttgatctttgtgttgctctttacccaaattatttattctttgtcctttctttctattagggcggaggaggggaacaaagcagcaatactgtgtctggaacttatactctgtatctggtttcctgtgtatgttaaccacttaaatgtcattatcctgctccggtctagagtgattgtgaggcattcaatgcaagtatacagttatttctcatcagaatcccaagtgtgtgtaggaggtcggataaagcaaaagcacaaaagcagacaaccaaccccacaaccaacacacgaacaacagacacacaccacttctcgcgcgccccccgcccccggagcacactacgcaaccaccaggggcacggcccacgagtcaa

SEQ ID NO: 72010 - DNA, 1074 bp, Homo Sapiens
  misc_feature (986)..(1004): n is a, c, g, or t
  misc_feature (1017)..(1030): n is a, c, g, or t
taaggcttagtacgaggctgggtgttgaatcggcacgagggagtgtatggcgtgggctcccttccccctctgtgggtcccgcgaggagactctcgggctttgaggtgtgcctgcacaggagacagcaccagccaagctgattgtgtatctacagcgtttccggcctcaagactatcagcgcctgctagaagtgaacagctccagagagaggccacaggagactgaagatcctgaccactgcctgggctaggggtgtcacttcctagaaggggaagggaactctgggtctaacggagtccactcctgggcccactgtgcctctcccctcagtgtcccttctgacagtgactcctctctctccagcgctgcctgtttcttccccctcctctaagctactcttccttgagccctccctggctgcttcctctcgctcatccgtcagatgcaatctgtgggccgcccctctcccctggccgctaagcagcctccattgatttccgctcgtgtttataggatttccacttagccgtgatcagtagttaagcacaggaaaatcccttgccaccccccctcccttggtcgatgccattgattctgccagcggctcctaaaccgccttacagctgagttagaagatgaggagaggcagcagggatttccctgccttgggatgtgggaaacagaagaaaagttgaggaaatggttgggaatcgctgttagaactctagaaattctaatctgactttgccactgtgcccagctctggcccagagggtagagtgcctcctgtggaagtttaggggcaaatttgttccctgacctggagagggttagaaagaaccaacagctgccccctccccgcccccgtgttgagacaggttctcaaggctcaggggaagatgcatacctcctatgtaagaatgctcttcccttgctgttattcatacacactttccacttcaaatatacccaaatatggctttccnnnnnnnnnnnnnnnnnnnctcgagactagtnnnnnnnnnnnnnncctcgtgccgaattaaaccacccaggcctcgtacctagccctaa

SEQ ID NO: 72011 - DNA, 1063 bp, Homo Sapiens
tatacggtggatttgtagcgaggcctgggtggcgaattcggcacgagggctcagcctcaggcatgagacctgtaccagcccccgggagccgtgcggggccaacaatgaggagcagaatgcaaggggcggcctcgctcccctggccaccgcgggggtcgcggcctcccattacatagcgcgtgtctcgagccctggcctgctctcggcaccgccacaacgggcgtaatatggccgctggtgccgggacctgccgggcgcgcggagggtcgggccgaggtccgggatccggaactgctcccggcattcctcgcgagtgtatggcgtgggctcccttccccctctgtgggtcccgcgaggagactctcgggctttgaggtgagacctgaagttccgctggccggtagtgtagcaggaaagggcaggtcctcccgggtcgtgagccagtagcctcctggggtggcaaggtgtagagaggggggcgttgaaaggacacccgctacccggcctgctttctaggggtctctttggattgaggacatcagcagcagtggaagggattttactggagacctgtcactgtcagagccttaaaatatcaccgacggggccttaatgtcaccgaggtagagagaaaagggcagtagccctagagactattgcgacacagtgtgcccctcataagtttttccagggaggggttctgtactgagttgacgccccaggagctgagcaccaggctttgcatccttgggaactcagcaaacgtttgttcagccaaattgcaggtagcatggcccaaggcttgattgaccgtggaacgaaagttccttccagggcctggcacagaggacaggctgcaggagtaggggggcaccctggagtaccgggtcaccttccgagacacctactatgacacccctgagctgagcctcatgcaggctgaccactggctgcgacgacgagaggatagtggatgggagctcaaatgtcctggagcagcaggtgtcttaggagccacacggagtataaggaactcacagcggaactacaattgtggcccaac

SEQ ID NO: 72012 - DNA, 1225 bp, Homo Sapiens
  misc_feature (13)..(13): n is a, c, g, or t
  misc_feature (57)..(57): n is a, c, g, or t
  misc_feature (101)..(101): n is a, c, g, or t
  misc_feature (104)..(104): n is a, c, g, or t
  misc_feature (160)..(160): n is a, c, g, or t
  misc_feature (166)..(166): n is a, c, g, or t
  misc_feature (197)..(197): n is a, c, g, or t
  misc_feature (248)..(248): n is a, c, g, or t
  misc_feature (281)..(281): n is a, c, g, or t
  misc_feature (969)..(1083): n is a, c, g, or t
gtcatctagcacnccagttacattatgtccgctgtatgtgttggatgtgacgaatancattcacacagaacagcttgacagatacgattaatagactcatntanggattgccctcgagccaagattcgcacgaggcaatttctcaagccagttacctgantagtcnaccacgcacgttcccaaccccaaggggaatnaggggataggattaagagtagtaaaagacccttttgtctttcctgtgtagngggaggagctgtctccccacccccaggtgcctntggaggttaaggctaggttaggccctgcactccacctggggacggcccctcatcacctgaagtcctctgctgtgttgactggaccctcagttcccacactgctaattactatgaaagctgctctggcctcgtcttctagcttgtgcctagttgaaagtctcacctttacaggatcatttgtaatgctggtgtacatgcagggaactcacaagctgtgtcaggtatgcaggacaaggaatgtctgctctggggggcacaggccaactatatggagggagggtcccaaattagcaaacccttcatttaaagcaaacccttgtcaagcctaccagagcagctgatacgtgtgcataacagtgaggcattgtgtcctggatcgtctgggagcccagtgtcaagtctgctggaatgcaggaagtagaacagaatcgccacaggactgttctggggccagcttcccttaactctgtagcctggcagtctgacccaaagttgccctcacccaaaggttctggctcttccctccctcacttttactttcccttcccccataagttggaggataaaatgggtatcaatgctaatatttccagggagaacatgaaaccagaggtttctttctttctctgtaatctgctatgaaagaaaataacaaatgaaaataaatgtgtactacactttgaaatannnnnnnnnnnnnnnnnnnnnnnnnnnnnnnnnnnnnnnnnnnnnnnnnnnnnnnnnnnnnnnnnnnnnnnnnnnnnnnnnnnnnnnnnnnnnnnnnnnnnnnnnnnnnnnnnnnttgccggccccccttcgccccttcaaaaatttttttaaaacctttcctttggggggcgggcccccaaaaggaaagggaaatgtggcctaacgttggttcccaagaaaaaccggggacttgacaaggggcttgggttcccccc

SEQ ID NO: 72013 - DNA, 812 bp, Homo Sapiens
gcggcgggcggttgaaggcgttacagtccttggaaaccgagctgctagccggttgctaggagcgtccagtgtctggagtgggaggaacaaaacgcctcacgtcacaaggcgcaggaatcgagcgccgagagagcgagtcggtgctactggcgccgggtcggtccgggtaggcgcagcgggactggacctgggtgccgagcggagccgctgccatgggcctgggcgtcagcgctgagcagcccgcaggcggcgccgagggcttccacctccacggggtgcaggagaactccccagcccagcaggcgggcctggagccctactttgacttcatcatcaccattgggcactcgaggctgaacaaggagaatgacaccctgaaggcactactgaaagccaatgtggagaagcccgtgaagctggaggtgttcaatatgaagaccatgagggtgcgcgaggtggaggtggtgcccagcaacatgtggggcggccagggcctactgggtgccagtgtgcgcttctgcagcttccgcagggccagtgagcaggtgtggcatgtgctggatgtggaaccatcttcacctgctgcccttgccggcctgcgcccctacacagactatgtggttggttcggaccagattctccaggagtccgaggacttctttacgctcatcgagtctcatgaggggaagcccttgaagctgatggtgtataactccaagtcagactcctgccgggaggtgactgtaactcccaacgcagccttgggggggagagggcagtctgggattggcatttggcattggtatttacac

SEQ ID NO: 72014 - DNA, 1025 bp, Homo Sapiens
tcaaggtagcgaggcctgggtggcgaattcggcacgagggcagcttccgcagggccagtgagcaggtgtggcatgtgctggatgtggaaccatcttcacctgctgcccttgccggcctgcgcccctacacagactatgtggttggttcggaccagattctccaggagtccgaggacttctttacgctcatcgagtctcatgaggggaagcccttgaagctgatggtgtataactccaagtcagactcctgccgggaggtgactgtaactcccaacgcagcctggggtggagagggcagtctgggatgtggcattggctatgggtatctacaccggatcccaactcagccccccagctaccacaagaagccacctggcaccccaccaccttctgctctaccacttggtgccccaccacctgatgctctaccacctggacccacccccgaggactctccttccctggagacaggttccaggcagagtgactacatggaggccctgctgcaggcacctggctcctccatggaggatccccttcctgggcctgggagtcccagccacagtgctccagaccctgatggacttccccatttcatggagactcctcttcagcccccacctccagtgcagcgagttatggacccaggcttcctggacgtgtcgggaatttctctcttggacaacagcaatgccagtgtgtggcccagcctgccctcttccacagaactgaccaccacagctgtctcaacctcagggccagaggacatctgctccagcagcagttctcatgaaccggggtggtgaggctacatggtctgggtcagagtttgaggtctccttcctggacagcccaggtgcccaaagcccaggcggaccacctgcctcagctgactcttcctgacagtctcacctctgcaggcctcaccaaaaaaatggggttgtcccccgaaactgctttgaactttaggctgggggagggaccccgccagccccgaaggggcctaaaatattggggaagggggg

SEQ ID NO: 72015 - DNA, 747 bp, Homo Sapiens
  misc_feature (36)..(36): n is a, c, g, or t
tcccactccgtgagatcttctgtctcctgttcactntgtgtgtagtttcttattttcaaaatgcatctcatttgatcattactgtgaccttgggaagcagcaggacagggatttctttttagaggtgcaaactgctcagaggggacacacctcagcctctcactgtgggtacacgtggcgtgccatgagtggggaagagcaacaggcgagatgcctcattctactggaacatcactgtgggtgaacagagatttccaggttttccctcttaaaatatttgtcccacaccgacaagagtccagtcaccaggcctcaaaggaacttctgcttgtagcagccgcctcccctgtgccccagcctccttaatgtgtgcactctcagagggcacagctcgcgaggctgggtttgggggccaagtggcttgttcattccagcatctaacatcataaaggtgggcccagatttcttgattcgaccacagtgctgttcctaccacacaaatatccattcctgttttgttgaagcagccactggtcctcttgtttcccctgcagacggagggacctggcagtgcccattcattcagccccctcatgcatacttttattaggcgatagactagttaagaaaattgtttctatgtactgtatattttgtacctgtttacacttctaatattgatataactgatattttgaaaaataagagaaaacatcctgttaaaataaaacctaaccagcaccaaaa

SEQ ID NO: 72016 - DNA, 1090 bp, Homo Sapiens
  misc_feature (240)..(249): n is a, c, g, or t
ttttgccaaaaaaatagttttatttttcaacatattttatgtacagtccacatcaattctgttaaattcagggaaggtattaagtaccaatccactttctctctatgggtccaaagtaacttgaaaagatggtatgtttttcattcttgttttcagcataagattgttagcctactgcaatcttgattatatccaggaatgaggatggaaaaccagagtaagcaaagcaagccacttacnnnnnnnnnnatatatccaatgaattagattcatttaagtttaattttaaaatataatcacaggcagaaataaaaggactagtaccaagctaggggaaatttttaggccaaaaattagattttgtaagtcaggctgaaagagaaacaggtgataaatttctaaaaaggataggagacgaaagaacgaagatacaaggcaatatatctgaaaacagctagaactaaaattactgcggtaggctgcagaaccctcaggtaagttaaacaggacaagttgtgttaagcgcaaacattagctaatctacactgtatcttgtttctctaaagccaatccctgctcctacccctctcagcaagtgggtagttaaggggaaagaaactaaagcaagtaaacgtgtccttcctttccatcatcaagataaaaaagtcaaagaatcaggattttgggaaactgttaatttgtacttggatgccaaatacaccaaaatgaacccagcactttgatggcaaaataggaaatatttatgtaggtttttatccattactagttattctttccagtaatagcatctgggaactaaaagaagctaatgagtaaactgaagcccagaaaaattaaatgacttgcctaggttctcttagcagtcctgtgcagacacttttggaagaacaaagccaatcagataaatatgaacaaagaatcaccccaaagatcagaggtaaaactctctgaggggaccagtggctgactataggatttcagggagggagccaaacagagcaatccaaaaggaacactccttagggagccgtgaacttaccattctaaacatttaagttcattaaaaaaa

SEQ ID NO: 72017 - DNA, 812 bp, Homo Sapiens
aaacaacaaaattggcaagaagaaaattcttcgacatttgggggctggtcgacatttgggggcaagggttccactgaaaaatcccccaaattcacgctgaggtttcaggtcatggttgctgaggtggaagatgaggtcagggctcttggagattttccaacccaccctagaacttgtttctaaatggctatgctatgatgccaatactttttattctgtccctcaaagagatgaggtttaacaaggcttcctcaactccctcctagcaatattccctcctccactgtctgaaattcaaactgggggtcccatcatcgtgttgcttctttttccattagattaactctcctagcccccctcccattttcccttagcctcttgagctcaggaaatggtgcaggggagaggccagggctgggtctcacacaatggctttatttagccctcaaatgagatcacatcatgtcatatcactgcttccactgagcaaagagataggagattctgaaataggtctgggatcagatgcttgagatgggggaggggagctgggaaagcaggaaggggctctaagaagtcattttacttatcttcctgcctctggatcagatggtcttcccaccactgcaaaccatcagcgtgtgctgtcccttcctccaagtgtataacctccacagattgcactggtcattcaaagatttcttagacattctactgggagcagaactgggagatatcccaaagatgggggacctgtttctgctgtcagttggtgacttcagtgtgggaaaaagtcctgcttcaggtggccc

SEQ ID NO: 72018 - DNA, 1356 bp, Homo Sapiens
  misc_feature (84)..(138): n is a, c, g, or t
  misc_feature (194)..(194): n is a, c, g, or t
  misc_feature (196)..(223): n is a, c, g, or t
  misc_feature (225)..(225): n is a, c, g, or t
  misc_feature (229)..(338): n is a, c, g, or t
  misc_feature (350)..(376): n is a, c, g, or t
ggtgtgggggaaatcccaccacaccccctctttttttcttgtgccccgggggttttctctttggggaaaccaacgctttttggnnnnnnnnnnnnnnnnnnnnnnnnnnnnnnnnnnnnnnnnnnnnnnnnnnnnnnnaaaaggttttctaaaaaaaacttttttggagggggccgaggggcggcccccccaangnnnnnnnnnnnnnnnnnnnnnnnnnnnntnttcnnnnnnnnnnnnnnnnnnnnnnnnnnnnnnnnnnnnnnnnnnnnnnnnnnnnnnnnnnnnnnnnnnnnnnnnnnnnnnnnnnnnnnnnnnnnnnnnnnnnnnnnnnnnnnggagttccaggnnnnnnnnnnnnnnnnnnnnnnnnnnntaaacaacaaaattggcaagaagaaaattcttcgacatttgggggctggtcgacatttgggggcaagggttccactgaaaaatcccccaaattcacgctgaggtttcaggtcatggttgctgaggtggaagatgaggtcagggctcttggagattttccaacccaccctagaacttgtttctaaatggctggggaagaggtcagtataggtccccccgttactgcagatgaaggcagaagtcattctctcccccacccctcaacttcttcagagatgtggagataggaggcttcgatctctaattgcctacgatctcttaaaaatataaaacacgtgcagttgactttggtacaaaaaagaaaacaaaagaacaacagaacattctggtccctgtgggttttttccctcacccccaacaaaccattatggccaccccaacctttattccatcaactccaggaagccaggttatctcccagggcttccatgaaggacggagaaagggagaacagcagtaagaggttgaggggagaggagaaagggacatggccctgcccacagccctcctttatttaaagggcagtagggtgctgtggctgcagcctctcctccaagacggatgttgcaggggagggccgttagggcaagaacccagcagctgcgtggatgagcctgaatataccccagtagtgttcaaggacaaggccctctgatccctatggcttggttcccatgtccctggtcctttaaatctcccctctccccccataactaataaacaataaataaataaattttcctaaagttgcgggaagaaggcatgaaccactggcatctgtggtgtagctttcggatgtcccagggggtgttgtggcctaattcccctagcttcttaaatggccccaggtatccaaggatcggacgcgtgggcggacgcgtgggtcgacgatatcccgggaattccggacccggtaccagc

SEQ ID NO: 72019 - DNA, 1307 bp, Homo Sapiens
ggggaactgccttcagcagagatgattgacttccaaaaaagccaaggtgacattttacagaaacagaagaaagtttttgaagaagtgcaagatgatttttgtaacatccagaatattttgttgaaatttcagcaatggcgagaaaagtttcctgactcctattatgaagctttcattagtttatgcataccaaagcttttaaatcccctaatacgagttcagttgattgattggaatcctcttaagttggaatccacaggtttaaaagagatgccatggttcaaatctgtagaagaatttatggatagcagtgtggaagattcaaagaaggaaagtagttcagataaaaaagtcttgtctgcaatcatcaacaaaacaattattccccgacttacagactttgtagaattcctttgggatcctttgtcaacctcacagacaacaagtttaataacacattgcagagtgattcttgaagaacattccacttgtgaaaatgaagttagtaaaagcagacaggatttacttaaatccattgtttcaagaatgaaaaaggcagtagaagatgatgtttttattcctctgtatccaaagagtgctgtagaaaacaaaacatcacctcattcaaagttccaagaaagacagttctggtcaggcctaaagctctttccgcaatattcttctttggaatggactccttacagatgacaccttgcaagaactaggactagggaagctgctaaatcgttaccttattatagcacttctcaatgccacacctgggccagatgtggttaaaaagtgcaaccaggtagcagcatgtctaccagaaaaatggtttgaaaattctgccatgaggacatctattccacagctagaaaacttcattcagtttttattgcagtctgcacataaattatctagaagtgaattcagggatgaagtcgaagaaataattcttattttggtgaaaataaaagctttgaatcaagcagaatccttcataggagagcatcacctagaccatcttaaatcactaattaaagaagattgaataaactttattggaaaatgctaaaattttaatatagttacactcagttcctttgtttgagaagaagctggtgcctctctcttctttattccctgtaatagaaggtaggatttgaaaaaaagcaggactccacctctgtattcccccgtgctttaccttctggcatcatgaaaagctgccatgattctgtggtgttctaaggaattaaatgcactggagctttaagagctcaacgtgtttccctttgaaaaaa

SEQ ID NO: 72020 - DNA, 1163 bp, Homo Sapiens
ttaggtatttcaaatccaggcagagcacacaccagtttattttgaaatgcaacacagatcagtattttatgaatacaacttattactacattatcaggtaaaaacagctttcaaatgcatgcatagaaagttaagcgtagtctctggactccttatttctaaatatacaaaaaatacatttaaattatataattttagtgaatcaaagacttataaaattacaattttggttttcacaacatagaaaaaatacaaaaatgactatatatacggttgtacaattttttacccaaatttcaaaggagcagtatgtattgaatttaatgttttataatgttttatctgaaactcagaactgcaagtaatttgcaggttgtaccatatcaatgccaaccttttattataaatgaataaccaaaaaaataagtgaaaaatgagggcacgatctcttcttacacctcttcaactctccagcatctaaacctttcctgtcagaagtctgctctggagacttttttcatctgcaaggacagtgctttattccatgactaactctccatggtgcctctggataatggttggtacgtgttaaatgaataagcccaacctcagcaaacagaacgcagcaagatgtagattagcagtctgtgctgacaaaagcactactgcgtacctcaaagaattctctgtcagaagaaggcccccacggagggatctgaaatacataatcaagtgggtagttgggaggatgatgcctttgactatgccctgaaatgaaacctctaagtctgacaaaatacccacaaaaacatgaccttccttgttcacactttataagaaggtgtgacatttggtggtgtggttgttctcaatttataaaataataaatgacttcaaaggagaaatgaattcatgttagggataaagaaaccagttactgagagaggttactgaaggacacagtgacatgccttacttatctgccataagtattctaaatgttgatgtacaaaaatacacactggggttgagaccctttttgaaaagggagctgtgtgctgtgttctcattgccaaagttcaattcaatgcaacaccactgtttgcaacagaatgttttttataagtagtgacaaattatataagagaggcccaaataaaaaa

SEQ ID NO: 72021 - DNA, 1049 bp, Homo Sapiens
  misc_feature (20)..(20): n is a, c, g, or t
  misc_feature (47)..(48): n is a, c, g, or t
  misc_feature (50)..(50): n is a, c, g, or t
  misc_feature (81)..(82): n is a, c, g, or t
  misc_feature (84)..(84): n is a, c, g, or t
  misc_feature (93)..(93): n is a, c, g, or t
  misc_feature (109)..(109): n is a, c, g, or t
  misc_feature (113)..(113): n is a, c, g, or t
  misc_feature (117)..(117): n is a, c, g, or t
  misc_feature (141)..(141): n is a, c, g, or t
  misc_feature (173)..(173): n is a, c, g, or t
  misc_feature (232)..(232): n is a, c, g, or t
  misc_feature (239)..(239): n is a, c, g, or t
ggtacttttcccattgtatnggacagtacagaaactcccagctgtgnntngaagcgggcaacctcagcacagatcatgacnntncagactcgntgaagacatttcttcntgtncatncagaactgaacccgtgcctgctcntaccccacacagagtgccaccctcacctgtcnccaagccaccttgttcccagacgcagcacgccagtgtcagaagctgcctcctgccctcntgcaccnccgggcacatgcccaccttgcctccgtaccagcctgcctccggcttgtgctatgtgcagaaccactttgtccaaaccccacctcctccagtgtctacccagcttctgcgggcacctccctgggcatccagccccccacgcctgtgaacagccctggcacggtgtattctggggccttgggcacaccaggggctgcaggctccaaggagtcctccagggtccccatgccctgagagaatttctagggaagtcatctcacttggccttctgaaggtcctccctaagagtctcctgacaaaagttacttattgaacacctctatgtgccaggctctgtgttgggtactttgatcaatgcccctgtttcagtctcatctgtactcacggcagccctgtggagtacggtgtactggcccagcttacagatgcagaaagcgagacgttctgccatcagataaagtcacgtggctctttagtaacacggacaaggctcctcgccaaggaactcgtggcagaagagggcagcagttggcagtagctgccgatgtctgtccccagctccaccattcctccctgtggctgtgccgtgctcgtggtttcagtgtccgtgtgtccatgtgtctgcccttcaggagctcgcagctggtgtgcttggcggtcccaggcctgtgtagtgtctctcccctgctgcgggcgcccccaccccgattcctctccccagaagcggtgggatgggcccccatgaactgcagcagcatgctgaggtgtccatgttgtctgcctttgtataaagaaacagcctctgacctgca

SEQ ID NO: 72022 - DNA, 854 bp, Homo Sapiens
taaggcctaggtacgaggctgggtgttgaattcggcacgaggggcagcggcgtcgaggcggggcgcgggaacgacggcggccatggcggcctcggggcccgggtgtcgcagctggtgcttgtgtcccgaggtgccatccgccaccttcttcactgcgctgctctcgctgctggtttccgggcctcgcctgttcctgctgcagcagcccctggcgccctcgggcctcacgctgaagtccgaggcccttcgcaactggcaagccactatggaaggaggggtcaggattacagcagaggagactggcacacagagtgttaagtgacacccactcaatccaccccgaagctgttacacttaattaaccctcaaactgcccagtgagtttacaggctggtaacctacatctttgtctacgagaatcccatctccctgctctgcggcgctatcatcatctggcgctttgctggcaatttcgagagaaccgtgggcaccgtccgccactgcttcttcaccgtgatcttcgccatcttctccgctatcatcttcctgtcattcgaggctgtgtcatcactgtcaaagctgggggaagtggaggatgccagaggtttcaccccagtggcctttgccatgctgggagtcaccaccgtccgttctcggatgaggcgggccctggtgtttggcatggttgtgccctcagtcctggttccgtggctcctgctgggtgcctcgtggctcattccccagacctctttcctcagtaatgtctgcgggctgtccatcgggctggcctatggcctcacctactgctattccatcgacctctcagagcgagtggcgctgaagcctcgatcaga

SEQ ID NO: 72023 - DNA, 1514 bp, Homo Sapiens
ggcggtacggccgggatgtagggatgcagaggaccggcagccggcgtcgaggcggggcgcgggaacgacggcggccatggcggcctcggggcccgggtgtcgcagctggtgcttgtgtcccgaggtgccatccgccaccttcttcactgcgctgctctcgctgctggtttccgggcctcgcctgttcctgctgcagcagcccctggcgccctcgggcctcacgctgaagtccgaggcccttcgcaactggcaagtttacaggctggtaacctacatctttgtctacgagaatcccatctccctgctctgcggcgctatcatcatctggcgctttgctggcaatttcgagagaaccgtgggcaccgtccgccactgcttcttcaccgtgatcttcgccatcttctccgctatcatcttcctgtcattcgaggctgtgtcatcactgtcaaagctgggggaagtggaggatgccagaggtttcaccccagtggcctttgccatgctgggagtcaccaccgtccgttctcggatgaggcgggccctggtgtttggcatggttgtgccctcagtcctggttccgtggctcctgctgggtgcctcgtggctcattccccagacctctttcctcagtaatgtctgcgggctgtccatcgggctggcctatggcctcacctactgctattccatcgacctctcagagcgagtggcgctgaagctcgatcagaccttccccttcagcctgatgaggaggatatccgtgttcaagtacgtctcagggtcttcagccgagaggagggcagcccagagccggaaactgaacccggtgcctggctcctaccccacacagagctgccaccctcacctgtccccaagccaccctgtgtcccagacgcagcacgccagtggtcagaagctggcctcctggccctcctgcacccccgggcacatgcccaccttgcctccgtaccagcctgcctccggcctgtgctatgtgcagaaccactttggtccaaaccccacctcctccagtgtctacccagcttctgcgggcacctccctgggcatccagccccccacgcctgtgaacagccctggcacggtgtattctggggccttgggcacaccaggggctgcaggctccaaggagtcctccagggtccccatgccctgagagaatttctagggaagtcatctcacttggccttctgaaggtcctccctaagagtctcctgacaaaagttacttattgaacacctctatgtgccaggctctgtgttgggtactttgatcaatgcccctgtttcagtctcatctgtacctcacggcaagccctgtggagtacggtgtactggcccagcttacaggatgcagaacagcgagaacgttctgccatcagatacagtcacgtgcgctcttttagtaacacggacaaggctcctcgccaaggacctcgtgggcgaaagagggcagcagttggagtaactgcggttgtctgtcccaaggtcacaattctc

SEQ ID NO: 72024 - DNA, 1760 bp, Homo Sapiens
tttttttagagaaagtctggaggtttactcaacaacgttcacaatcacaattgtacatggtaaatcagtctttcacaaaggcttatttttccaggcaggaggagaggctggtggtcttgagcttttggcctggaattccagtctgaattttcaaatattccctgcctccaacccctttgggatcctagtcttcaagccaataacagagcaggagtctgaccctgttctgttgcctggcacggctgaatcaaagccattctggaagcagatgttaaggtgaacttgtcacttggtatgtaggtccgactcccatcccagaggtggcagtgggccttggctcaagatcaagtttgaactaaaatattacttggatttttcacaaagagtgtccgttgaaagcaataaggaattccagaacagaactgcacttcttgtccctctctcacacttacaaagcttcagaaaacattaaaaatgcattacctcctaggaattacaaaagatcacccaactgtacaaactagatatcgctgaagcagagactctgattcctcagttactactgtaaagtgctttgccactctttttgagactccagagactaggaaaatggagatgcacagagagacataaggagctgttttccaagacatcacctgtttcttaaggaaaaaaagaaattcaactggtgggaagtttgaaaagtgaatgtcatgtagactttggaaatccatttgttacatctttaacagaaactgctctttctctcctggaccgaatgtcacatcctctcgtccgattcctcctgtggatgtaccccgttctgcctgagcattttttcctaaagggaagaatcaatagtttctgactgttttaacagctgaaagctccaactggaggcagaagatgggatggcttttcacacacgtgcgtgcaagtttagccacctccaaaggccttgttcttaaagcaacagtgctgtttgcattatgaaatgtctctggagttcccctttggaaaggctgctggtgggccacatggtcacgatactttcaagtcacaccctactttgtgaccttatcctcagagtaaaggctttagaggaaaagggaccccacagtctcacccattacctggctgtcagcatctccatatgctcctggctgagttttattgagcatcagctggggatgtgagcagaaacctgaatccttgagacaggtggttttcaaaaaggaagccataacaatgagtggcttagtactggcaattgatcagttggtccatgaaatggagccagtcaagttctgtccttccttcccctcccacatactttgtcaagtcccaggacctactgatatgggctcagcaatgacaaatgccagagtgctcagaggacacacccatcccttttcagggtgtgaacccagactggaaaggagaaccaaaggatgggaaaggcaggcccgggacggcttgctgctgctcctgctttcacaggaatcctggtcatgccaggaacactgccgcccacttggggtgggactatgtggaagtctagctagtgctcggcaccccttaacccaatggtgagaaacaggacaaacatgctgggggttcagagggtggaccgcagggatggcccccaaacaggtcccagtgaggtaatgcaaggcctcctctcgggggctgatgaggtcttctaggccacagaccggacgcgtgggtcgacgatatcccgggaattccggaccggtacc

SEQ ID NO: 72025 - DNA, 1497 bp, Homo Sapiens
  misc_feature (83)..(117): n is a, c, g, or t
agaatgtaagatcactatagggcgctgctccggtcataagcgaacgaacgagcgcagcgagtagatgagcgaggaagcggcgnnnnnnnnnnnnnnnnnnnnnnnnnnnnnnnnnnncagtcgacggtaccggacatatgcccgggaattcggccattacggccggggagacaatgccccggagccgccagaccgtcgcgcccctgccccatcgtagtatatgagctcgcctacacaaggacccccgctaaaagccagagctcccagtccccgaggcttgaagacggggactcccttctccaccaactctgtcctcggggggtggggccccagccgagatcacagcgcgacaggagtgggggtggccgctggagacaggtgaagaaacaagaaaactaagaaatccgagcggttggagggggagtctgtgtggatgggatggggacgccgggggaggggctgggccgctgctcccatgccctgatccggggagtcccagagagcctggcgtcgggggaaggtgcgggggctggccttcccgctctggatctggccaaagctcaaagggagcacggggtgctgggaggtaaactgaggcaacgactggggctacagctgctagaactgccacctgaggagtcattgccgctgggaccgctgcttggcgacacggccgtgatccaaggggacacggccctaatcacgcggccctggagccccgctcgtaggccagaggtcgatggagtccgcaaagccctgcaagacctggggctccgaattgtggaaataggagacgagaacgcgacgctggatggcactgacgttctcttcaccggccgggagtttttcgtaggcctctccaaatggaccaatcaccgaggagctgagatcgtggcggacacgttccgggacttcgccgtctccactgtgccagtctcgggtccctcccacctgcgcggtctctgcggcatggggggacctcgcactgttgtggcaggcagcagcgacgctgcccaaaaggctgtccgggcaatggcagtgctgacagatcacccatatgcctccctgaccctcccagatgacgcagctgctgactgtctctttcttcgtcctgggttgcctggtgtgccccctttcctcctgcaccgtggaggtggggatctgcccaacagccaggaggcactgcagaagctctctgatgtcaccctggtacctgtgtcctgctcagaactggagaaggctggcgccgggctcagctccctctgcttggtgctcagcacacgcccccacagctgagggcctggccttggggtactgctggccaggggtaggatagtataggaagtagaaggggaaggagggttagatagagaatgctgaataggcagtagttgggagagagcctcaatattgggggaggggagagtgtagggaaaaggatccactgggtgaatcctccctctcagaaccaataaaatagaattgaccttttaaaaa

SEQ ID NO: 72026 - DNA, 1282 bp, Homo Sapiens
tcatctggaggtctaggaagcatatggtgatctgtcagcactccatttgcccggacaccttttgggcagcgtcgctgctgcctgccacaaacagtgcgaggtccccccatgccgcagagaccgctcagttgggatggacccgagactggcacagtggagacggcgaagtcccggaacgtgtccgccacgatctcagctcctcggtgattggcccatttgaagaggccctacgaaaaactcccgccaggtgaagagaacgtcaagtgccatccagcgtccgcgttcttcgtctcctatttccacaattcggagccccaggtcttgcagggctttgcggactccatcgacctctggcctacgagcggggctccaggccgcgtgattagggccgtgtccccttggatcacggccgtgtcgcacaagcagcggtcccagcggcaatgactcctcaggtggcagttctagcagctgtagccccagtcgttgcctcagtttacctcccagcaccccgtgctccctttgagctttggccagatccagagcgggaaggccagcccccgcaccttcccccgacgccaggctctctgggactccccggatcagggcatgggagcagcggcccagcccctcccccggcgtccccatcccatccacacagactccccctccaaccgctcggatttcttagttttcttgtttcttcacctgtctgggagaagaaacagaaaaggaggagacagagaaaaagacatgcagacaagggcgttgggggtggttaagagcgcccaggtcttcctcctgccatctctaggcgtccctcccactccgccccacccactccagaccttccgctcctgtcgacctcactctacccagcaccctcaggggtcagattctttaagaggagcctgaggaacaaggctagggtctctaatctccaaaacacctgttgcccctgcttgggggcttgtgaggtccctgtcgggcgcccctcttggcagccactaggatgcgctcactccccaaaaatgcagcagccccgcccccttaaccctcagctgctcgctaccgcagggactggaagtccagcccgcgacccgcaggggttatgggacagaaggagaaagctggagaggcaggggctggggaatggaagtcctgaatacccgaacgagaagggagagaggtgggtaggaagggaggagttcgagcctaaggagttaagcatcctctctccgacctggctggtcacgctgcccctagcgcgacctagtataaccag

SEQ ID NO: 72027 - DNA, 703 bp, Homo Sapiens
  misc_feature (536)..(546): n is a, c, g, or t
gaccccagatatccatcatctgatgatgagtgaacagtgtgtttatgcatacagtggactggattcaggcataaaaaggaatgaagtattgatacagactacaacgtgaatggatgagccttaagaatatcatgctaacaaagaagctaaacacacaatatggttccacttacatgcaatgtccaaaataagtaaatccatagagactgaaaatacatcagtgattgctaggagctgggagagggaagaatagtgagtgcatgctaatgagtctgacatttacttttagaaagatgaatgtattctggaattggatagcgctgattatacgaccttgtgaatatacaggatccactgaactgcactttaaaagggtgaatattgtgtgaatcatatctcaatttaaaaagatatatataaagttccctgggtgaatactggtttccctcctcccttcagtatatgtgaaatgtagtgaaatttatatggttctgacagtattttattttaatgatttttcctccatccttggtagnnnnnnnnnnncctttatgtatatgaaacggcaacactgttcgtgaagtcagagctacacaaaatactataatcggaggagtggcaactctcccctttcccattgtttgttctttccaccccattcccgcccgccccctgtaaacaataaatctcattaatcccgggt

SEQ ID NO: 72028 - DNA, 640 bp, Homo Sapiens
ctcttgtacagaagttgcccccaggtggtggggcccctccttgccctaggctggttggtaaaagagaggaggtcaacacccagcctagccacctctgcctcttgggtcagccctccttgactgtgtcccagccagcaccaggccagcagcctcatccctgccattcagggctgttccagagattcgatcctcttaaggcattatcagtgagcaaatgtgaaggaaatggtgtctggaagaaagttctggttcacatgccttgtagctaagtctttctgcaaacaacctcccttccccccgtcgagtcatttggtgactttgatggggggatttctggttatgtcaaggctctggagacaggaagggcctttggccgccttgggtagttgacctgccttttctgactccgggacgagccagtcctaggctgcctccgggagcacttgaggtatcccgcaggccatgaggacccactgggcagctcctggacagcctcttggctccagcccccacccgaaagtggacactggctccgccctggccacctggggactggcactgtggtgcacagtggcccaatgtggccaacggaagttttataaaagacaaaatgtatatcaataaacattttataacttgc

SEQ ID NO: 72029 - DNA, 1272 bp, Homo Sapiens
  misc_feature (889)..(912): n is a, c, g, or t
taggctaggtagcgaggctgggtgtgaatcggcacgaggtgggccctgccctggctcacctttctctcctcagcagaacatgtctctcctcgagtcctatgggtttcagatgttcagtcggcatttgcgtcatctttagtagatcctgaggttgaccagcagcccatggggcctgaagggaaatgaggcagctgctgtgtccccacggaaacaaccatctggggactgctgggaaatgctgtgaatgcggagggaagtgatgtatgggttctgtagctgagagatttttattcatttttaactgccccccaaccccactccaactccttctccaccacccattctcccaatggtctttagaaatagattttcatctgatattctgcagaaatatcaatgagacttggtatgggacaggggcagaaaacactacataggcctccaaggcaaaaccagtcccagtttctttaatgggaagaagctggaattcctggtgctcaattcttagtgaccccaatcctatacccaaatctatgatattctgggacctcagtgattttggtcccctcccacttctctagttcgtcatcctcccttcccatatccttcaaaagaaccacactagggtctccacctacttatacaatgcggatgcccaactgtttttaaggaagccagaagcatcccatggaccatggggtgagtgtcctccaagagccccctgagctcagccctctgcctggagggctccagacctttctgagccctgcttggaggcgagcattttcactgctaggacaagctcagctgttgaggacacccccaccccaaatttcagttcttacgtgattttaaccattcaacatgctgttgggttttaattctctannnnnnnnnnnnnnnnnnnnnnnnttttaggaccagttgtagtgaattgctactgaaagctatcccaggtgatacagagctctttgtaaaccgcagtcacacattagggttagtattaaactttgtttagatgtaccataattaacttggctagttgattgtttgaagtctatggaagaaatagttttatgcaaaattttaaaaaatgccagtctggtcagggaagtagggggtttcaatgctgttgggaaccaggaaggtgggacagccggcaggtagggacattgtgtacctcagttgtgtcacatgtgagcaagcccaggttgaccttgtgatgtgaattgatctgatcagactgtattaaaaatgttagtacattactct

SEQ ID NO: 72030 - DNA, 669 bp, Homo Sapiens
ctgatgaaattgctgaagcccaaggccacagagtcaccacatacatcgcccacccatggagacggccggccaatgcccatgccagtgcgctccacgtctgccggctccaccccaccccactgtccgcaggactcgctgagcggagtcgggggagacgtgcaggaggccttcgcacaaggtacgaggagaaacctccgcaatgacctgctggtggcagctgactccatcaccaacaccatgtcatccctggtgaaggagctccattcagcagaggaaggtgcagaggaagaagaagagaagatgcagaatgggaaagacagaggttagcagaggagccggacacagaggaagctcaggcacagaggacgaggagcaagctggcgccgacatggcgaaggcaaggtcttcccccagaggcacattcctctccatctttccaccgcacacctggaccaggcttgcaggctgccagacgtcactccacccgccagggagaggggagccagagccggtgggaagcggggaggggctgcgtggcacagctagtgggcctccccctgcacagccctgcatgtactagcaccttcatcactcccctcagggcatggtctcatctccgcatcaggaattcacctggaggttgaaaagagaaaagaaaaagcaccaaaa

SEQ ID NO: 72031 - DNA, 584 bp, Homo Sapiens
tatgaatgtaaggaatgtggccaagccttcactcagtacacgggccttgctatacacatacgaaatcacactggagagaaaccctatcagtgtaaggaatgtgggaaagccttcaatagatcttcaacgcttactcaacatagaagaattcacacaggagagaagccttatgaatgtgttgaatgtgggaagaccttcattacttcttcccatcgtagtaaacatttgaaaactcacagtggagaaaggtaaatgcaagatatgtgggaaagaatttctgtattcctcaccccacctgtgaactcctaccagagagaaaccttttgtatgtaaagaatttgggaaagcatttgctctttcctcatgcctaagtatgcatgaaagaattcacactggggagaaatactatgaatgtaaggatatgagtgttgttaccatttagcccattggttgccatctttaattattggcagtgcaaagatcatcagattagtcctaaatgccttttggaggttgtaatggctcacagattggccttagatgcatcccgagggtctgaaattaaacctacaggttctgaatac

SEQ ID NO: 72032 - DNA, 416 bp, Homo Sapiens
gaccccagaaaagttagtgttgtcttctcccacaggtggccttggataagggctgctcccaattccgcctggccgtcctggactggaaccagagggccatggacttgtacaaggccctaggagcccaagatctgacggaagctgagggctggcacttcttctgctttcaaggagaggcaacgagaaagttggcaggaaagtgacgccatccctaggaggatctctgtcttgagtttctccttccccatcagctgaagcactcttcagagactacgtccacagacactgatgctgaggcctccctggaggaaggagggttaggggtgcctatcctcaagtattggaagagcagaattgagggagagacctttcttccttgttgagggtgaaaaataaataagaattacatgtccaaa

SEQ ID NO: 72033 - DNA, 1085 bp, Homo Sapiens
ctcgctggcctactctctcctcccgtacggcgccggaatcccagctccacttaccaggccgcggctaccccgccgtcccccccgactcccgccaccccgctctctcaggctcttcaggatccaagtccgtaggccctttaaggggtctagttgccgtttgcgaggccctgggactttggtcccagacagcggggatccggatggcttccgtgcggatccgagaggccaaggagggagactgtggagatatcctgaggctgattcgggtgaagactgcaggccggagctagccgaattcgaaaaactctcggatcaggtgaagatcagtgaagaaggtgggggctcagcgcccaggttctggcggaggctggggaggaaatgagggatgggttccccaggcgacagctccaggctgggcatacacccacgtcctctttctctatctctttgtcacaactccaatctcggcagccctgagagcagatggctttggagacaatcctttctatcactgtttggtagcagagattcttccagcgcccgggaagctactggggccctgcgtggtgggctatgggatatactatttcatctacagtacatggaagggacgcaccatttatctggaggatatctatgtgatgccggaatatcggggtcaagggattggttccaaaataatcaaaaaggtggctgaggtggccttggataagggctgctcccaattccgcctggccgtcctggactggaaccagagggccatggacttgtacaaggccctaggagcccaagatctgacggaagctgagggctggcacttcttctgctttcaaggagaggcaacgagaaagttggcaggaaagtgacgccatccctaggaggatctctgtcttgagtttctccttccccatcagctgaagcactcttcagagactacgtccacagacactgatgctgaggcctccctggaggaaggagggttaggggtgcctatcctcaagtattggaagagcagaattgagggagagacctttcttccttgttgagggtgaaaaataaataagaattacatgtcctgaaaaaaa

SEQ ID NO: 72034 - DNA, 905 bp, Homo Sapiens
cagtcgacggtaccggacatatgcccgggaattcggccattacggccgggggagggggtggggctatgcccggacagaggatcgcctcgctggcctactctctcctcccgtacggcgccggaatcccagctccacttaccaggccgcggctaccccgccgtcccccccgactcccgccaccccgctctctcaggctcttcaggatccaagtccgtaggccctttaaggggtctagttgccgtttgcgaggccctgggactttggtcccagacagcggggatccggatggcttccgtgcggatccgagaggccaaggagggagactgtggagatatcctgaggctgattcgggtgaagactgcaggccggagctagccgaattcgaaaaactctcggatcaggtgaagatcagtgaagaagccctgagagcagatggctttggagacaatcctttctatcactgtttggtagcagagattcttccagcgcccgggaagctactggggccctgcgtggtgggctatgggatatactatttcatctacagtacatggaagggacgcaccatttatctggaggatatctatgtgatgccggaatatcggggtcaagggattggttccaaaataatcaaaaaggtggctgaggtggccttggataagggctgctcccaattccgcctggccgtcctggactggaaccagagggccatggacttgtacaaggccctaggagcccaagatctgacggaagctgagggctggcacttcttctgctttcaaggagaggcaacgagaaagttggcaggaaagtgacgccatccctaggaggatctctgtcttgagtttctccttccccatcagctgaagcatcctcagagactacgtccacagacactgatgctg

SEQ ID NO: 72035 - DNA, 1023 bp, Homo Sapiens
cagtcgacggtaccggacatatgcccgggaattcggccattacggccgggtgggaaccccaaaatcatcactaacttgtcaaagcagtccactctgaattttgactctccactctatgtaggaggcatgccaggaagagtaacgtggcatctctgcgccaggcccctgggcagaacggaaccagcttccacggctgcatccggaacctttacatcaacagtgagctgcaggacttccagaaggtgccgatgcaaacaggcattttgcctggctgtgagccatgccacaagaaggtgtgtgcccatggcacatgccagcccagcagccaggcaggcttcacctgcgagtgccaggaaggatggatgggccccctctgtgaccaacggaccaatgacccttgccttggaaataaatgcgtacatggcacctgcttgcccatcaatgcgttctcctacagctgtaagtgcttggagggccatggaggtgtcctctgtgatgaagaggaggatctgtttaacccatgccaggcgatcaagtgcaagcatgggaagtgcaggctttcaggtctggggcagccctactgtgaatgcagcagtggatacacgggggacagctgtgatcgagaaatctcttgtcgaggggaaaggataagagattattaccaaaagcagcagggctatgctgcttgccaaacaaccaagaaggtgtcccgattagagtgcagaggtgggtgtgcaggagggcagtgctgtggaccgctgaggagcaagcggcggaaatactctttcgaatgcactgacggctcctcctttgtggacgaggttgagaaagtggtgaagtgcggctgtacgaggtgtgtgtcctaaacacactcccggcagctctgtctttggaaaaggttgtatacttcttgaccatgtgggactaatgaatgcttcatagtggaaatatttgaaatatattgtaaaatacagaacagacttatttttattatgagaataaagactttttttctgcatttgg

SEQ ID NO: 72036 - DNA, 840 bp, Homo Sapiens
  misc_feature (24)..(24): n is a, c, g, or t
  misc_feature (38)..(38): n is a, c, g, or t
  misc_feature (724)..(774): n is a, c, g, or t
agaccaccttcagctctttaattntatttttttagttntattgtgcacgtgtagagtttttgtcatcagacaaggactttgatcctgtcccctttggcatgcgggaagcagccgcggggaggtaatgaattgtctgtggtatcatgtcagcagagtctccaagccccacgaaccctgaggagtggagtcatacgcgaaggccatatggccatcgtgtcagcagagagagtctctgtacacagccccgtgaaccctgaggagtggagtcatacacgaagggcgtgtggccatcgtgtcagcagagagagtctctgtacacagccccgtgaaccctgaggagtggagtcatacgcgaagggtgtgtggccaggctgcagagctgcgtgccgtttgtgtccgagcatcacgtgtggctccagcccttgtttctgccagtgtagacacctctgtctgccccactgtcctggggtcgctcttgggaggcacaggcatgggtgtgtctggcctcattctgtatcagtccagtgtgttcctgtcatagtttgtgtctcccaggcaggccatggtaggggcctcgcaggggccattggggagcacagggccaggctggggtgaggagagctcccctgttttctgtttaattgatgagcctgggaaaggagtgtgttctgcctgcccgttacagtggagcgttccgtgtccataaaacgttttctaactgggnnnnnnnnnnnnnnnnnnnnnnnnnnnnnnnnnnnnnnnnnnnnnnnnnnngaccgtgtatgcggccgcaagctttttcccttgtagtgagggttaattcgagcatggcactgcccg

SEQ ID NO: 72037 - DNA, 483 bp, Homo Sapiens
aaatgtgacatcaagatcggacgaagtgggtgtcctcattttgggggaatgaaaagttttaattaaagagctttgttgctaagaaagggtagagggggaagatcagggtgaatcttgattcaaagccactgatagcacctgaaagactggtttgagagagcaactggagagcatgggcaagtggtttatttggtgagaagatgatctgtatttggtatggagcaggtgggtggcattgagggagtatacctcaagagtataccttgagaagaatgatgtatccatcactgtgattatcgatggaagctgataatactgatgttaatatatatgacagtgcaaataaaggaaattaggaagaacttgctgaagtatgatacctaagatttgctcagaacagaaatattatgttagaactggctgtaagagcaactattaagatatgtataaaaaagagtgagtaggctgggcacagttgctcat

SEQ ID NO: 72038 - DNA, 748 bp, Homo Sapiens
gtcccccatcctgtcctgagccggggccccccagcctcgcctccctcctcctaccatccctcacgtggacctgggggtgtggacagtgacccctccctgaatatggacttgaatcttctgagcagaactagggcctctcccctggtgaagacccagggaacccaggagggcccttctggggcagtggctctgcagggtcactcatggaggcctaggggaacagcgagatgccccaccacctcctggcgagtccttcctgttcagctccctgtgcgaccctccagggatgcaggggatccaggattctctgccctgtcacacggcgagtcagaagggaggggcctttccctcggacccatggccccaggcagagttttgcaccagcaggacccctttgagggccttcaaggctctcccaggagtccccctctgccggccccccaatgccccagctccctcttgggtcctgtgccaagtccgccccagggcctggggctgttgggagccaagggccccctggtactcagttccctcacgattcccgatcacgggcacacctgccccctggttatttgtaaatatttctattggacccaattctcctcggaattggctggcacctctggctgccgcagctcagtgatgacgtgggggaggtgggagaggccgagggctttgcctaggggtgggttgccctgtatacatgatccagtctgtgactaccagccaacctgaataaagcggtttt

SEQ ID NO: 72039 - DNA, 955 bp, Homo Sapiens
  misc_feature (196)..(196): n is a, c, g, or t
  misc_feature (506)..(506): n is a, c, g, or t
  misc_feature (511)..(512): n is a, c, g, or t
  misc_feature (519)..(529): n is a, c, g, or t
cggcaggcaaaaatattgtacacatagcccagggacatataccgctgatttgtgaacgcggacacatcaccggaacatttacagtggactgaagaccacataagaatgcccgggccagatcggcagggcccactgggagcaccagggaacccgctgctttgcagagccatacgcgcgcagccgccgcccccaagcnagcaagagtgagaagcctcggtgaccagagcatgcacctctaggttgtgcccatcccccgcccaacccccccagattaacagatgcatgaggagccgccggaccaccgggaccgactgcctgcgtccacccgtgccccatccccgagaccgccttgcacaccatgtcggccctctttccaccaccccttgctcagcatgtaagccccacccacccctgccctttcagacccctgcggtgacctggctcggagaaggtggccctgggcaccaaggggccaaccgccctgaacactggggcagggaccatgntgggnncccgggnnnnnnnnnnntcctgtcaccagcttctgtggagtccagtgttttgctttgcttgcttgtcccccatcctgtcctgagccggggccccccagcctcgcctccctcctcctaccatccctcacttggacctgggggtgtggacagtgacccctccctgaatatggacttgaatcttctgagcagaactagggcctctcccctggtactcagttccctcacgattcccgatcacgggcacacctgccccctggttatttgtaaatatttctattggacccaattctcctcggaattggctggcacctctggctgccgcagctcagtgatgacgtgggggaggtgggagaggccgagggctttgcctaggggtgggttgccctgtatacatgatccagtctgtgactaccagccaacctgaataaagcggttttaaaaaa

SEQ ID NO: 72040 - DNA, 859 bp, Homo Sapiens
agagtatgaagtcgacggcgcgccgaattcggcacgagggaaacgggaaagatggcgacggctccgcgacgttgaggccgcgttgggcggttcagactcagggtgatggcaggagagctggctgacaaaaaggaccgtgatgcatcaccttccaaggaggaaaggaagcgatcacggactcctgacagagagcgggatagagaccgggaccggaagtcttccccatctaaagatagaaagcggcatcgttcaagggatagacgtcgaggaggcagccgttctcgctctcgttcccgttccaaatctgcagaaagagaacgacggcacaaagaacgagaacgagataaggagcgggatcggaataagaaggaccgagatcgagacaaggatgggcacagacgggacaaggaccgtaaacgatccagcttatctcctggtcgaggaaaagactttaaatctcggaaggacagagactctaagaaggatgaagaggatgaacatggtgataagaagcctaaggcccagccattatccctggaggagcttctggccaagaaaaaggctgaggaagaagctgaggctaagcccaagttcctctctaaagcagaacgagaggctgaagctctaaagcgacggcagcaggaggtggaagagcggcagaggatgcttgaagaagagaggaagaaaggaacagttccagacttgggcaggagatgtggaagatctcaagaacggaactcgggaaccaggagagatggacgggaaccatggaatgagataagaggctgcgatatcggtaaaaggataacatgacgctgcttagacgtacggtgcataaacggccacgactcctacgaaa

SEQ ID NO: 72041 - DNA, 3269 bp, Homo Sapiens
catctccgcgacaggaaacgggaaagatggcgacggctccgcgacgttgaggccgcggtgggcggttcagactcaggatgatggcaggagagctggctgacaaaaaggaccgtgatgcatcaccttccaaggaggaaaggaagcgatcacggactcctgacagagagcgggatagagaccgggaccggaagtcttccccatctaaagatagaaagcggcatcgttcaagggatagacgtcgaggaggcagccgttctcgctctcgttcccgttccaaatctgcagaaagagaacgacggcacaaagaacgagaacgagataaggagcgggatcggaataagaaggaccgagatcgagacaaggatgggcacagacgggacaaggaccgtaaacgatccagcttatctcctggtcgaggaaaagactttaaatctcggaaggacagagactctaagaaggatgaagaggatgaacatggtgataagaagcctaaggcccagccattatccctggaggagcttctggccaagaaaaaggctgaggaagaagctgaggctaagcccaagttcctctctaaagcagaacgagaggctgaagctctaaagcgacggcagcacggaggtggacagagcggcagaggactgcttgaagaagagaggaacgaaaaggaaacagttccaagacttgggcaggaagatgttggaagatcctcaggaacgggaacgtcgggaacgcagggagaggatggaacgggagaccaatggaaatgaggatgaggaagggcggcagaagatccgggaagagaaggataagagcaaggaactgcatgccattaaggagcgttacctgggtggcatcaaaaagcggcgccgaacgagacatctcaatgaccggaaatttgtttttgagtgggatgcatctgaggacacatccattgactacaaccccctgtacaaagaacggcaccaggtgcagttgttagggcgaggcttcattgcaggcattgacctcaagcagcagaagcgagagcagtcacgtttctatggagacctaatggagaagaggcgaaccctggaagaaaaggagcaggaggaggcaagactccgcaaacttcgtaagaaggaagccaagcagcgctgggatgatcgtcattggtctcagaaaaagttagatgagatgacggacagggactggcggatcttccgtgaggactacagcatcaccaccaaaggtggcaagatccccaatcccatccgatcctggaaagactcttctctgcccccacacatcttggaggtcattgataagtgtggctacaaggaaccaacacctatccagcgtcaggcaattcccattgggctacagaatcgtgacatcattggtgtggctgagactggcagtggcaagacagcagccttcctcatccctctgctggtctggatcaccacacttcccaaaattgacaggatcgaagagtcagaccaaggcccttatgccatcatcctggctcccacccgtgagtgggctcaacagattgaggaagagaccatcaagtttgggaaaccgctaggtatccgcactgtggctgtcattggtggcatctccagagaagaccagggcttcaggctgcgcatgggttgtgagattgtgattgctacccctgggcgtttgattgatgtgctggagaaccgctacctggtgctgagccgctgtacctatgtggttctggatgaggcagataggatgattgacatgggctttgagccagatgtccagaagatcctggagcacatgcctgtcagcaaccagaagccagacacggatgaggctgaggaccctgagaagatgctggccaactttgagtcgggaaaacataagtaccgccaaacagtcatgttcacggccaccatgcccccagcggtggagcgtctggccaggagctatcttcggcgacctgctgtggtgtacattggctccgcaggcaagccccatgagcgtgtggaacagaaggtcttcctcatgtcagagtcagaacaagaggaaaaagctgctggcaatcttggagcaaggctttgacccacccatcattatttttgtcaaccagaagaagggctgcgacgtgttggccaaatccctggagaagatggggtacaatgcttgcacactgcacggtggaaaaggccaggagcagcgagagtttgcgttgtccaacctcaaggctggggccaaggatattttggtggctacagatgtggctggtcgtggtattgacatccaagatgtgtctatggttgtcaactatgatatggccaaaaatattgaagattacatccaccgcattggccgcacgggacgagcaggcaagagtggggtggccatcaccttcctcacaaaaagaggactctgctgtgttctacgagctgaagcaagctatcctggaaagcccagtgtcttcctgtccccccgaactagccaaccacccagatgcccagcataagccaggcaccatcctcaccaagaagcgccgggaagagaccatctttgcctgacacagcactcttcctgtgggctgagggcatctccaaagctgcctgatgcctgtttttcagaaccctcacatccctctttccaggtcctcactcttgggatatgggggcttaggaaaacaatccaactccctagcccagaccctcaggtcaggaggcctgcgtgtggggctgcaaaaggagaggacgacgctgtcggaggcagggagagcaaattaccacagcttcttggcccagttctgcccttctttgctttgggattgcactgggccatcagctcatgccaggctatgggggcagccagttggcattgctccccagactgaacagaaacctggccgccggatgggacctcctttggcacagacttgactgtgtaactgcataaactgcagtagcatcattgccctagatgccccaggagacctggcaccatgaggattacagacagtggaatcttactgtcatctggacagctgttttcctgtttggatggtaaaggaagttgagagtctttagacctgtgcacagccccgcaccaaggggtgctgtatgctctaggcatcccctcccccaggggattttctaagtagatggggggacacggtgaactggctgtgtccatctttgtcactgagtgaaatctctgttttctattctctgagaagataagtttgtatgttctgagaataaatacatgaatattaagactgttaaaaaaaa

SEQ ID NO: 72042 - DNA, 947 bp, Homo Sapiens
tgaaaaccaaacatgggccagctgggctttttaacaacctagagactttccggagctgcctggaacagagcctgtgggaaacggggcttgccagtagacactcacagtttccttcatggcctgttttggtcccctaagaatctccacatcattgtctttcttgtgccttttccttggtgagcaacagaaagggaagggttccaagcctctaaaaatgtgctttgtgatcaggagtgcgctccaaaccaaatacgcgcgctgccctttcgaggccagtgagctcagcctccaaggctttaaagccacatttcagcaagagaaagcgctgagagctcgcaggttcattaaagaaggcaaagcactggtttctctccttagaaaagtaggtttcttggcttgatgtagactggcttgctttgatttttagtgaagggaatgtacgtaaaacaaaatagggcttggctggtcaaaggagacaagcaggatggatggatggatggatgaatagatagatggtgtttgcatgtaaattgcagagaaaacaaaaccaaagctgattggaaacaattaattgtgggtgtctgagggggaaggtcgcagctttgggcagctttgagaagcggtacaagagctctgtgcctgtgtgtccagccctggagccagccagtgcatttattttaagctcttagaagcaactccttggcccaggaatgcgtgacccctgagatgggtccacgcatctctctacacgtccttctctccgtgggatactggactcgtgcctctgcgcccattctcttctcacgcatatccatgagctttaatttcactttctgatcacggtacgtccataaagccagtattacacttaaatgaagtattcatttttgtaatcgttttttttagaaggtaaacaaatttaataaagctaccaataatgttgatga

SEQ ID NO: 72043 - DNA, 1728 bp, Homo Sapiens
aaatttacggctaggtacgaggccgggggtgaatcggcacgaggcctacatgacagccagagatgtgggggagagtgcctggactgcatcaatgagctgatggatatcctgtttgcaaatcccaacatttttgttggagagaatattctggaagagagtgagaacctgcacaacgctgaccagccactgcgtgtccgtggctgcatcctaactctggtggaacgaatggatgaagaatttaccaaaataatgcaaaatactgaccctcactcccaagagtacgtggagcacttgaaggatgaggcccaggtgtgtgccatcatcgagcgtgtgcagcgctacctggaggagaagggcactaccgaggaggtctgccgcatctacctgctgcgcatcctgcacacctactacaagtttgattacaaggcccatcagcgacagctgaccccgcctgagggctcctcaaagtctgagcaagaccaggcagaaaatgagggcgaggactcggctgtgttgatggagagactgtgcaagtacatctacgccaaggaccgcacagaccggatccgcacatgtgccatcctctgccacatctaccaccatgctctgcactcgcgctggtaccaggcccgcgacctcatgctcatgagccacttgcaggacaacattcagcatgcagacccgccagtgcagatcctttacaaccgcaccatggtgcagctgggcatctgtgccttccgccaaggcctgaccaaggacgcacacaacgccctgctggacatccagtcgagtggccgagccaaggagcttctgggccagggcctgctgctgcgcagcctgcaggagcgcaaccaggagcaggagaaggtggagcggcgccgtcaggtccccttccacctgcacatcaacctggagctgctggagtgtgtctacctggtgtctgccatgctcctggagatcccctacatggccgcccatgagagcgatgcccgccgacgcatgatcagcaagcagttccaccaccagctgcgcgtgggcgagcgacagcccctgctgggtccccctgagtccatgcgggaacatgtggtcgctgcctccaaggccatgaagatgggtgactggaagacctgtcacagttttatcatcaatgagaagatgaatgggaaagtgtgggaccttttccccgaggctgacaaagtccgcaccatgctggttaggaagatccaggaagagtcactgaggacctacctcttcacctacagcagtgtctatgactccatcagcatggagacgctgtcagacatgtttgagctggatctgcccactgtgcactccatcatcagcaaaatgatcattaatgaggagctgatggcctccctggaccagccaacacagacagtggtgatgcaccgcactgagcccactgcccagcagaacctggctctgcagctggccgagaagctgggcagcctggtggagaacaacgaacgggtgtttgaccacaagcagggcacctacgggggctacttccgagaccagaaggacggctaccgcaaaaacgagggctacatgcgccgcggtggctaccgccagcagcagtctcagacggcctactgagctctccactctgtttcccgcctgggccatccaaccttgaagtcctaaaccacacctcagtcactaaaggtctgtttaaagttgttctggttgattgcttgttgccaaaaa

SEQ ID NO: 72044 - DNA, 915 bp, Homo Sapiens
  misc_feature (89)..(121): n is a, c, g, or t
ccaaaagactatctacctcatatggtgcatcgctgttttatccgaacgaacgagcgcagcgagttatctagcgaggaagcggccgcacnnnnnnnnnnnnnnnnnnnnnnnnnnnnnnnnncagtcgacggtaccgtcacatatgcccgggaattcggccattacggtccgggggccagccccagtgtgtggttcccagcctgacaaccttggtcaccccagcaccccagcaggaggggtttctgcttgtggtcccctggccaccagcctcggccagctggttgtggaccagccgtgacctggggcaacccagccaacctcaccgtccaatgggctgcagccacctctctccagtgaggtctgagacccagccttaacgaggctacccccttccaggtccggccgtagcacctccgcgccgtcgccatgtcgcggtttttcaccaccggttcggacagcgagtccgagtcgtccttgtccggggaggagctcgtcaccaaacctgtcggaggcaactatggcaaacagccattgttgctgagcgaggactgacagaagataccaagagagttgtccgcagtgccaaggacaagaggtttgaggagctgaccaaccttatccggaccatccgtaatgccatgaagattcgtgatgtcaccaagtgcctggaacgacgttgagctcctgggaaaagcatatgggaaggccaaaagcattgtggacaacagaaggtgtccaccggttctatatccgcatcctggctgacctagaggactatcttaatgagctttgggaagataaggaagggaagaagaagatgaacagaacatgccaaggctctgagcacttgcgtcgaagatccgaaaaacaacgtgatttcgagccattcacagctaagcagacccgacagttgcg

SEQ ID NO: 72045 - DNA, 800 bp, Homo Sapiens
ccccccatatttctggaggactcgcctccacttccgtctgtggctccccacgtcccacacgcctggccagactcctggtcgccctcgactggagtccaccaggcgtttgtgcgtccttgtcagccttgcgaaggcacagatgcccagctgcaccatggtcgcggttgtaaaggatctgcactggcgggtctgcatgctgaatgttgtcctgcaagtggcctcatgagcatgaggtcgcgggcctggtaccagcgcgagtccagagcatggtggtagatgtggcagaggatggcacatgtgcggatccggtctgtgcggtccttggcgtagatgtacttgcacagtctctccatcgacacagccgagtcctcgccctcattttctgcctggtcttgctcagactttgaggagccctcaggcggggtcagctgtcgctgatgggccttgtaatcaaacttgtagtaggtgtgcaggatgcgcagcaggtagatgcggcagacctcctcggtagtgcccttctcctccaggtagcgctgcacacgctcgatgatggcacacacctgggcctcatccttcaagtgctccacgtactcttgggagtgagggtcagtattttgcattattttggtaaattcttcatccattcgttccaccagagttaggatgcagccacggacaccgcagtggctggtcagcgttgtgcaggttctcactctcttccagaatattctctccaacaaaaatgttgggatttgcacctcgtgccgaattcaccacccagcctcgctacctagccgtaa

SEQ ID NO: 72046 - DNA, 959 bp, Homo Sapiens
  misc_feature (809)..(809): n is a, c, g, or t
cgacgcagttgtcaaaaagcaaggctgttaaacgacggcagtaactataacggtccttaaggtagcgaggcctgggtggcgaattcggcacgagggctgtcaggccctgcggtgtgactcgcgggctcagctggtccggccgtagcacctccgcgccgtcgccatgtcgcggtttttcaccaccggttcggacagcgagtccgagtcgtccttgtccggggaggagctcgtcaccaaacctgtcggaggcaactatggcaaacagccattgttgctgagcgaggatgaagaagataccaagagagttgtccgcagtgccaaggacaagaggtttgaggagctgaccaaccttatccggaccatccgtaatgccatgaagattcgtgatgtcaccaagtgcctggaagagtttgagctcctgggaaaagcatatgggaaggccaaaagcattgtggacaaagaaggtgtcccccggttctatatccgcatcctggctgacctagaggactatcttaatgagctttgggaagataaggaagggaagaagaagatgaacaagaacaatgccaaggctctgagcaccttgcgtcagaagatccgaaaatacaaccgtgatttcgagtcccatatcacaagctacaagcagaaccccgagcagtctgcggatgaagatgctgagaaacatgaggaggattcagaaggctctccagatgaggatgaggatgaggacggagtcagtgctgcaacttgtcttgaagaagaaattcatgaagctccttctggggagagtcgcaaacgtttcctcaaanacagatggatgatgaagatgaggactcagaaagattccgaaagatgatgacgacttgcgacaccaggttccacatctttccgattccgactcaagggaggaacgacggggaaacaaaccgcgctgggcctaagattcttaaaaagggccc

SEQ ID NO: 72047 - DNA, 1202 bp, Homo Sapiens
aaactttacggctaggtacgaggctgggtggtgaattcggcacgagggggaaacaaaccgcgctggcctcaagatttcttaaaaaggcacccaccacagatgaggacaagaaggcagccgagaagaaacgggaggacaaagctaagaagaagcacgacaggaaatccaagcgcctggatgaggaggaggaggacaatgaaggcggggagtgggaaagggtccggggcggagtgccgttggttaaggagaagccaaaaatgtttgccaagggaactgagatcacccatgctgttgttatcaagaaactgaatgagatcctacaggcacgaggcaagaagggaactgatcgtgctgcccagattgagctgctgcaactgctggttcagattgcagcggaaaacaacctgggagagggcgtcattgtcaagatcaagttcaatatcatcgcctctctctatgactacaaccccaacctggcaacctacatgaagccagagatgtgggggaagtgcctggactgcatcaatgagctgatggatatcctgtttgcaaatcccaacatttttgttggagagaatattctggaagagagtgagaacctgcacaacgctgaccagccactgcgtgtccgtggctgcatcctaactctggtggaacgaatggatgaagaatttaccaaaataatgcaaaatactgaccctcactcccaagagtacgtggagcacttgaaggatgaggcccaggtgtgtgccatcatcgagcgtgtgcagcgctacctggaggagaagggcactaccgaggaggtctgccgcatctacctgctgcgcatcctgcacacctactacaagtttgattacaaggcccatcagcgacagctgaccccgcctgagggctcctcaaagtctgagcaagaccaggcagaaaatgagggcgaggactcggctgtgttgatggagagactgtgcaagtacatctacgccaaggaccgcacagaccggatccgcacatgtgccatcctctgccacatctaccaccatgctctgcactcgcgctggtaccaggcccgcgacctcatgctcatgagccacttgcaggacaacattcagcatgcagacccgccagtgcagatcctttacaaccgcaccatggtgcagctgggcatctgtgcccttccgcaaggctgaaccaggacgcccacaagc

SEQ ID NO: 72048 - DNA, 2115 bp, Homo Sapiens
cgtttaggggggggagagtatgaagtcacggcgcgccgaattcggcacgagggcgagtccgagtcgtccttgtccggggaggagctcgtcaccaaacctgtcggaggcaactatggcaaacagccattgtagctgagcgaggatgaagaagataccaagagagttgtccgcagtgccaaggacaagaggtttgaggagctgaccaaccttatccggaccatccgtaatgccatgaagattcgtgatgtcaccaagtgcctggaagagtttgagctcctgggaaaagcatatgggaaggccaaaagcattgtggacaaagaaggtgtcccccggttctatatccgcatcctggctgacctagaggactatcttaatgagctttgggaagataaggaagggaagaagaagatgaacaagaacaatgccaaggctctgagcaccttgcgtcagaagatccgaaaatacaaccgtgatttcgagtcccatatcacaagctacaagcagaaccccgagcagtctgcggatgaagatgctgagaaaaatgaggaggattcagaaggctcttcagatgaggatgaggatgaggacggagtcagtgctgcaactttcttgaagaagaaatcagaagctccttctggggagagtcgcaagttcctcaaaaagatggatgatgaagatgaggactcagaagattccgaagatgatgaagactgggacacaggttccacatcttccgattccgactcagaggaggaagaagggaaacaaaccgcgctggcctcaagatttcttaaaaaggcacccaccacagatgaggacaagaaggcagccgagaagaaacgggaggacaaagctaagaagaagcacgacaggaaatccaagcgcctggatgaggaggaggaggacaatgaaggcggggagtgggaaagggtccggggcggagtgccgttggttaaggagaagccaaaaatgtttgccaagggaactgagatcacccatgctgttgttatcaagaaactgaatgagatcctacaggcacgaggcaagaagggaactgatcgtgctgcccagattgagctgctgcaactgctggttcagattgcagcggaaaacaacctgggagagggcgtcattgtcaagatcaagttcaatatcatcgcctctctctatgactacaaccccaacctggcaacctacatgaagccagagatgtgggggaagtgcctggactgcatcaatgagctgatggatatcctgtttgcaaatcccaacatttttgttggagagaatattctggaagagagtgagaacctgcacaacgctgaccagccactgcgtgtccgtggctgcatcctaactctggtggaacgaatggatgaagaatttaccaaaataatgcaaaatactgaccctcactcccaagagtacgtggagcacttgaaggatgaggcccaggtgtgtgccatcatcgagcgtgtgcagcgctacctggaggagaagggcactaccgaggaggtctgccgatttaactgctgcgcattctgcacacctacttacaagtttgattacaaggcccatcagcgacagctgaccccggctgagggctcctccaaagtctgagcaaagaccaggcagaaaaattgagggcgaggactcggctgcggttgatggacgagacctgtgccaagtaaatctacgccaagggaccgcagccgcaccgggattccgcaccatgtgcccttcctctggccagattacccgacatgggtctgcaggtacgcgctggtaccaaggccccggactcttgcacatgagccacctgcacggacaaacatcagcatgcaaacccgcaggcagatcttaccacgctccaggcgccgatgcgctcgggccttcgcaggccgacaggaagcacacagcactgcggactcagtgagtggcgacacgcattctggcacgcgtgtgccactgagggcacagaccgaaggagggcgtggcctcatgctaccgacggaagctccgggcccaccggaacagggccaaaggcccacaaaaccacaggggcccgccaccgagggccgggacaaacagggcacaaagagcagcacgcccaga

SEQ ID NO: 72049 - DNA, 929 bp, Homo Sapiens
  misc_feature (878)..(878): n is a, c, g, or t
  misc_feature (880)..(881): n is a, c, g, or t
  misc_feature (889)..(889): n is a, c, g, or t
acgggagagagtatgaagtcgaggcgcgccgaattcggcacgagggggccctgcggtgtgactcgcgggctcagctggtccggccgtagcacctccgcgccgtcgccatgtcgcggtttttcaccaccggttcggacagcgagtccgagtcgtccttgtccggggaggagctcgtcaccaaacctgtcggaggcaactatggcaaacagccattgttgctgagcgaggatgaagaagataccaagagagttgtccgcagtgccaaggacaagaggtttgaggagctgaccaaccttatccggaccatccgtaatgccatgaagattcgtgatgtcaccaagtgcctggaagagtttgagctcctgggaaaagcatatgggaaggccaaaagcattgtggacaaagaaggtgtcccccggttctatatccgcatcctggctgacctagaggactatcttaatgagctttgggaagataaggaagggaagaagaagatgaacaagaacaatgccaaggctctgagcaccttgcgtcagaagatccgaaaatacaaccgtgatttcgagtcccatatcacaagctacaagcagaaccccgagcagtctgcggatgaagatgctgagaaaaatgaggaggattcagaaggctcttcagatgaggatgaggatgaggacggagtcagtgctgcaactttcttgaagaagaaatcagaagctccttctggggagagtcgcaagttcctcaaaaagatggatgatgaagatgaggactcagaagattccgaagatgatgaagactgggacacaggttccacatcttccgattccaactcagaggaggaagaaaggaaaacaaacgcgctgggcctcagatttctnannaggcaccnacacagatgagggacagaggcagccgaaagaaacgggaga

SEQ ID NO: 72050 - DNA, 864 bp, Homo Sapiens
ggggagagagtatgaagtcgacggcgcgccgaattcggcacgagtcagggccctgcggtgtgactcgcgggctcagctggtccggccgtagcacctccgcgccgtcgccatgtcgcggtttttcaccaccggttcggacagcgagtccgagtcgtccttgtccggggaggagctcgtcaccaaacctgtcggaggcaactatggcaaacagccattgttgctgagcgaggatgaagaagataccaagagagttgtccgcagtgccaaggacaagaggtttgaggagctgaccaaccttatccggaccatccgtaatgccatgaagattcgtgatgtcaccaagtgcctggaagagtttgagctcctgggaaaagcatatgggaaggccaaaagcattgtggacaaagaaggtgtcccccggttctatatccgcatcctggctgacctagaggactatcttaatgagctttgggaagataaggaagggaagaagaagatgaacaagaacaatgccaaggctctgagcaccttgcgtcagaagatccgaaaatacaaccgtgatttcgagtcccatatcacaagctacaagcagaaccccgagcagtctgcggatgaagatgctgagaaaaatgaggaggattcagaaggctcttcagatgaggatgaggatgaggacggagtcagtgctgcaactttcttgaagaagaatcagaagctccttctgggagagtcgcaagttcctcaaaagaggatgatgaagatgagactcagagattcgaagagatgagactggacacagtccacatcttcgatcgatcaaagagagaaggaacaacgcctgctcagattctaaagcacacccat

SEQ ID NO: 72051 - DNA, 805 bp, Homo Sapiens
  misc_feature (625)..(625): n is a, c, g, or t
  misc_feature (733)..(733): n is a, c, g, or t
  misc_feature (745)..(745): n is a, c, g, or t
  misc_feature (752)..(752): n is a, c, g, or t
taggcgagagagtatgaagtcgacggcgcgccgaattcggcacgaggcgtgatgtcaccagtgcctggaagagtttgagctcctgggaaaagcatatgggaaggccaaaagcattgtggacaaagaaggtgtcccccggttctatatccgcatcctggctgacctagaggactatcttaatgagctttgggaagataaggaagggaagaagaagatgaacaagaacaatgccaaggctctgagcaccttgcgtcagaagatccgaaaatacaaccgtgatttcgagtcccatatcacaagctacaagcagaaccccgagcagtctgcggatgaagatgctgagaaaaatgaggaggattcagaaggctcttcagatgaggatgaggatgaggacggagtcagtgctgcaactttcttgaagaagaaatcagaagctccttctggggagagtcgcaagttcctcaaaaagatggatgatgaagatgaggactcagaagattccgaagatgatgaagactgggacacaggttccacatcttccgattccgactcagaggaggaagaagggaaacaaaccgcgctggcctcaagatttcttaaaaaggcacccaccacagatgaggancagaaggcagccgagaagaaacgggaggacaaagctaagaagagcacgacaggaaatccagcgcctggatgaagaggaggagacatgaagggggagtggaaaaggtcngggcggatgccntggttangagagcaaaatgttgccaggaactgaatcacctgctgtgtatcagaactgatg

SEQ ID NO: 72052 - DNA, 576 bp, Homo Sapiens
gtttttacactgaaagcaaagattatagcaattgtagtccatggtatttattttcagtcaaaccaaagttacatataattctgcctctgcttatacgggatattaacactaacaatacactcccttcaaagacttgcacaggccaaattgttggaatgctggttttcttgacaattccaaaccccaaaactatgataatgagttatgatgtagttgaaaatagcatagtcagatgtttgcttaaaacctagaaacttaacatgttgcttttcatgtgctgtgccaagtcttgataatactttttcccccaaccaagggacctcataacctgattatggttattgctttacaaacagttttgacagaaggtggctgctagagcttaacatacgttcccgttccatgtgatggaaccggttcttgcaaactaagctcatcattgattctttgctgaagtcagcaaatagagttagagagatacccagtcatctatcacaccaaataaaaggacataacggctttcaaaagggttttcccacttaccccaaaaggctttctgaaagcttctacctctgc

SEQ ID NO: 72053 - DNA, 1431 bp, Homo Sapiens
  misc_feature (13)..(13): n is a, c, g, or t
  misc_feature (214)..(214): n is a, c, g, or t
  misc_feature (1321)..(1363): n is a, c, g, or t
caaaaagtatctnacttctacgacattgaggagagattaggatctgggaaatttggacaggtctttcgacttgtagaaaagaaaactcgaaaagtctgggcagggaagttcttcaaggcatattcagcaaaagagaaagagaatatccggcaggagattagcatcatgaactgcctccaccaccctaagctggtccagtgtgtggatgcctttnaagaaaaggccaacatcgtcatggtcctggagatcgtgtcaggaggggagctgtttgagcgcatcattgacgaggactttgagctgacggagcgtgagtgcatcaagtacatgcggcagatctcggagggagtggagtacatccacaagcagggcatcgtgcacctggacctcaagccggagaacatcatgtgtgtcaacaagacgggcaccaggttcaagctcatcgactttggtctggccaggaggctggagaacgcggggtctctgaaggtcctctttggcaccccagaatttgtggctcctgaagtgatcaactatgagcccatcggctacgccacagacatgtggagcatcggggtcatctgctacatcctagtcagtggcctttcccccttcatgggagacaacgataacgaaaccttggccaacgttacctcagccacctgggacttcgacgacgaggcattcgatgagatctccgacgatgccaaggatttcatcagcaatctgctgaagaaagatatgaaaaaccgcctggactgcacgcacgatttcagcatccatggctaatgaaagataccaagaacatggaggccaagaaactctccaaggaccggatgaagaagtacatggcaagaaggaaatggcagaaaacgggcaatgctgtgagagccattggaagactgtcctctatggcaatgatctcagggctcagtggcaggaaatcctcaacagggtcaccaaccagcccgctcaatgcagaaaaactagaatctgaagatgtgtcccaagctttccttgaggctgttgctgaggaaaagcctcatgtaaaaccctatttctctaagaccattcgcgatttagaagttgtggaagggaagtgctgctagatttgactgcaagattgaaggatacccagaccccgaggttgtctggttcaaagatgaccagtcaatcagggagtcccgccacttccagatagactacgatgaggacgggaactgctctttaattattagtgatgtttgcggggatgacgatgccaagtacacctgcaaggctgtcaacagtcttggagaagccacctgcacagcagagctcattnnnnnnnnnnnnnnnnnnnnnnnnnnnnnnnnnnnnnnnnnnnaagagtgaaacaaagccagagaaaagcagtttctaagtcatattaaaaggactatttctctaaaactc

SEQ ID NO: 72054 - DNA, 663 bp, Homo Sapiens
  misc_feature (13)..(13): n is a, c, g, or t
  misc_feature (553)..(595): n is a, c, g, or t
cagcatccatggntaatgaaagataccaagaacatggaggccaagaaactctccaaggaccggatgaagaagtacatggcaagaaggaaatggcagaaaacgggcaatgctgtgagagccattggaagactgtcctctatggcaatgatctcagggctcagtggcaggaaatcctcaacagggtcaccaaccagcccgctcaatgcagaaaaactagaatctgaagaagatgtgtcccaagctttccttgaggctgttgctgaggaaaagcctcatgtaaaaccctatttctctaagaccattcgcgatttagaagttgtggagggaagtgctgctagatttgactgcaagattgaaggatacccagaccccgaggttgtctggttcaaagatgaccagtcaatcagggagtcccgccacttccagatagactacgatgaggacgggaactgctctttaattattagtgatgtttgcggggatgacgatgccaagtacacctgcaaggctgtcaacagtcttggagaagccacctgcacagcagagctcattnnnnnnnnnnnnnnnnnnnnnnnnnnnnnnnnnnnnnnnnnnnaagagtgaaacaaagccagagaaaagcagtttctaagtcatattaaaaggactatttctctaaaactc

SEQ ID NO: 72055 - DNA, 484 bp, Homo Sapiens
ggagatctcatcgaatgcctcgtcgtcgaagtcccaggtggctgaggtaacgttggccaaggtttcgttatcgttgtctcccatgaagggggaaaggccactgactctggagagacaagagcaggacagcaggtgtggctaggagagggcgcgacgaccagatgagggaattgaggcacagcccaggctcaagtcacctgcccaaagattcacagccagtgagattggaagccaggtatctgcctctagagcctgtcctcttaaatgctatactatcctaacatttctgtaaagatgaagtaaattgcagtgttcagcactggcaccaggcctggtccacagtaaggaggcggtccatgcccggagatctcatgcagttctgctgggttccctccactgccttaccaagctgtgagtgcaggaatgactttgtgaccagcagcttaagccaaataaactttataaggtaaagaatttcaaaaca

SEQ ID NO: 72056 - DNA, 496 bp, Homo Sapiens
  misc_feature (382)..(424): n is a, c, g, or t
aaatcctcaacagggtcaccaccaagcccgctcaatgcagaaaaactagaatctgaagatgtgtcccaagctttccttgaggctgttgctgaggaaaagcctcatgtaaaaccctatttctctaagaccattcgcgatttagaagttgtggagggaagtgctgctagatttgactgcaagattgaaggatacccagaccccgaggttgtctggttcaaagatgaccagtcaatcagggagtcccgccacttccagatagactacgatgaggacgggaactgctctttaattattagtgatgtttgcggggatgacgatgccaagtacacctgcaaggctgtcaacagtcttggagaagccacctgcacagcagagctcattnnnnnnnnnnnnnnnnnnnnnnnnnnnnnnnnnnnnnnnnnnnaagagtgaaacaaagccagagaaaagcagtttctaagtcatattaaaaggactatttctctaaaactcaaaa

SEQ ID NO: 72057 - DNA, 788 bp, Homo Sapiens
gctggaccggtccggattcttcgatatcttctgacacactgacagtgctgagcagagcaaggttgggttcgctcctctggcagaacctcggctctcaggaggtccttgttccagggaacagctgcttctctggggctgggctctactccctgcagcccctcgcactacccagctggaaccagggacaacgcctgagtccaaccctcgtgtctattttccagaaaacgggcaatgctgtgagagccattggaagactgtcctctatggcaatgatctcagggctcagtggcaggaaatcctcaacagggtcaccaaccagcccgctcaatgcagaaaaactagaatctgaagaagatgtgtcccaagctttccttgaggctgttgctgaggaaaagcctcatgtaaaaccctatttctctaagaccattcgcgatttagaagttgtggagggaagtgctgctagatttgactgcaagattgaaggatacccagaccccgaggttgtctggttcaaagatgaccagtcaatcagggagtcccgccacttccagatagactacgatgaggacgggaactgctctttaattattagtgatgtttgcggggatgacgatgccaagtacacctgcaaggctgtcaacagtcttggagaagccacctgcacagcagagctcattgtggaaacgatggaggaaggtgaaggggaaggggaagaggaagaagagtgaaacaaagccagagaaaagcagtttctaagtcatattaaaaggactatttctctaaaactc

SEQ ID NO: 72058 - DNA, 742 bp, Homo Sapiens
ggtgaaacggttcaacgccctctagatcgcctgttctcctctattgtcaccgttgctgaacaaaagtatcagtctaccttgtgggacaagtccaagaaactggcggagcaggctgcagccatcgtctgtctgcggagccagggcctccctgagggtcggctgggtgaggagagcccttccttgcacaagcgaaagagggaggctcctgaccaagaccctgggggccccagagctcaggagctagcacaacctggggatctgtgcaagaagccctttgtggccttgggaagtggtgaagaaagccccctggaaggctggtgactactcttcctgccttagtcacccctccatgggcctggtgctaaggtggctgtggatgccacagcatgaaccagatgccgttgaacagtttgctggtcttgcctggcagaagttagatgtcctggcaggggccatcagcctagagcatggaccaggggccgcccaggggtggatcctggcccctttggtggatctgagtgacagggtcaagttctctttgaaaacaggagcttttcaggtggtaactccccaacctgacattggtactgtgcaataaagacaccccctaccctcacccacggctggctgctttcacccttgggcatcttcataacaaaaaacaaggagggggaagccccggggggggaagtgcgccagggacaagcttccttgtgggccgcccttggccccccaaaaaacc

SEQ ID NO: 72059 - DNA, 2162 bp, Homo Sapiens
  misc_feature (1851)..(1860): n is a, c, g, or t
  misc_feature (2056)..(2056): n is a, c, g, or t
aggaggaggaggcgggggcggccatggctgctgtggtggtggcggctgcgggtggcgcgggaccggcggtcctgcaggtggccggtctctaccggggcctgtgcgcggtgcgcagccgcgccctgggcctggggctcgtgtcacccgcgcagctgcgcgtcttcccagtgcgccccggctcgggccggcccgaggggggcgccgacagcagcggggtcggggccgaggccgagctccaggccaaccctttctacgaccgctaccgcgacaagatccagctgctgcgcaggtcagacccagctgcttttgagtcccgcctggagaaacgcagtgaatttcggaagcagccagtggggcattccaggcaaggtgattttatcaaatgtgtggaacagaagacagatgccttggggaaacagtctgtgaacagaggattcactaaggacaagactctcagttcaatctttaacattgagatggtaaaagaaaaaactgcagaagaaataaaacagatttggcagcaatattttgcagcaaaagatacagtctacgcagttattcctgcagaaaagtttgatttgatctggaaccgggctcagtcctgtccaacatttctatgtgctctgccaagaagggaaggttatgagttttttgtaggacaatggacaggtactgaactccacttcactgcacttataaatattcagacccgagggggaagctgcagccagccagctgattttatatcactatcctgaacttaaggaaaaaaagggcatagtgctgatgactgcagaaatggattccacatttctgaatgttgctgaggcacagtgcatcgccaaccaagttcagctcttctacgctactgatcggaaagagacctacgggttagtggagacctttaacctcagaccaaatgagttcaaatatatgtctgtcatcgctgaattggagcaaagcggacttggagcagaactgaaatgtgcccagaaccaaaataagacttagaactgtacaggttggcccttcacctagttgactcagccctcgatagtctagagcccaccccctcctcaggaactcaagagctcagcattataatgagcagttggtaatgagttgccctatgtgcttgtcgcaagcagtcacagagatgagccctattacttgatattcaggaacaaaggtacctgaacattctgataattatctcagcatacttgaggtttccttttttaagtgttcgaggttataacaagagacagccaaggacctacaagacagttgacttgattttgcacagtgtaacagcgcagttgcattctggccactttgaccttatagctcccaaatgatgagtttgtcatctttatgaactcatgacaggataataagcttgaagacctgctgtagttagatatgggctttaatccttcccatgcaccagtcagctgaacaaaagcataagccaaacatcctgtttaaactgtagaataaccagatattcccatcaggttaaagacttcatctagatgatgccccccagagatgcctttagtgtaagtagctggcttggggtatcagcaaatttcaggtatagttagataaacaggtacagggcctgcatactattaaaccatagtttgtggcacccgcttttctaactccacctgttagaagctatgtgtttgaaggaatgaatcagtgcagtataaataaaattcttttgtaaggagaagattaatcctggtttgcatgatttttttaaaaacaactctaaacatgatacgaaaaagtggatgaaagcaaatgttcccagattggatgtggggaaaatatagcaataannnnnnnnnnaagtctggcttacaatgtttgttatacaaaataatgaaatctgagttatgtactgtccattgtgtcagggctatgggctgattttatcaaaactcatcttgggactgaaaaattgtttggaatgccagaaataagaaagttgttctccagagctggaaacccatctttcgtttgtagtgtcactgttgtggctccnagctcagtgataggaaaggacggtggttacacaccaggccttctgaaccccaaggccccaggtattggtgtcagctgccctttaccatgggcattttctttctccc

SEQ ID NO: 72060 - DNA, 970 bp, Homo Sapiens
gacggtatcgtcgcgagcagataccgcagtactggaacaggtaatgacgggcacggcctccccacggcctgtccgggaaagaccaggacctgctcgagcctcctggccgctccttggccgctctccgtccacccctgcaaagccaagacccttctgcagccacgaatgtccacggagcccgccggcaggaaggaagacaccatgctttagagatccatctttctccactcaccgcagcgtacttggcacttcagtttcaaacacgtagtcctttaaaacttgatccgatagctttaatgcggccggtcctctctcagtcaggaaaattgcacagaccgacagtcgtgaggatggcagagctgctgcattcccccacacggggatttctgtgtctgcttggcgacctccctgcgtgcacggcctaggaggtgcacgggccaccatagtcacactggcactgaaaagaaagcgttgccctggtgattctttcccccccgtttgtaatgttaactgatcaggaagtgcagtttgggtgggatgccgaatcgtcgtgctgacattgagtcacggatgaggaaggtacaagtcctttaagatcaaaactcaaacgggccgttctttctaaggtgtcggtatgtggggagtggtacaaaatggtctgatgctccttcaaaaacattcactttttacaacgtcaaggaattaagcataaaaaagattggttaaaagctttggtttctagtaaaggttagtgtgtgtggtttttttaagaagctgttttgctaaattatttttacttggaatgtttcaaacagatttcaggctgcaaacttgttttataatcgtttgcttctccaagtgaagctcagaaatacctaaaaatagctgtaacgttcgcgttaggaaagatggtgtttattccagtttgcatttttatggtgaaataaaatccttttccaatgaactaaaa

SEQ ID NO: 72061 - DNA, 1245 bp, Homo Sapiens
cagtcgacggtaccggacatatgcccgggaattcggccattacggccgggcaggtgctagaggagcttcgagggtactgcacggatgtgtctgcggactttgcacaggctgccatctttgccataggtggcattgccaggacttacacagatcaatgtgtacagattttaacagagttgctgggtctatctgacaagagcacattaccacagtggtggtgcagactttccgagacctggtttggttgtgtcctcagtgtactgaagctgtatgtcaggcactgcccggctgtgaagagaacattcaagatagtgaggggaagcaagcacttatttggctacttggtgtccatggggaaagaattcctaatgctccttatgtgttagaggactttgttgagaatgtgaagtcggaaacatttccagctgttaagatggagctgctcactgctttgctgcgccttttcctctcccgacctgctgagtgccaggacatgctaggacgtttgttgtattactgcatagaggaagaaaaagatatggctgtacgggaccgaggtctcttctattatcgcctcctcttagttggcattgatgaagttaagcggattctgtgtagccctaaatctgaccctactcttggacttttggaggatccggcagaaagacctgtgaatagctgggcctcagacttcaacacactggtgccagtgtatggcaaagcccactgggcaactatctctaaatgccagggggcagagcgttgtgacccagagcttcctaaaacttcatcctttgccgcatcaggacccttgattcctgaagagaacaaggagagggtacaagaactccctgattctggagccctcatgctagtccccaatcgccagcttactgctgattattttgagaaaacttggcttagccttaaagttgctcatcagcaagtgttgccttggcggggagaattccatcctgacaccctccagatggctcttcaagtagtgaacatccagaccatcgcaatgagtagggctgggtctcggccatggaaagcatacctcagtgctcaggatgatactggctgtctgttcttaacagaactgctattggagcctggaaactcagaaatgcagatctctgtgaaacaaaatgaagcaagaacggagacgctgaatagttttatttctgtattagaaactgtgattggaacaattgaagaaataaaatcataacagataaaaaa

SEQ ID NO: 72062 - DNA, 746 bp, Homo Sapiens
ccagtttccccatcgtacagtgtgctgcacaccctggcctgtccccgaggtggctgggaggtgctcctcaaacagccactttctcatcagtgcccggtgctgggtcaggcatcgactgaggctctgagctaactaggaaacacagtggccttggagggctggggagtgtcatgggggtggggacagggagccaccggtcgcatgtgactgaactcttcaccccagtctgtggctttcccgttgcagtgagagccacgagccaaggtgggcacttgatgtcggatctcttcaacaagctggtcatgaggcgcaagggcatctctgggaaaggacctggggctggtgaggggcccggaggagcctttgcccgcgtgtcagactccatccctcctctgccgccaccgcagcagccacaggcagaggaggacgaggacgactgggaatcctagggggctccatgacaccttcccccccagacccagacttgggccgttgctctgacatggacacagccaggacaagctgctcagacctgcttccctgggagggggtgacggaaccagcactgtgtggagaccagcttcaaggagcggaaggctggcttgaggccacacagctggggcggggacttgtctgcctgtacttcatggggggacggctccacccagcctgcgccactgtgttcttaagaggcttccagagaaaacggcacaccaatcaataaagaactgagcagaaaccaaaaa

SEQ ID NO: 72063 - DNA, 1232 bp, Homo Sapiens
  misc_feature (489)..(529): n is a, c, g, or t
aacaaatttcggctaggtaagcgaggcctgggtggtgaattcggcacgaggagaagagggacttgggggtcttcccagcaacatcagctctgtcagctccttgctgctcttcaacaccaccgagaacctgtacaagaagtatgtcttcctggaccccctggctggtgctgtaacaaagacccatgtgatgctgggggcagagacagaggagaagctgtttgatgcccccttgtccatcagcaagagagagcagctggaacagcaggtcccagagaactacttctatgtgccagacctgggccaggtgcctgagattgatgttccgtcctacctgcctgacctgcccggcattgccaacgacctcatgtacagtgccgacctgggccccggcattgccccctctgcccctggcaccattccggaactgcccaccttccacactgaggtagccgagccactcaaggcagacctacaagatggggtactaannnnnnnnnnnnnnnnnnnnnnnnnnnnnnnnnnnnnnnnngctcctgaggtgctggccagtgcacccccactcccaccctcaaccgcggcccctgtaggccaaggcgccaggcaggacgacagcagcagcagcgcgtctccttcagtccagggagctcccagggaagtggtcgacccctccggtggccgggccactctgctagagtccatccgccaagctgggggcatcggcaaggccaagctgcgcagcatgaaggagcgaaagctggagaagaagaagcagaaggagcaggagcaagtgagagccacgagccaaggtgggcacttgatgtcggatctcttcaacaagctggtcatgaggcgcaagggcatctctgggaaaggacctggggctggtgaggggcccggaggagcctttgcccgcgtgtcagactccatccctcctctgccgccaccgcagcagccacaggcagaggaggacgaggacgactgggaatcctagggggctccatgacaccttccccgccagacccagacttgggccgttgctctgacggaaccagcactgtgtggagaccagcttcaaggagcggaaggctggcttgaggccacacagctggggcggggacttctgtctgcctgtgctccatggggggacggctccacccagcctgcgccactgtgttcttctcttaagaggcttccagagaaaacggcacaccaatcaataaagaactgagcag

SEQ ID NO: 72064 - DNA, 742 bp, Homo Sapiens
agtccatccgccaagctggggcatcggcaaggccaagctgcgcagcatgaaggagcgaaagctggagaagaagaagcagaaggagcaggagcaagtgagagccacgagccaaggtgggcacttgatgtcggatctcttcaacaagctggtcatgaggcgcaagggtaggaggcagggccgctgcccgccctgggccggcacattgtaattctgtcctgcctttttcttcctgtatttaagtctccgggggctgggggaaccagggtttcccaccaaccaccctcactcagccttttccctccaggcatctctgggaaaggacctggggctggtgaggggcccggaggagcctttgcccgtgtgtcagactccatcccctcctctgccgccaccgcagcagccacaggcagaggaggacgaggatgactgggaatcctagggggctccatgacacctccccccccagacccagacttgggccgttgctctgacatggacacagccaggacaagctgctcagacctgcttccctgggagggggtgacggaaccagcactgtgtggagaccagcttcaaggagcggaaggctggcttgaggccacacagctggggcggggacttctgtctgcctgtacttcatggggggacggctccacccagcctgcgccactgtgttcttctcttaagaggcttccagagaaaacggcacaccaatcaataaagaactgagcagaaaccaaaa

SEQ ID NO: 72065 - DNA, 743 bp, Homo Sapiens
gagcagcctttcctccttgacctgttccccacctcctggctccagtccagggagctcccagggaagtggtcgacccctccggtgcccgggccactctgctagagtccatccgccaagctgggggcatcggcaaggccaagctgcgcagcatgaaggagcgaaagctggagaagaagaagcagaaggggcaggagcaagtgagagccacgagccaaggtgggcacttgatgtcggatctcttcaacaagctggtcatgaggcgcaagggcatctctgggaaaggacctggggctggtgaggggcccggaggagcctttgcccgcgtgtcagactccatccctcctctgccgccaccgcagcagccacaggcagaggaggacgaggacgactgggaatcctagggggctccatgacaccttccccgccagacccagacttgggccgttgctctgacatggacacagccaggacaagctgctcagacctacttccttgggagggggtgacggaaccagcactgtgtggagaccagcttcaaggagcggaaggctggcttgaggccacacagctggggcggggacttctgtctgcctgtgctccatggggggacggctccacccagcctgcgccactgtgttcttctcttaagaggcttccagagaaaacggcacaccaatcaataaagaactgagcagaaaccaacagtgtgcttttaataaaggatctctagctgtgcaggatcc

SEQ ID NO: 72066 - DNA, 1185 bp, Homo Sapiens
  misc_feature (242)..(322): n is a, c, g, or t
gcatagtggagctttcctctctaagctcgcccagctcaaactgacaggagaatcttcttcgactgccaagagcggtccaaggcaatggtcagccactgcagcctcctgagatatttttagagactggacctgaggcctccggaggctactgatgatgcctgctgtgaacgcagacactggtgtgatgcgatgcctgcgcctgcagcggcagtgccctgggcactatggttttgagcttgtannnnnnnnnnnnnnnnnnnnnnnnnnnnnnnnnnnnnnnnnnnnnnnnnnnnnnnnnnnnnnnnnnnnnnnnnnnnnnnnntgctgcacaccctggccctggccccgaggtggctgggaggtggctcctcaaaccgccgctgtctcatcagtgcccggtgctgggtcagggatcgactgaggctctgagctaactgggaaacacagtggccttggagggctggggagcgtcatgggggtggggacagggagtcaccggtcgcatgtgactgaactcttcaccccagtctgtggctttcccgttgcagtgagagccacgagccaaggtgggcacttgatgtcggatctcttcaacaagctggtcatgaggcgcaagggtaggaggcagggccgctgcccgccctgggccagcacctcgtaattctgtcctgcctttttcctcctgtatttaagtctccgggggctgggggaaccagggtttcccaccaaccaccctcactcagccttttccctccaggcatctctgggaaaggacctggggctggtgaggggcccggaggagcctttgcccgcgtgtcagactccatccctcctctgccgccaccgcagcagccacaggcagaggaggacgaggacgactgggaatcctagggggctccatgacaccttccccgccagacccagacttgggccgttgctctgacatggacacagccaggacaagctgctcagacctacttccttgggagggggtgacggaaccagcactgtgtggagaccagcttcaaggagcggaaggctggcttgaggccacacagctggggcggggacttctgtctgcctgtgctccatggggggacggctccacccagcctgcgccactgtgttcttctcttaagaggcttccagagaaaacggcacaccaatcaataaagaactgagcag

SEQ ID NO: 72067 - DNA, 1024 bp, Homo Sapiens
tggaccggtccggaattcccgggatatcgtcgaccacgcgtccggcggcgggagcttccgggagggcggctcgcaggcaccatgactcctgtgaggatgcagcactccctggcaggtcagacctatgccgtgcccctcatccagccagacctgcggcgagaggaggccgtccagcagatggcggatgccctgcagtacctgcagaaggtctctggagacatcttcagcaggatctcccagcgggtagagcagagccggagccaggtgcaggccattggagagaaggtctccttggcccaggccaagattgagaagatcaagggcagcaagaaggccatcaaggtgttctccagtgccaagtaccctgctccagagcgcctgcaggaatatggctccatcttcacgggcgcccaggaccctggcctgcagagacgctcccgccacaggatccagagcaagcaccgccccctggacgagcgggccctgcaggagaagctgaagtactttcccgtgtgtgtgagcaccaagccggagcccgaggacgatgcagaagagggacttgggggtcttcccagcaacatcagctctgtcagctccttgctgctcttcaacaccaccgagaacctgtacaagaagtatgtcttcctgggaaccccctggctggggctgtaacaaagaaccatgtgatgctggggggcaaagacagagggagaaactgtttgatgcccccttgtccatcagcaagagagagcacctggaacagcagggcccagagaactactttctatgtgccaaaccctgggccagggggcctgagattgatgttcccggcctaacctggcctgaccctgcccgggcattgccaacgacctcatgtacagtgcccgactgggcccccggcatttgccccctctgccccctggcaccattccgggaactgcccacccttccacactggagggtagcccgagcctcctcaggccagaacctacaaagatgggggtactaacagccttccaggaaa

SEQ ID NO: 72068 - DNA, 1246 bp, Homo Sapiens
ccaggtctggcaacatagaaatagttctctgagacctgctgttccagctgctctctcttgctgatggacaagggggcatcaaacagcttctcctcgtctctgcccccagcatcacatgggtctttgttacagcaccagccagggggtccaggaagacatacttcttctaccatgtgtctgatgccctgggtcccacactaagccaggcacgggcctaccgcccacacccctcggccctgccttctggccatacaggttctcggtggtgttgaaagagcagcaaggagctgacagagctgatgttgctgggaagaccacccaagtccctcttctgcatcgtcctcgggcctccagccattggtgcatcacagcaacaacaggaaagtccttcagcattctcctgggagggctgcagggcccagctcgtcacagggggcggtgcttgctctggatcctgtggcagggggcagtctcatgcaggccagggtcactgggcgcccgtgaagatggagccatattcctgcaggcgccctggagcagggtacttggcactggagaacaccttgatggccttcttgctgcccttgatcttctcaatcttggcctgggccaaggagaccttctctccaatggcctgcacctggctccggctctgctctacctgctgcttccatcctccctggtgcggggtgggcccagtgatatcagctgcctgctgttccccagatgtgccaagtgcattcttgtgtgcttgcatctcatggaacgccatttccccagacatccctgtggctggctcctgatgcccgaggcccaagtgtctgatgctttaaggcacatcaccccactcatgcttttccatgttctttggccgcagcaaggccgctctcactgctgaagatgtctccagagaccttctgcaggtactgcagggcatccgccatctgctggacggcctcctctcgccgcaggtctggctggatgaagggcacggcataggtctgacctgccagggagtgctgcatcctcacaggagtcatggtgcctgtggctcggagccggagcgtcagagccacccacgaccaccggcacgcccccaccacagggcagcgtggtgttgagacaacacagccctcatcccaactatgcacatagcttcagcctgcacagataggggagtagggtacagagcatttgctgagaggccaggagcgcatagatggactctgctgatgccatacgactg

SEQ ID NO: 72069 - DNA, 955 bp, Homo Sapiens
aaggctaggtacgaggcctgggtggtgaattcggcacgaggttcagcttcactgctgtgtctcccaatgtaaccctaacatccagaagtggcacaaaacccctctgctggctcatgtgtgcaactgagactgtcagagcatggctagctcaggagtccagctctgcagggtgggggctagagaggaagcagggagtatctgcacacaggatgcccgcgctcaggtggttgcagaagtcagtgcccaggcccccacacacagtctccaaaggtccggcctccccagcgcagggctcctcgtttgaggggaggtgacttccctcccagcaggctcttggacacagtaagcttccccagccctgcctgagcagcctttcctccttgccctgttccccacctcccggctccagtccaggagctcccagggaagtggttgacccctccggtggctgggccactctgctagagtccatccgccaagctgggggcatcggcaaggccaagctgcgcagcatgaaggagcgaaagctggagaagaagcagcagaaggagcaggagcaaggtgagcgggccctggagcttgcagtcggagggccttgggcaagatcgcctcctcccctccagccctgagtccaccgggtgctttctgccacccctgctcttgccagctggcccctgcttcccctagggcacatgctggaagccctgggccgccacagaggtcctccagccctcctgcctgggctatggctccttcctggtttgggaagccatagttggagctttccttctctaaagctcagccagtcaaaactggacagggagaatcttcttcgaatggcaagagcggtccaagaaatggtcagccactggaggctcctgagatattttaaacgactggacctgaaggcctggagggtactggaaatgctggtggtaagcgaaacctggttggg

SEQ ID NO: 72070 - DNA, 1491 bp, Homo Sapiens
  misc_feature (665)..(696): n is a, c, g, or t
cagaaagagaagaaaacaacggcaggggccggggtatcggacgagggagctccgggagggcggtcgcaggtgttctccagtgccaagtaccctgctccagagcacctgcaggaatatggctccatcttcacgggcgcccaggaccctggcctgcagagacgcccccgccacaggatccagagcaagcaccgccccctggacgagcgggccctgcagccctcccaggagaagctgaaggaatttcctgtgtgcgtgagcaccaagccggagcccgaggacgatgcagaagagggacttgggggtcttcccagcaacatcagctctgtcagctccttgctgcttttcaacaccaccgagaacctgtatggccagaaggcagggccgaggggtgtgggcggtaggcccggcctggcttagtggggacccaggcatcagacacaggtcccagagaactatttctatgtgccagacctgggccaggtgcctgagattgatgttccatcctacctgcctgacctgcccggcattgccaacgacctcatgtacattgccgacctgggccccggcattgccccctctgcccctggcaccattccagaactgcccaccttccacactgaggtagccgagcctctcaaggcagacctacaagatggggtactaannnnnnnnnnnnnnnnnnnnnnnnnnnnnnnngctcctgaggtgctggccagtgcacccccactcccaccctcaaccgcggcccctgtaggccaaggcgccaggcaggacgacagcagcagcagcgcgtctccttcagtccagggagctcccagggaagtggtcgacccctccggtggccgggccactctgctagagtccatccgccaagctgggggcatcggcaaggccaagctgcgcagcatgaaggagcgaaagctggagaagaagaagcagaaggagcaggagcaagtgagagccacgagccaaggtgggcacttgatgtcggatctcttcaacaagctggtcatgaggcgcaagggcatctctgggaaaggacctggggctggtgaggggcccggaggagcctttgcccgcgtgtcagactccatccctcctctgccgccaccgcagcagccacaggcagaggaggacgaggacgactgggaatcctagggggctccatgacaccttcccccccagacccagacttgggccgttgctctgacatggacacagccaggacaagctgctcagacctgcttccctgggagggggtgacggaaccagcactgtgtggagaccagcttcaaggagcggaaggctggcttgaggccacacagctggggcggggacttctgtctgcctgtgctccatggggggacggctccacccagcctgcgccactgtgttcttaagaggcttccagagaaaacggcacaccaatcaataaagaactgagcagaaaccaacagtgtgcttttaataaaggacctctagctgtgcagg

SEQ ID NO: 72071 - DNA, 451 bp, Homo Sapiens
gggagcggcggcgggagcttccgggagggcggctcgcaggcaccatgactcctgtgaggatgcagcactccctggcaggtcagacctatgccgtgcccctcatccagccagacctgcggcgagaggaggccgtccagcagatggcggatgccctgcagtacctgcagaaggtctctggagacatcttcagcagccaacaaatatttacccagcagtgctcgtgtgcaaggcagtgtgggaatctctatatatccagccacggataaggcaacatacctctccacctggagcgcacattctggcaggagagaaagacctaaataagcaatagatgattagttctgcaataacagtggtgacaagatctattgataatattttgtaatcactaatattcatataaaccgtgcaccacccggcaatggagcacggcgaaagaaaaaatgcttgt

SEQ ID NO: 72072 - DNA, 1795 bp, Homo Sapiens
  misc_feature (1518)..(1555): n is a, c, g, or t
  misc_feature (1681)..(1755): n is a, c, g, or t
acgatatctgtagtttgcgtctggcttctctatttaattcttaaaggggggtgggaactaagcagatcacaagggagctacccacagaggtaaagacaaggtcaggtaggctgagagacgcaggaaagcgggtcaaggtgtagggctggagggcaggggcgggccctgggcctgggctgggggtcctgccccggggcgcacccaggcgagggctgcccggaggagccgaggctggcggacagctggccctgagcttgaggggaaggcagcgatgggacaaaggacggaggtctaggaagagggtctgcagagcagaaagcacgggtaggggcggcctgacgctcggaagacaacggatgggagccgtgtgcacgtcgggagctcggagtgagcgtgagttccgtgcccaggcccgcgactcggcccgacaggacagcgctccgggtcgacggggtcctggagccgcgctcggggagggcgcggcggagggcgagcggcggcgttaggacccggaggcgcgggcggactgtgggtggcggggctaggacccagcggctccggcagggcggaagcggggcgggagcttccgggagggcggctcgcaggcaccatgactcctgtgaggatgcagcactccctggcaggtcagacctatgccgtgcccctcatccagccagacctgcggcgagaggaggccgtccagcagatggcggatgccctgcagtacctgcagaaggtctctggagacatcttcagcaggatctcccagcgggtagagcagagccggagccaggtgcaggccattggagagaaggtctccttggcccaggccaagattgagaagatcaagggcagcaagaaggccatcaaggtgttctccagtgccaagtaccctgctccagagcgcctgcaggaatatggctccatcttcacgggcgcccaggaccctggcctgcagagacgcccccgccacaggatccagagcaagcaccgccccctggacgagcgggccctgcaggagaagctgaagtactttcccgtgtgcgtgagcaccaagccggagcccgaggacgatgcagaagagggacttgggggtcttcccagcaacatcagctctgtcagctccttgctgctcttcaacaccaccgagaacctgtacaagaagtatgtcttcctggaccccctggctggtgctgtaacaaagacccatgtgatgctgggggcagagacagaggagaagctgtttgatgcccccttgtccatcagcaagagagagcagctggaacagcaggtcccagagaactacttctatgtgccagacctgggccaggtgcctgagattgatgttccatcctacctgcctgacctgcccggcattgccaacgacctcatgtacagtgccgacctgggccccggcattgccccctctgcccctggcaccattccagaactgcccaccttccacactgaggtagccgagcctctcaaggcagacctacaagatggggtactaacagnnnnnnnnnnnnnnnnnnnnnnnnnnnnnnnnnnnnnnagctcctgaggtgctggcccgtggatccccactcccacccctcaacggcggccccctggaaggcccaggcggccagggcaaggaacaacaagcaggcagccaagcggcggtcctccctttcagtcnnnnnnnnnnnnnnnnnnnnnnnnnnnnnnnnnnnnnnnnnnnnnnnnnnnnnnnnnnnnnnnnnnnnnnnnnnntcttgggctttaagaagggttcccaattccccggccccat

SEQ ID NO: 72073 - DNA, 1076 bp, Homo Sapiens
ggagcttccgggagggcggctcgcgggcaccatgactcctgtgaggatgcagcactccctggcaggtcagacctatgccgtgcccctcatccagccagacctgcggtgagaggaggccgtccagcagatggcagatgccctgcagtacctgcagaaggtctctggagacatcttcagcaggtagagcagagccggagccaggtgcaggccattggagagaaggtctccttggcccaggccaagattgagaagatcaagggaagcaagaaggccatcaaggtgttctccagtgccaagtaccctgctccagagcgcctgcaggaatatggctccatcttcacgggcgcccaggaccctggcctgcagagacgcccccgccacaggatccagagcaagcaccgcccctggacgagcgggccctgcaggagaagctgaaggactttcctgtgtgcgtgagcaccaagccggagcccgaggacgatgcagaagagggacttgggggtcttcccagcaacatcagctctgtcagctccttgctgctcttcaacaccaccgagaacctgtatggccagaaggcagggccgaggggtgtgggcgggaggcccggcctggcttagtggggacccagggcatcagacacaggtacagcacataggccaggagccagggggtgactggggtggctcggctcgggaggcctgggaccccacagtgcacagctgtgcccctgatgatgtgggagaggaaacattgggctcaggaacagcagggtgtcagcttgcctgaccccatgtcgcatccgtaggtaccaagaagtatgtctacctggacccctggctggtgctgtaacaaagaccatgtgatgctgggggcagagacagaggagaagctgttgatgcccccatgtccatcagccacgagagagcaagctggaaccagccgggtcccagagacactacttcatatgtgccagcactggggcagggtgcctgagattgatgtcaccatcctacctgcctgaactgtacggcattggcaatgactcatggtactgcgaccctggccccggatggccc

SEQ ID NO: 72074 - DNA, 426 bp, Homo Sapiens
gcggcccctactactactatacggctgcgagaagacgacagaaggggcaggagcaagtgagagccacgagccaaggtgggcacttgatgtcggatctcttcaacaagctggtcatgaggcgcaagggcatctctgggaaaggacctggggctggtgaggggcccggaggagcctttgcccgcgtgtcagactccatccctcctctgccgccaccgcagcagccacaggcagaggaggacgaggacgactgggaatcgtagggggctccatgacaccttcccccccagacccagacttgggccattgctctgacatggacacagccaggacaagctgctcagacctacttccctgggagggggtgacggaaccagcactgtgcggagaccagcttcaaggagcggaaggctggcctgaggccacaca

SEQ ID NO: 72075 - DNA, 575 bp, Homo Sapiens
ggcgtccggggcctgcggtcagagtccgttctaggatatctcctgccccaaaagagcagagactcatttctttggaatcacaggacactgagtgagaggaaagaaaaagaaaagaaatatgcaccatgactcctgtgaggatgcagcactccctggcaggtcagacctatgccgtgcccctcatccagccagacctgcggcgagaggaggccgtccagcagatggcggatgccctgcagtacctgcagaaggtctctggagacatcttcagcagcctcctcttctgtcaccaactgggaacccacctcttcctgaaagtcctcccccactgactcaccggcttgccccaagcttgtcaagaatgtcccagtaaccaggtggcacgcactgaagtgactgaggggttaccttggagttgatgccttggctcagatccagctcccctgttttcttcttctgtaaccttggacaacccaacccctctaagcctcagtgttctcatttgtgaagttgtggtaataatggtagcttcctggtagaattattgtaaatattaaattaatcaaaacatgaaa

SEQ ID NO: 72076 - DNA, 1237 bp, Homo Sapiens
cagtcgacggtaccggacatatgcccgggaattcggccattacggccgggcaccagattcagggagactgaccaccaagggatagtgtaaaaggacattttctcagttgggtccatcagcagtttttcttcctgcatttattgttgaaaactattgtttcatttcttcttttataggccttattactgcttaatccaaatgtgtaccattggtgagacacatacaatgctctgaatacactacgaatttgtattaaacacatcagaatatttccaaatacaacatagtatagtcctgaatatgtacttttaacacaagagagactattcaataaaaactcactgggtctttcatgtctttaagctaagtaagtgttcagaaggttcttttttatattgtcctccacctccatcattttcaataaaagatagggcttttgctcccttgttcttggagggaccattattacatctctgaactacctttgtatccaacatgttttaaatccttaaatgaattgctttctcccaaaaaaagcacaatataaagaaacacaagatttaattatttttctacttggggggaaaaaagtcctcatgtagaagcacccacttttgcaatgttgttctaagctatctatctaactctcagcccatgataaagttccttaagctggtgattcctaatcaaggacaagccaccctagtgtctcatgtttgtatttggtcccagttgggtacattttaaaatcctgattttggagacttaaaaccaggttaatggctaagaatgggtaacatgactcttgttggattgttattttttgtttgcaatggggaatttataagaagcatcaagtctctttcttaccaaagtcttgttaggtggtttatagttcttttggctaacaaatcattttggaaataaagattttttactacaaaaatgaaatttgtttggacttccacttgagacagtaaagagagtattagacacccagtaaaaactgccatataaagaagttgtaattgtttgttgtgtatgtatttttttcaatgccaaaccagctgtgatccaatttacatccacattttaggtccaacagcaagaagttcagagagagatttcccaaccagacattgggtcactcactggtcaccttgccagtgcattttattagaagggaatctgttgtagcaaatgggaataaacctgggtttctatagacccagaactg

SEQ ID NO: 72077 - DNA, 1884 bp, Homo Sapiens
  misc_feature (126)..(137): n is a, c, g, or t
  misc_feature (649)..(714): n is a, c, g, or t
  misc_feature (1425)..(1425): n is a, c, g, or t
  misc_feature (1431)..(1431): n is a, c, g, or t
ctaccttaggtctgtgcagaaaacgccgcatgactagagcgaggaatacaacaatcttatcgaataacggcgggagggcggctggtcccctctttctctccccggggcccaatcttgtgttaaaannnnnnnnnnnntgggcaccaattttattgatcagccggtgttgagctggcccaggggctgggcggtctttccaggcgaagccagttgatgcaaggggcccccctggaatttcgagaccgcgctgaacacgttcttccaagaaaccaacattcccaacagccaccaccaccaccagatgatgtgcactcccagcaacacccctgccacgccgcccaacttccccgatgcgctggccatgttctccaagctccgcgcctccgagggcctgcagagcagcaacagccccatgacagccgcagcctgctccccacctgcaaacttcagccccttctgggcctcgtccccgcccagccaccaggcgccctggatcccgccctcctcccccaccaccttccaccacctccaccgcccacagcccacgtggcccccaggagcacagcaggggggcgcccagcagaaagccatggcggccatggacggccagagatgagactggacgccgccgggcgctgggctggagctnnnnnnnnnnnnnnnnnnnnnnnnnnnnnnnnnnnnnnnnnnnnnnnnnnnnnnnnnnnnnnnnnntttcccgaagatcgcactggaagattttataaaagaatttttgtgggtcggggggacagtaaacttcctgggccacgtgggtccttcaggagtttttcaggcaagtttttcctctgtttttaatatataactataatatatatgaatagataaatataactaatgtgcgtgagaatgggcctggcacacctggggtgctcgggggtagggctgccatgctgcagagctgatggagtgatgttgtgggcacaaggcatctgtcagctgcctcctttaacagccatgccttctggaatctggaagaggacaccactcctgcagtcactgggcagccacatagcagctgcaggtcccaggagggcctgaggtcaaagctgtggaaggccctcttggtatcagggctctctccccatggcctcttccccacctctgattgctggttgtggccccatagctcatcacccctgtctcctgctgaatgtgcagggctgatgtggcactgaggagctgactttggtcaaaggccaggctctgcccagcaggggacttgactgccctgggcgccctgcccctcccgctgcgtgtccaggtccaaagtggagagcctgcctttgggtttagttcccgaatcagaatcccatctcaccagggcgaaattttaatttaaaaacttaaaaagagacttttatacccgagcaaccccgacgaagnaaaccntcccttggtcggccgccctcggccctcgaaaaacttttctaaaaccattccttttggccgggcgggccccaggtagggtaagtggaacatggcccatagcctgttttccctaggaagatccctgggtacatggactaatggctttgggaattcctcacccaaataaaaaaacgccccggggggggaaaaccgaagcggttcttgaaccaaattcccggattggaagttccctgaagggccatttactgggaatcctattccacaggggaagtcccaaagccagagccttggattattcaaaatttaacggcccccgggcccctggccacttccatttcggaaaatacctggggtgggaaatttccctttaaaggccttttcctgggcgcgactctggggaaagccccttccaccaaaaggggggatagtggatgaaaacccctgaaaatcccg

SEQ ID NO: 72078 - DNA, 1950 bp, Homo Sapiens
aaacttaggtaggtacgaggctgggttttgaattcggcacgaggctgcttcctgcttcccagaggccgggatccggagccgcccgaagccggtgccgcagccccctgcgcccccggtgcccccgacatgtccttccgcaaagtggtccggcagagcaaattccggcatgtgttcgggcagccggtcaagaacgaccagtgctatgaggacattcgcgtgtcccgtgttacctgggacagcaccttctgcgccgtcaaccccaagttcctggcggtgattgtggaggccagtggagggggtgcctttctggtgctccccctaagcaagacgggccgcattgacaaggcctacccgacggtgtgtgggcacacgggacctgtcctggacatcgactggtgtcctcacaacgacgaagtcatagccagcggctcggaggactgcacggtcatggtgtggcagatcccagagaacgggctgacctccccgctgacagagccggtggtggtactggaggggcacaccaagcgagtgggcatcatcgcctggcaccccacggcccgaaacgtgctgctcagtgcaggctgcgacaacgtggtactcatctggaatgtgggcacagcggaggagctgtaccgcctggacagcctgcaccctgacctcatctacaatgtcagctggaaccacaatggcagcctgttttgctcagcatgcaaggacaagagcgtgcgcatcatcgacccccgtcggggcaccctggtggcagagcgggagaaggctcatgagggggcccggcccatgcgggccatcttcctggcagatggcaaggtgttcaccacaggcttcagccgaatgagcgagcggcagctggcgctctgggacccagaaaacctcgaggaacccatggccctgcaggaactggactcgagcaacggggccctgctgcccttctacgaccccgacaccagtgtggtctacgtctgcggcaagggtgactccagcatccggtactttgagatcacagaggagcctccctacatccacttcctgaacacgttcaccagcaaggagccgcagcggggtatgggcagcatgcccaagcggggcctggaggtcagcaagtgcgagatcgcccggttctacaaactgcatgagcgcaagtgtgagcccatcgtcatgactgtgccaagaaagtcggacctcttccaggatgatctgtaccccgacacagccgggcccgaggcagccctggaggctgaggagtgggtgagcgggcgggatgccgacccgatcctcatctcactgcgggaggcctacgtgcccagcaagcagcgggacctgaagatcagccggcgcaacgtgttgtctgacagccggcccgccatggccccgggctcctcccacctaggggcccccgcctccaccaccactgctgctgatgccacccccagcggcagcctggccagagccggggaggctgggaagctggaggaggtgatgcaggagctgcgggccctgagggcgctggtcaaggagcagggcgaccgcatctgccgcctggaggagcagctgggccgcatggagaacggggatgcgtagggccacagccacacgccaccttcatctcctccgccgcccccttcccactcagcttctgccagcgggtcgcaccgggctagctggctgcccagagcctctgaggcagcgcaggggtcagttcccacccccacccgtcccaggcccaggccgaagccagcgcccagctttcctcactgttcctgtggaggatgtctacgcccaggcgagctcctcgacctctgagggaccatctccccgaccactgcccagccctctgctccctccccagaggaggcgggagggtgggctctatattttcattccaaataaaattctctttctaaaaaatgccaacagacaataaacaaacacggg

SEQ ID NO: 72079 - DNA, 956 bp, Homo Sapiens
atgccattatgaggagcaagaacgcgaaggggcctcgggtccgctaggccgggatccggagccgcccgaagccggtgccgcagccccctgcgcccccggtgcccccgacatgtccttccgcaaagtggtccggcagagcaaattccggcatgtgttcgggcagccggtcaagaacgaccagtgctatgaggacattcgcgtgtcccgtgttacctgggacagcaccttctgcgccgtcaaccccaagttcctggcggtgattgtggaggccagtggagggggtgcctttctggtgctccccctaagcaagacgggccgcattgacaaggcctacccgacggtgtgtgggcacacgggacctgtcctggacatcgactggtgtcctcacaacgacgaagtcatagccagcggctcggaggactgcacggtcatggtgtggcagatcccagagaacgggctgacctccccgctgacagagccggtggtggtactggaggggcacaccaagcgagtgggcatcatcgcctggcaccccacggcccgaaacgtgctgctcagtgcaggctgcgacaacgtggtactcatctggaatgtgggcacagcggaggagctgtaccgcctggacagcctgcaccctgacctcatctacaatgtcagctggaaccacaatggcagcctgttttgctcagcatgcaaggacaagagcgtgcgcatcatcgacccccgtcggggcaccctggtggcagagcgggagaaggctcatgagggggcccgggcccatgcgggccatctttcctggcagatgggcaagtgtttcaccacaggccttcaacccaaatgagcgaagcggcagccgggcgcctctgggaacccaaaaaaaccttcgagggaaacccatgggccctgcaggaaactgggactcgagcaaacgggggcccctgctgcccccttctaca

SEQ ID NO: 72080 - DNA, 840 bp, Homo Sapiens
  misc_feature (604)..(604): n is a, c, g, or t
  misc_feature (612)..(612): n is a, c, g, or t
  misc_feature (630)..(630): n is a, c, g, or t
  misc_feature (675)..(675): n is a, c, g, or t
  misc_feature (814)..(814): n is a, c, g, or t
tgggggaggatgactggagtctggagtatcctatcctacatggcctgggaatgtttgttctcatgctctgcctggcagttaattgttcacaagtgtccccataagtaactgtcgagaagattctcataggagaccacgtgggttgcctgaagaagccagagtgaaggagggttgaaatcaacgcctttagagtcttaggaataaaagttaaaaagccccagagaaatgttgtcctttgtccacggcacctgcactaacccctcccagaaagtgggcatgcagtttcccaggccaggcgagtgttcgttgctcaccgaagaccagtgtttactagcaggattgtcgccagaagcagctgcattctccccggatgcagacctgcccgttggtagggactctgctcacacggaacatggacggttacacctgtgccgtggtgacgtccaccagcttctggatcatctcggcgtgggtgttgtggaagggcacccatccacctccatgccacgatgcccgagacgccactccggatttgtgctgcacaagatgccagcattttttcttccctaatgacgacgggagggctgagtccagctgatctcangtgcctgnagggtcgatgcttctcangtatgatgtggcacaatgatacagatgtaatgcgaggcaggcaanctcccagtagacacacatgacgaatcactcactccagcataatccgtgcgtttgcctcaactctgattacatcactctgccacacgatcatgtaatcagactctccacaaatctcagggacatgtgatactctgctganatgcacaatctcgaccagccattgat

SEQ ID NO: 72081 - DNA, 1417 bp, Homo Sapiens
  misc_feature (452)..(490): n is a, c, g, or t
cctcctgtataaaaaaaattcttttctatattcttatcactccctttcgccctaatatacattttttccaacccctcatctactattaatatcgattattgttttctactaccccttttagtacctctccttctaatgtgtcatttacagtatcacccccatcgaccccttcttaaacatttcctgttgagagatacttgttttcccccaacaattatcgtgtccccttccccccctacacttttgtgggctctctctctcacaagtgtcctgcactgtgcgcggttgtccccgctcgccgcgcgtctgttgttttcgctgcggcccggtgcctctgctctgttttaattggccctctctttggggcccccttttaccaaaaacctctggtgttcgctaacttttgggccctccccggcgggtcttttatgcgcgccgcccccccttgttgnnnnnnnnnnnnnnnnnnnnnnnnnnnnnnnnnnnnnnnaaaacttaagagttgtttatttctgaaatttttcatttagtattttcggtctgcagttggctatgagtaactgaaaccatgagtaacagaaaccatggatgggggaggatgactggagtctggagtatcctatcctacatggcctgggaatgtttgttctcatgctctgcctggcagttaattgttcacaagtgtccccataagtaactgtcgagaagattctcacaggagaccacgtgggttgcctgaagaagccagagtgaaggagggttgaaatcaacgcctttagagtcttaggaataaaagttaaaaagccccagagaaatgttgtcctttgtccacggcacctgcactaacccctcccagaaagtgggcatgcagtttcccaggccaggcgagtgttcgttgctcaccgaagaccagtgtttactagcaggattgtcgccagaagcagctgcattctccccggatgcagacctgcccgttggtagggactctgctcacacggaacatggacggttacacctgtgccgtggtgacgtccaccagcttctggatcatctcggcgtgggtgttgtggaagggcagcccatccacctccatgcccacgatgcccgagacgccactccggactttgtgctgcaccaagatgcccagcattttttcttccttaatgaccgacgggagggcctgagtccaggcctgatctccaggtgccctggagggtccgactgctttcctcaggtactgactgtggacagcacatgagtacaggatgtagagtgcgcaggccagggcatagcctccccagttagaaacaccagcaatgacggcaaagtcagcctccacgtcgcaggcgatgacatccccgtgccgtatgtgcccggacgcgtggtcgacgatatcccgggaattccggaccggtcc

SEQ ID NO: 72082 - DNA, 940 bp, Homo Sapiens
ccaatactcccatttggttttactggcggcatttgattgtattgatgatactaagcttgtgaagcagataatcatatcagaaattatcagttcattgcctagcatagtaaatgacaaatatggaaggaaggtcctattgtacttactaagccccagagatcctgcacatacagtacgagaaatcattgaagttctgcaaaaaggagatggaaatgcacacagtaagaaagatacagaggtccgcagacgggagctcctagaatccatttctccagctttgttaagctacctgcaagaacacgcccaagaagtggtgctagataagtctgcgtgtgtgttggtgtctgacattctgggatctgccactggagacgttcagcctaccatgaatgccatcgccagcttggcagcaacaggactgcatcctggtggcaaggacggagagcttcacattgcagaacatcctgcaggacatctagttctgaagtggttaatagagcaagataaaaagatgaaagaaaatgggagagaaggttgttttgcaaaaacacttgtagagcatgttggtatgaagaacctgaagtcctgggctagtgtaaatcgaggtgccattattctttctagcctcctccagagttgtgacctggaagttgcaaacaaagtcaaagctgcactgaaaagcttgattcctacattggaaaaaaccaaaagcaccagcaaaggaatagaaattctacttgaaaaactgagcacataggtggaaagagttaagagcaagatggaatgattttttctgttctctgttctgtttcccaatgcagaaaagaaggggtagggtccaccatactggtaattggggtactctgtatatgtgtttcttctttgtatacgaatctatttatataaattgtttttttaaatggtcttttttaaaaatctc

SEQ ID NO: 72083 - DNA, 1382 bp, Homo Sapiens
  misc_feature (621)..(629): n is a, c, g, or t
taggtagcgaggcctgggtggcgaattcggcacgaggaaaggagacaccaacctggtccgtgtgctccaaggggatgagtccattgtcaactgcctgcagccacaccccagctactgcttcctggccaccagtggcatcgatcctgttgtgcggctctggaacccccgaccagagagtgaagacctcacaggccgagtcgtggaagatatggagggtgcttcacaggccaaccagcggcgcatgaatgcagacccgttggaggtgatgctgctcaacatgggctaccggatcacgggcctgagcagtgggggtgccggggcctctgatgatgaggacagctctgagggccaggtgcagtgccggcccagctagaccctccagccctggtccccagcccctgctactggctggaccctctgccctgggcaggaggtcaggggattctgttttggtttgtcttccccaccacccttttttttcatttcccctgttttgtttgttagtttggcgttaggggtggaggttgctacaacttgctggctttcggactctgggctgattgtcccctgactatccccagccctgaaaaaaagagcaggaggggacacccctccatatgnnnnnnnnnatctcctgctttcatgtccctggagggctctggcctgcctcaaaaccccttctgcctcaggtggggaggaacaagctgaactgtcttcagggactgtcctgccctttagctggcagcagcaggaggagtgggattccccaattggtaagggctcgccttggcctgttgccactcttgctccctagcctgcaaggctagctcccctgtggtcttcaggaaaggttttgaaaaaggattggtcccaccctccctccagagccaccagtgttagagcggagcccaaaggaaggatgggagccctggagtgggcaagaccaggccacctgctgaggtcgctgtggagcaccctcgctcctctcctggctactagctctggccctgcacctactctcactggccacctctggaggctctgcctttcccaagggccctggcagagggtggggcactgcacttaccccacccatccatgccagcacttctgcactagggccattctcctcttgggcgctcctcagcctccactgtgacctttctcgccagagctcccaggccaggcctactctgctgaggtggcgcttcctgctaaggggcccttttctgccctttttggcctccttcccatccacatgctgagccggcaaaagaccaccgcacgtgggggttttctctggccctggtgctctgggggcgaggctgggccccgggccctccgatggaagcctttcggccctcctccccgagccccttcac

SEQ ID NO: 72084 - DNA, 1280 bp, Homo Sapiens
caaggtagcgaggcctgggtggcgaattcggcacgaggggcaggctggaaggaagacgaacctacgaagcagagatctgaagacagcatgtacacagccattccccagagtggctctccattcccaggctcagtgcaggatccaggcctgcatgtgtggcgggtggagaagctgaagccggtgcctgtggcgcaagagaaccagggcgtcttcttctcgggggactcctacctagtgctgcacaatggcccagaagaggtttcccatctgcacctgtggataggccagcagtcatcccgggatgagcagggggcctgtgccgtgctggctgtgcacctcaacacgctgctgggagagcggcctgtgcagcaccgcgaggtgcagggcaatgagtctgacctcttcatgagctacttcccacggggcctcaagtaccaggaaggtggtgtggagtcagcatttcacaagacctccacaggagccccagctgccatcaagaaactctaccaggtgaaggggaagaagaacatccgtgccaccgagcgggcactgaactgggacagcttcaacactggggactgcttcatcctggacctgggccagaacatcttcgcctggtgtggtggaaagtccaacatcctggaacgcaacaaggcgagggacctggccctggccatccgggacagtgagcgacagggcaaggcccaggtggagattgtcactgatggggaggagcctgctgagatgatccaggtcctgggccccaagcctgctctgaaggagggcaaccctgaggaagacctcacagctgacaaggcaaatgcccaggccgcagctctgtataaggtctctgatgccactggacagatgaacctgaccaaggtggctgactccagcccatttgcccttgaactgctgatatctgatgactgctttgtgctggacaacgggctctgtggcaagatctatatctggaaggggcgaaaagcgaatgagaaggagcggcaggcagccctgcaggtggccgagggcttcatctcgcgcatgcagtacgccccgaacactcaggtggagattctgcctcagggccgtgagagtcccatcttcaagcaatttttcaaggactggaaatgagggtgggcgtcttcctgccccatgctcccctgccccccaccacctgcctgcttgcttctctggctgcctggtcagtgcagaggtgccccctgcagatgttcaataaaggagacaagtgctttcccagctcttttcctgcgaaaaaa

SEQ ID NO: 72085 - DNA, 913 bp, Homo Sapiens
gcctgggtggcgaattcggcacgaggcgcacctccagggggcggggggcggctgagacagcgcccagggcctcggagcaaggcgttggcagatctgaagacagcatgtacacagccattccccagagtggctctccattcccaggctcagtgcaggatccaggcctgcatgtgtggcgggtggagaagctgaagccggtgcctgtggcgcaagagaaccagggcgtcttcttctcgggggactcctacctagtgctgcacaatggcccagaagaggtttcccatctgcacctgtggataggccagcagtcatcccgggatgagcagggggcctgtgccgtgctggctgtgcacctcaacacgctgctgggagagcggcctgtgcagcaccgcgaggtgcagggcaatgagtctgacctcttcatgagctacttcccacggggcctcaagtaccaggaaggtggtgtggagtcagcatttcacaagacctccacaggagccccagctgccatcaagaaactctaccaggtgaaggggaagaagaacatccgtgccaccgagcgggcactgaactgggacagcttcaacactggggactgcttcatcctggacctgggccagaacatcttcgcctggtgtggtggaaagtccaacatcctggaacgcaacaaggcgaaggaactggccctggccatccgggacagtgagcgacagggcaaggcccaggtggagattgtcactgatggggaaggagcctgctgagatgatccagggtcctgggccccaaagcctgctctgaaggagggcaacccctgaaggaagaccctcacacctggaaaaggcaaatggcccaggccgccagcttctggtataaaaggccttctggatgcccactgggaacagaatggaaccct

SEQ ID NO: 72086 - DNA, 1981 bp, Homo Sapiens
  misc_feature (1817)..(1825): n is a, c, g, or t
ttcggcacgagtttgtcgggagattgaaagatgtttttgtttctttctttgtaaaggccttggatattgaaaaaataccaaggcagaacagttggacaatctatttcttgagccaaatttaattattcttatttttgtaatcagtcattggcttcttatctggatgaaggcttttggaggagaaccaaaacgacaagttccaagaagaagatgaagctccgcctccgccgcttagtcccaaccctgcccaggaagaagggcccgtggggctttgcctgtgcccgtccaccaaaggctgtcatgtgtctcgaaatcagcagccctccccatcccaatcccaggcagcttgtgtgtacaatcagcttctctagcaactctgtatctgttggcttcaagagaatattttgcctccacatatgtaccccttctcctttttttaaagatggatttaaaccaagatgcctccaggaaagaggacgaaatgagtatattcacagaggaatccaaaaaatacagtttgggggaaaatgcaataatttttgatgagatgggtgaaggacaagaagtgagttgtgtcaattattgtagatacaattttctgattaaatctggaaaaataaaaggcagcctgttttttctgcttttattgtattaacagctgaggtagctaaagttatttaaaataaaattaaatttatgatccaagtagcttatttttccctttaaatctcagtgtaaatatatttgatttcttgtagaaattgatttccttctgtttaattttatgcttttattatactcttgatttttctaaatttgtgtgtgaaatataacattgattgaattgcagttacatttggttagtaatatttcattattttaataactgtgatgtcatgtatggatttactttggggttcaaatcaaaatgtcactgccagaaagagctgttccagctgatctagagcatactgccctagagtgtccctgggatcatctgaacagaagtgcacaggctacttgtacagagaaaaaattaatactcaaaggaaatcttcattttttagattgactttgggaatttgaattttcatcagtgcaaatataaatttctctatcctgctctgaggctaattggtaccatattttccctttgtgtcttgtgactctgccacatcccatctcatcctggcctctgagtcaagaacccagtgaactgactttctagttctagaagttccgctgcaaggccaggaaagcttgagaaaggtattgtggaagaagcaaaggtagacccccatcactcacctttgtctgcatccctgggcctgtgaatgatgacagcacctgacattctgcaccagctacctctgcctccatggcagagaaaaggccataagaacagtggaagaggagcatggactcagacttcaaggaagaagccatttccccaggtccttccttctgcatctcaccacccctagttacaaataactccattgaacagcatctattcagaaactatgccgaataaaaagattggtggaagggctcatgtggttagcaactatgaaacagaaataggacactcagttacaaacattatctcctttagtttttcagaaaatgcatccctgatttcattcatttccagcttgaaagccagccatattactctagtccctaccaaactgctctagaaggtcatttccattttgtttgtgatatttagacgcgcagacttcaggaagttcacctttaacttcagcattccagatgaagtttcctgactcagtgcttttgcataaggaactagnnnnnnnnngtaaggaaaattggagatgctaacatcctcccccatcccaactgcaccttaaaatatgcatgtcaccttcaaggttttataattgcactgtttgttttatgtatgtacagattaaaattattgctacatttgaggaaaataaattgcttgcttcta

SEQ ID NO: 72087 - DNA, 138 bp, Homo Sapiens
ttaatgattttctttttgttattaatatttttctctgttcctttgttattacttgcatggtttggcgtcagaagtccttacctctttatattgtttgcaggtttaaataaaacagtgtggtgccattttgaaaaaaaa

SEQ ID NO: 72088 - DNA, 456 bp, Homo Sapiens
  misc_feature (325)..(355): n is a, c, g, or t
ctagaaagcataagggtcctgtggtgacagataatgggaattttatcttggactggaagtttgaccgggtacacaaatggagtgaagtgaatacagctatcaaaatgatcccaggtgtggtggacacaggcctattcatcaacatggctgagagagtctactttgggatgcaggatggctcagtgaacatgaggggagaagcctttctgttgaccctgcaaggagcagagtgtgttcaccttgagtctccagcccacagccaaggtggacgtacctctccaggagcctttgccttaatgtatctctgcctggacaacttgtggtnnnnnnnnnnnnnnnnnnnnnnnnnnnnnnntaaatccagtcttatgaagtattgttattaaatgtctttttaaaaagagaaatataaacatatatttttactattaaaatattcagttttttaaatgaaaa

SEQ ID NO: 72089 - DNA, 1955 bp, Homo Sapiens
  misc_feature (1088)..(1115): n is a, c, g, or t
  misc_feature (1256)..(1267): n is a, c, g, or t
  misc_feature (1706)..(1719): n is a, c, g, or t
  misc_feature (1833)..(1890): n is a, c, g, or t
gggggcgggacttcagcggaggccggagcgaggcgtcgggatgcagcgccccgggcccttcagcaccctctacgggcgggtcttggccccgctgcccgggagggccgggggcgcggcctccggcggaggagggaacagctgggacctcccgggttcccacgtgcggctgccggggcgtgcacagtctgggacccgtggcggtgctggcaacacaagcaccagctgcggggactccaacagcatctgcccggccccctccacgatgtccaaggccgaggaggccaagaagctggcgggccgcgcggctgtggagaaccacgtgaggaataaccaagtgctgggaattggaagtggttctacaattgtccatgctgtgcagcgaatagctgaaagggtgaagcaagagaatctgaacctcgtctgtattcccacttccttccaggcccgccagctcatcctgcagtatggcttgaccctcagtgatctggatcgacacccagagatcgaccttgccatcgatggtgctgatgaagtagatgctgatctcaatctcatcaagggtggcggaggctgcctgacccaggagaagattgtggctggctatgctagtcgcttcatcgtgatcgctgatttcaggaaagattcgaagaatctcggggatcagtggcacaagggaatccccatcgaggtcatcccaatggcctatgtcccagtgagccgagctgtgagccagaagtttgggggcgtggttgaacttcgaatggctgtcaacaaggctggtcctgtggtgacagataatgggaattttatcttggactggaagtttgaccgggtacacaaatggagtgaagtgaatacagctatcaaaatgatcccaggtgtggtggacacaggcctattcatcaacatggctgagagagtctactttgggatgcaggatggctcagtgaacatgagggagaagcctttctgttgaccctgcaaggagcagagtgtgttcaccttgagtctccagcccacagccaaggtggacgtacctctccaggagcctttgccttaatgtatctctgcctggacaacttgtggtnnnnnnnnnnnnnnnnnnnnnnnnnnnnagttaaatccagtcttatgaagtattgttattaaatgtctttttaaaaagagaaatataaacatatatttttactattaaaatattcagttttttaaatgaagtagaacttgagttcatgttttatatgaaatatttaccnnnnnnnnnnnntgaggtaaactgtatcttaaaacctttgacttgagtctgctggtaaagcttctgaatattgagtttgctgagaaatcaaaaatcaaaacttctttaagctggtaaagtgaggggcccaccagcagtgatctcctgatgccttactggaaactttgtttacttgtctgctaccctctgatttgtttttagttagtttttattgtgagcacacatagtacctagttacatcttaagatcaggtgtataaaactgtggagtggaggcggtatggtatggaatgacattggaatgtaagctgtcagggaaaaaatgattgttacacctttggctaaaatctggggggttctttcatattcctggctggtggaaccagttgaaccacaaatgcttgccagtactggccaaagcactgttggtgaaatggcgaggtccttgtgannnnnnnnnnnnnnaatgactcttcctctcggaaatacaaattttccccaggcccctcgggtaatagctggcctgggcttggcgggggagagggtctgtagtgcttgttaatgtgtgtggggacgttnnnnnnnnnnnnnnnnnnnnnnnnnnnnnnnnnnnnnnnnnnnnnnnnnnnnnnnnnncgcagtgggagtggcgggtggcatggaggtgcagaggagagaggcgagttagagagggcgcggta

SEQ ID NO: 72090 - DNA, 561 bp, Homo Sapiens
gtatcataaaatttagatgacttttgtgggttacatttttatccatatatttgaactaacagaacttggcagaatgtgtgttgaatattctttacatttaacaattaaaaacaagtaaaactgaatagcaaatagtttattggtaagtacacggtttcaacgggagtaataaattcacatgaaaaggagacaataatcaagtcaaaagaataaatgcttactaatcatcagaaaatctgtggccattagggctggcacgtaaaaatccaaaatcactcagaggccaaatctgtaaaatcaaaatgaggttgaagacaattagtgaaagtaatgttatagtatcatcatattcccttttgctatctgtcccttttctctatgccagataaacactttctccttactcatcaatcaagaataaaattttctacatcaaagtaagacttgagaaaataaacttatgtgtatatatgtttaaactccaaagtttgggacattcaaacaatgtacatgaaattatatgtgtgtggtgtgtgaataaatatgtatgaatataaaaaa

SEQ ID NO: 72091 - DNA, 705 bp, Homo Sapiens
  misc_feature (109)..(122): n is a, c, g, or t
  misc_feature (131)..(250): n is a, c, g, or t
gggggaatccaaccctattccttgccccggtttttttgggaaacgggaaggcccagttccctttcctttttgggcccgggccccaaacaaagggtttaaaaaatttttnnnnnnnnnnnnnnccccccaannnnnnnnnnnnnnnnnnnnnnnnnnnnnnnnnnnnnnnnnnnnnnnnnnnnnnnnnnnnnnnnnnnnnnnnnnnnnnnnnnnnnnnnnnnnnnnnnnnnnnnnnnnnnnnnnnnnnnnngaatagcaaatagtttattggtaagtacacggtttcaacgggagtaataaattcacatgaaaaggagacaataatcaagtcaaaagaataaatgcttactaatcatcagaaaatctgtggccattagggctggcacgtaaaaatccaaaatcactcagaggccaaatcttaaagaagattcgtcctcttattagtccatatggaataggtccatagcacctggaatctgtagaattctgtagattgtcaccttctaaccaaacatgacccattggcacataactatggcttttaaagaaatctgatggactagtggtgaggattttgtctccttccaaaccaattactcttttacaaatatttgattttggatcacttgggctttttgcaatcacaatgtcacctctcgggccccaaagaaccctggagaccctcaaccaggacacaggtgggcc

SEQ ID NO: 72092 - DNA, 895 bp, Homo Sapiens
  misc_feature (186)..(202): n is a, c, g, or t
tgccgtgtttacagttttttgtacactgtaccttcattggttcctgtgctgtagtaaatgtgttaggtagctgtggactccttggtattttgtaaatggtataacataacttggtccccctctgggtccttgagttttctgtgtatcatgtgaaaaaaaatggtgacatacatacagaattttacnnnnnnnnnnnnnnnnnggcatcagtttttttaaaaatgggggaatgtactattaaatggggatcttcctggtctactatcattaggacaagtaacaagctaaaaatgaagtctcttgaatctttccatccccaacttgcccacaaagctgtgggtggtttctggtacttaaagcactaatattatgttgctgctctgcgaacagcccagtagtcccatttccttccacaccaaaaagtgttaaatcaagtatgcaaatggagtccttacaactggagtttatgttgtcttgccctttttttagcacaaaaaaaattgtacttttttattgtcgaattgtttaaaagacttcattctttacttgttcttacgaaaaggatataagggagaagaatgcagtaattgctgtacgtgtatcatcattccagtttctaaaaacagccagccagcttttttccttttaagattctccagaaggctgcaaggccagaaccacaaatatcgggtgccttcctttggaaatatttgacctctcttctgtgaagagaatggtacttaacagactactactagtgctttgtcagtaccgaagtctgaatgcccagtccaatggcatacattatccttaaggtttttaatcccacctggaaaaattgtgatagaattctcacaaaataaacccagggcattacatgttgacaaactaaaaa

SEQ ID NO: 72093 - DNA, 541 bp, Homo Sapiens
gcggccgccgcgcagcccgagcacaagcagcagaagctgtggcacctcttccagaactcggccaccgccgtggcccagctctacaaagaccgagtgtgtcagcagccaggactttctctctgggtccccttccaaaacgcagccaccgccgtcaccaatctctacaaagaaagcgtggatacccatcaacgaagttttgatattggaattcagattggctatcagcgacgcaataaggatgtgttggcttgggttaaaaaacgcagaagaactattcgtcgagaagatttgatcagcttcctgtgtggaaaagttcctccaccacgaaactctagagctcccccaagactgactgtagtgtcccctaaccgagctacttcaacggaaactagctcatctgtagagactgatttgcaacccttccgggaagccatagctctgcatggtcttagtggtgcaatggctagtataagcgtgcgttcgagtaccccaggctctcctacacatgtaagcagtggatcgaatgctagtcgaaggagaa

SEQ ID NO: 72094 - DNA, 539 bp, Homo Sapiens
  misc_feature (315)..(315): n is a, c, g, or t
aagcaaaaacaaaccaacaacaaaagcccctgactgtccgtcaagcaggcagcggggatgtagctctctctgccctgggcaagaatagcacttcccgttaaaagccagcagccggcgtcagtccctatcagagccagctagatcatgcactgttgaccactgagcaatctgtgttacactagagttcacagggcattttgagtgtagacgtgagtgcttaaacatatttgggtttctctctcaggttttaaatgtttcaaatgtaattgttgctcatcagtgcagttatcaatggcaattttatattccttgaanggggagaaagaggggttcttattgtacatgtccaaggggggtggataagagtattatctgtttaatttaattggaacaaaccattgtcttaacgcagccatggtttgaatttgttatcttgggctgaccggtgcatgtaaatacagtatgctctttggatgtaaatcttagaaatgcagtgtgaatgtaggttatcattaataaaacattaaccccagtaaact

SEQ ID NO: 72095 - DNA, 1206 bp, Homo Sapiens
caataatgataaccagagagtgatttcatttacactcatagtagtataaaaagagatacatttccctcttaggcccctgggagaagagcagcttagatttccctactggcaaggtttttaaaaatgaggtaaatgccgtatatgatcaattaccttaattggccaagaaaatgcttcaggtgtctaggggtatcctctgcaacacttgcagaacaaaggtcaataagatccttgcctatgaatacccctcccttttgcgctgttaaatttgcaatgagaagcaaatttacagtaccataactaataaagcagggtacagatataaactactgcatcttttctataaaactgtgattaagaattctacctctcctgtatggctgttactgtactgtactctctgactccttacctaacaatgaatttgttacataatcttctacatgtatgatttgtgccactgatcttaaacctatgattcagtaacttcttaccatataaaaacgataattgctttatttggaaaagaatttaggaatactaaggacaattatttttatagacaaagtaaaaagacagatatttaagaggcataaccaaaaaagcaaaacttgtaaacagagtaaaaaatctttaatatttctaaagacatactgtttatctgcttcatatgctttttttaatttcactattccatttctaaattaaagttatgctaaattgagtaagctgtttatcacttaacagctcattttgtctttttcaatatacaaattttaaaaatactacaatatttaactaaggcccaaccgatttccataatgtagcagttaccgtgttcacctcacactaaggcctagagtttgctctgatatgcatttggatgattaatgttatgctgttctttcatgtgaatgtcaagacatggagggtgtttgtaattttatggtaaaattaatccttcttacacataatggtgtcttaaaattgacaaaaaatgagcacttacaattgtatgtctcctcaaatgaaaattctttatctgaaattttaaaagacattgattccgcatgtaaggatttttcatctgaagtacaataatgcacaatcagtgttgctcaaactgctttatacttataaacagccatcttaaataagcaacgtattgtgagtactgatatgtatataataaaaattaacaagaaa

SEQ ID NO: 72096 - DNA, 1555 bp, Homo Sapiens
gctaggtacaggctggtggctgaattcggcacgaggggacggccagccccttccgacggagcaacacgatgccccccaaccttggcaatgcaggctgctgggccgaatgctggatgagaaaacccctccctcaccctcaggacaacctgaggagccggggatggtgcgcctggtgtgtggacaccataattggatcgctgtggcctatacccagtttctagtctgctacaggttgaaggaagcctctggctggcagctggtgttttccagcccccgcctggactggcccatcgaacgactggcgctcacagcccgggtgcatggtggggctttgggtgaacatgacaagatggtggcagcagccaccggcagcgagatcctgctatgggctctgcaggcggaaggcggtggctccgagataggggtctttcatctgggggtgcctgtggaggccttgttcttcgtcgggaaccagctcattgctacaagccacacagggcgcatcggggtgtggaatgccgtcaccaagcactggcaggtccaggaggtgcagcccatcaccagttatgacgcggcaggctccttcctcctcctgggctgcaacaacggctccatttactacgtggatgtgcagaagttccccttgcgcatgaaagacaacgacctccttgtcagcgagctctatcgggacccagcggaggatggggtcaccgccctcagtgtctacctcacccccaagaccagtgacagtgggaactggatcgagatcgcctatggcaccagctcagggggcgtgcgggtcatcgtgcagcacccggagactgtgggctcggggcctcagctcttccagaccttcactgtgcaccgcagccctgtcaccaagatcatgctgtcggagaagcacctcatctcagtctgtgccgacaacaaccacgtgcggacatggtctgtgactcgcttccgcggcatgatttccacccagcccggctccaccccactcgcttcctttaagatcctggctctggagtcggcagatgggcatggcggctgcagtgctggcaatgacattggcccctacggtgagcgggacgaccagcaagtgttcatccagaaggtggtgcccagtgccagccagctcttcgtgcgtctctcatctactgggcagcgggtgtgctccgtgcgctccgtggacggctcacccacgacggccttcacagtgctggagtgcgagggctcccggcggctcggctctcggccccggcgctacctgctcactggccaggccaacggcagcttggccatgtgggacctaaccaccgccatggacggcctcggccaggcccctggtggcctgacggagcaagagctgatggaacagctggaacactgtgagctggcccgccggctccttcagctccctcatggggctgtctccccagcccctcaccccgcatctccctcaccagcctccactcagcctccagcaacacctccttgtctggccaccgtgggagcccaagccccccgcaggctgaggcccggcgccgtggtgggg

SEQ ID NO: 72097 - DNA, 1775 bp, Homo Sapiens
  misc_feature (1114)..(1264): n is a, c, g, or t
  misc_feature (1272)..(1286): n is a, c, g, or t
  misc_feature (1312)..(1330): n is a, c, g, or t
  misc_feature (1415)..(1427): n is a, c, g, or t
  misc_feature (1471)..(1490): n is a, c, g, or t
  misc_feature (1525)..(1572): n is a, c, g, or t
  misc_feature (1648)..(1658): n is a, c, g, or t
  misc_feature (1687)..(1695): n is a, c, g, or t
cggctccatttactacgtggatgtgcagaagttccccttgcgcatgaaagacaacgacctccttgtcagcgagctctatcgggacccagcggaggatggggtcaccgccctcagtgtctacctcacccccaagaccatctgtgccgacaacaaccacgtgcggacatggtctgtgactcgcttccgcggcatgatttccacccagcccggctccaccccactcgcttcctttaagatcctggctctggagtcggcagatgggcatggcggctgcagtgctggcaatgacattggcccctacggtgagcgggacgaccagcaagtgttcatccagaaggtggtgcccagtgccagccagctcttcgtgcgtctctcatctactgggcagcgggtgtgctccgtgcgctccgtggacggctcacccacgacagccttcacagtgctggagtgcgagggctcccggcggctcggctctcggccccggcgctacctgctcactggccaggccaacggcagcttggccatgtgggacctaaccaccgccatggacggcctcggccaggcccctgcaggtggcctgacggagcaagagctgatggaacagctggaacactgtgagctggccccgccggctccttcagctccctcatggggctgtctccccagcccctcaccccgcatctccctcaccagcctccactcagcctccagcaacacctccttgtttggccaccgtgggagcccaagccccccgcaggctgaggcccggcgccgtggtgggggcagctttgtggaacgctgccaggaactggtgcggagtgggccagacctccgacggccacccacaccagccccgtggccctccagcggtctcggcactcccctcacacctcccaagatgaagctcaatgaaacttccttttgaacaacgcagctgccatgatgccttgggatgccctggtcctgggggactcaggtgcctccctgattcctgtgggaaccccgggttcagggccagggcctccttggaataaatggttattgttactaggtccccaccttccctcttttctggaagccaaagtcaccctccccaataaagtcctcactgccnnnnnnnnnnnnnnnnnnnnnnnnnnnnnnnnnnnnnnnnnnnnnnnnnnnnnnnnnnnnnnnnnnnnnnnnnnnnnnnnnnnnnnnnnnnnnnnnnnnnnnnnnnnnnnnnnnnnnnnnnnnnnnnnnnnnnnnnnnnnnnnnnnnnnnnttgtgggnnnnnnnnnnnnnnnaaaaaattttttaaacattctctttnnnnnnnnnnnnnnnnnnngggaaggggaaaaagggccttaacttttttttcctcaaaaaaaccgggcccgggaaaaaagaggcgtgggttttccccccccacnnnnnnnnnnnnnccgggcggggaaaccaaaacggttttgttaaaaaaaccccacannnnnnnnnnnnnnnnnnnnccttttcttggagggctaatcacaccggggggggnnnnnnnnnnnnnnnnnnnnnnnnnnnnnnnnnnnnnnnnnnnnnnnngggccccctttttttataaagaaaagtgggggggagcttcttctttataaaaatcctttccccaccgctgggaagnnnnnnnnnnnaaccccgcgcggtgggggaacctaaaatnnnnnnnnngcggggggtaaaaaccaccgttggggcggcgtgggctgaaaaataattattcccccccgggggagaaaaaagaggcgggg

SEQ ID NO: 72098 - DNA, 466 bp, Homo Sapiens
ttaagggcggaagagtatgaagtcgacggcgcgccgaattcggcacgaggtgctccggctcctggcgaccactacccctgcgtcccggccccctcgcctcccctccctgtcgccctttccctggacagatcaggccggggcggtgggaggcccgcctcaggtcagggcccagcgtgtgacgtaggggccggggcaggccagggtttgtttgtggaggcgctgtctgtccctctgtccctctgtgtttccagccatctcgccctgccagcccagcaccactgggaatcatggtgaagctgatgcagcgttgccgagggggtgggttgggcggggtgtgggccggtcccctacgggatcccacggccgttcatcatcttgtccctcgtccccctaccacactccccctcctagaccgccgccctttaacacagtctggatttaataaattcatatgggtgtttaactt

SEQ ID NO: 72099 - DNA, 878 bp, Homo Sapiens
aggcccgggtgaatcggcacgaggctctacatctggacacgagaccaacttcgtggtccaggtcagcgtcttcattggggtcctcatcgacctctggaagatcaccaaggtcatggacgtccggctggaccgagagcacagggtggcaggaatcttcccccgcctatccttcaaggacaagtccacgtatatcgagtcctcgaccaaagtgtatgatgatatggcattccggtacctgtcctggatcctcttcccgctcctgggctgctatgccgtctacagtcttctgtacctggagcacaagggctggtactcctgggtgctcagcatgctctacggcttcctgctgaccttcggcttcatcaccatgacgccccagctcttcatcaactacaagctcaagtctgtggcccaccttccctggcgcatgctcacctacaaggccctcaacacattcatcgacgacctgttcgcctttgtcatcaagatgcccgttatgtaccggatcggctgcctgcgggacgatgtggttttcttcatctacctctaccaacggtggatctaccgcgtcgaccccacccgagtcaacgagtttggcatgagtggagaagaccccacagctgccgcccccgtggccgaggttcccacagcagcaggggccctcacgcccacacctgcacccaccacgaccaccgccaccagggaggaggcctccacgtccctgcccaccaagcccacccagggggccagctctgccagcgagccccaggaagcccctccaaagccagcagaggacaagaaaaaggattagtcgagactgggtcctcacctggctccgggctcctgggcgaccacttaccccttgcgtccccggcccc

SEQ ID NO: 72100 - DNA, 1485 bp, Homo Sapiens
  misc_feature (755)..(784): n is a, c, g, or t
  misc_feature (910)..(976): n is a, c, g, or t
cttcctgctgaccttcggcttcatcaccatgacgccccagctcttcatcaactacaagctcaagtctgtggcccaccttccctggcgcatgctcacctacaaggccctcaacacattcatcgacgacctgttcgcctttgtcatcaagatgcccgttatgtaccggatcggctgcctgcgggacgatgtggttttcttcatctacctctaccaacggtggatctaccgcgtcgaccccacccgagtcaacgagtttggcatgagtggagaagaccccacagctgccgcccccgtggccgaggttcccacagcagcaggggccctcacgcccacacctgcacccaccacgaccaccgccaccagggaggaggcctccacgtccctgcccaccaagcccacccagggggccagctctgccagcgagccccaggaagcccctccaaagccagcagaggacaagaaaaaggattagtcgagactggtcctcacctgctccggctcctggcgaccactacccctgcgtcccggccccctcgcctcccctccctgtcgccctttccctggacagatcaggccggggcggtgggaggcccgcctcaggtcagggcccagcgtgtgacgtaggggccggggcaggccagggtttgtttgtggaggcgctgtctgtccctctgtccctctgtgtttccagccatctcgccctgccagcccagcaccactgggaatcatggtgaagctgatgcagcgttgccgannnnnnnnnnnnnnnnnnnnnnnnnnnnnncccccctacgggatgcccacggccgttcatcatcttgtccctcgtccccctaccacactccccctcctagaccgccgccctttaacacagtctggatttaataaattcatatgggtgtttaacttnnnnnnnnnnnnnnnnnnnnnnnnnnnnnnnnnnnnnnnnnnnnnnnnnnnnnnnnnnnnnnnnnnntcagaagagcaggggcggaccgcacctactaagcaaatccaccaggaggagcacccagacaacacgacgacaacccaccagtcgctgtgtcaacgacggcgcgcccaccaatgagaggcggcgcagtatagcgaccgcacgcagcacgcgcgccgcgtaacaacaggggcacagacgagggagaacaagccgcgaaccgtagagagagccaattcgtcggacaagcaccaaccactacccggagggaggttggacgatacaaatcgacgttgagagcagcatcatacctccgcaacaaggagaaggaataatgaagacgccagatgcacgatgaagaatataatactaacaggctagatcatgacagagcagtgctaagtagtagtgtggataagaacacaccagcgcagctaacaatacatgtgtcgctcgagatgaataagaataattatagtgatcaacacgagcaatttatagttatgtacagagacaattttattacaggagaa

SEQ ID NO: 72101 - DNA, 2039 bp, Homo Sapiens
gctggaccggtccggattcccgggatggaagatggcggcggcgcaggaggcggacggggcccgcagcgccgtggtggcggccgggggaggcagctccggtcaggtgaccagcaatggcagcatcgggagggacccgccagcggagacccagcctcagaacccaccggcccagccggcacccaatgcctggcaggtcatcaaaggtgtgctgtttaggatcttcatcatctgggccatcagcagttggttccgccgagggccggcccctcaggaccaggcgggccccggaggagccccacgcgtcgccagccgcaacctgttccccaaagacactttaatgaacctgcatgtgtacatctcagagcacgagcactttacagacttcaacgccacgtcggcactcttctgggaacagcacgatcttgtgtatggcgactggactagcggcgagaactcagacggctgctacgagcactttgctgagctcgatatcccacagagcgtccagcagaacggctccatctacatccacgtttacttcaccaagagtggcttccacccagacccccggcagaaggccctgtaccgccggcttgccacagtccacatgtcccggatgatcaacaaatacaagcgcagacgatttcagaaaaccaagaacctgctgacaggagagacagaagcggacccagaaatgatcaagagggctgaggactatgggcctgtggaggtgatctcccattggcaccccaacatcaccatcaacatcgtggacgaccacacgccgtgggtgaagggcagtgtgccccctcccctggatcaatatgtgaagttcgacgccgtgagcggtgactactatcccatcatctacttcaatgactactggaacctgcagaaggactactaccccatcaacgagagcctggccagcctgccgctccgcgtctccttctgcccactctcgctttggcgctggcagctctatgctgcccagagcaccaagtcgccctggaacttcctgggcgatgagttgtacgagcagtcagatgaggagcaggactcggtgaaggtggccctgctggagaccaacccctacctgctggcgctcaccatcatcgtgtctatcgttcacagtgtcttcgagttcctggccttcaagaatgatatccagttctggaacagccggcagtccctggagggcctgtccgtgcgctccgtcttcttcggcgttttccagtcattcgtggtcctcctctacatcctggacaacgagaccaacttcgtggtccaggtcagcgtcttcattggggtcctcatcgacctctggaagatcaccaaggtcatggacgtccggctggaccgagagcacagggtggcaggaatcttcccccgcctatccttcaaggacaagtccacgtatatcgagtcctcgaccaaagtgtatgatgatatggcattccggtacctgtcctggatcctcttcccgctcctgggctgctatgccgtctacagtcttctgtacctggagcacaagggctggtactcctgggtgctcagcatgctctacggcttcctgctgaccttcggcttcatcaccatgacgccccagctcttcatcaactacaagctcaagtctgtggcccaccttccctggcgcatgctcacctacaaggccctcaacacattcatcgacgacctgttcgcctttgtcatcaagatgcccgttatgtaccggatcggctgcctgcgggacgatgtggttttcttcatctacctctaccaacggtggatctaccgcgtcgaccccaccccgagtcaacgagtttggcatgagtggagaagaccccaccagctgccgccccccgtggccgaggttcccacagcagcaggggccctcacgtccacacctgcacccaccacgaccaccgctcaccaggggagtaggcctccacgttccctacccaccaagccccacccctgggggcccgtctctgccagcgaaccccccaggaagccccctccaaggtcagcagaaggaa

SEQ ID NO: 72102 - DNA, 720 bp, Homo Sapiens
  misc_feature (28)..(28): n is a, c, g, or t
  misc_feature (67)..(121): n is a, c, g, or t
gggatggaccttttcattcttttcttantattctagacagtctctgttgtctcattgtgttgctgtnnnnnnnnnnnnnnnnnnnnnnnnnnnnnnnnnnnnnnnnnnnnnnnnnnnnnnntatgagaggcccccacctgctgcctttggacgcagccccctgctgctgcatccaccacccttcttacagatcagcgcgcacatggggtccttctgctgtctctggggcgagtcttggagccccctggggggctctgttggtgctgatttggacccgtttctctttttaaactgcacatcataacagggcttcatgtcgagcatgattttaatcataaatgcacttctgaggtgcaaggattgagctcagagctgctctgttgtggcaaaacccaaagtgctgtgatgtgtggctgtgacaagcctggagcgggtcctgtgagcgccgcctctgtctcctgcttccccactgaacgcctgctgaatgtgccgctgactcagctgtgctgctttcagccctcctgtgaggggcggtcccagtgcacagatgtttttcaagttcctcagtttgtactgaaattagggattcatcagggcaggaagcaggcaggcctctcagaagggagaggaggcctccaaatctattgagtccccacagtttgctcaagcccaggcaaatttctgtgattaaaatgaattcatcagttcctccaaaaaaaa

SEQ ID NO: 72103 - DNA, 129 bp, Homo Sapiens
gcctactactactatacggctgcgagaagacgacagaagggagaggaggcctccaaatctattgagtccccacagtttgctcaagcccaggcaaatttctgtgattaaaatgaattcatcagttcctcc

SEQ ID NO: 72104 - DNA, 875 bp, Homo Sapiens
  misc_feature (601)..(725): n is a, c, g, or t
  misc_feature (727)..(728): n is a, c, g, or t
  misc_feature (734)..(734): n is a, c, g, or t
  misc_feature (736)..(736): n is a, c, g, or t
  misc_feature (748)..(761): n is a, c, g, or t
  misc_feature (769)..(787): n is a, c, g, or t
ttttcagtgcaaaagagatgtcattcagttaaaaagacaaacctctagatgtgtaattacatggaaaatactagcaatgtgaatgcttgtgtagtaaccatcttgtagtacctgtgaaatctataactcagaaatggtcagatggtcaggagccagctatgcagcagtataccatctgtttaattattttgtaggtcctgtgtgtggaaccaactataaacccagttctaaagttgtgtatgatggtgaacctttgggaatagttcttatcaacttaattggatacttttagcaaataggaacttaattctcagcactgaacatgaattacttccttggagtttttttcattcatatttttgttgtttccaggaatttatttgatattaatgggcgtaaaacagcatcattgtacttaagctatggatgtttttattttatattttctttatttataactgtgccaagtattattttgctacttaccgtgttattctgtggaaagaaaaacctgtaaagtgtttaataaattagccctccttacataaattaaatgtcaaaattttgtaaaatattaatcagaataaatactgactcttannnnnnnnnnnnnnnnnnnnnnnnnnnnnnnnnnnnnnnnnnnnnnnnnnnnnnnnnnnnnnnnnnnnnnnnnnnnnnnnnnnnnnnnnnnnnnnnnnnnnnnnnnnnnnnnnnnnnnnnnnnnnannaaaaananaaaatttggggnnnnnnnnnnnnnnacaaaaannnnnnnnnnnnnnnnnnngggcgggggggccccaaaggaaaggaaaaagggccaaacgtttttcccaaaaaaaccccggccaaaacaaaggggttggatccccccc

SEQ ID NO: 72105 - DNA, 2110 bp, Homo Sapiens
  misc_feature (956)..(956): n is a, c, g, or t
tttatttggttatcaactgcccatggaggaggctcttgatgatcccaggtctcctcgacctccatacaccacacaggcatttgtaagcacagtttccacaagcaccttgtaggaatatggataagattagaccagcccctctctgtccactgggtttatttcttgaagaagatgcagatctggtttttccaatgtgccacagtctttccttatcctctccatgctgagcttgacaacactctgggaatgaggaacaagactttttctaaaaagatagtggaagttcaagggatgtacctcgttgtcaggttcatccatctccagtggaatgttttcaataaaagatgaagaaaatgtgtgtgatctttaataacacatccctatagaaagtggataaaagatataccaaaactgtaatacagatatatacaaatataggtgcctttttgattactcttgtttgtctagtatggtcttggaaagaaaaccaagcaagcaagttgctgcctattctataggaatattttattacacatgattgatatttttgtggtagggaagtgggatgctcctcagatattaaaggtgttagctgattgtattttatctctaaagatttagaactttagaaaatgccgacttcttccatctatttctgaaaggttctttgtggatttatatagagttgagctatataaacattaactttagatttgggatttaaaatgcctattgtaagatagaataattgtgaggctggattcactacacaagatgaacttcacttcataaattaattataccttagcgatttgcttctgataatctaaaagtggctagattgtggttgttttggttaaggtgatatggaggtgggagagcttttagttaagtaagaagctatgtaaactgacaaggatgctaaaataaaagtctctgaagtattccatgccttntggaccctttcctcgcaactaactgtcaactgttgatcaaaaaagtcaaggcattgtatgttgcttctgtggttattattctgtgatgcttagactacttgaacccataaacttggaagaatctttgagcaaattttctcagttgtctgtatgacttcagtatattcctgggaatgccataggattttttgtgcttgatacatggtatccagtttgcatagtatcacttctttgtaatccagttgctgttaagaatgatgtactttaaaggaaaagagaaaactgcatcacagtcccattctccagtgtccatgcaatgaattgctgagcatttaggaagcagcaccaagtctattacaggcatggtgtgaaacttgatgtttgacctgtgatcaaaattgaaccattgtacagtttggcttctgtttgcttcaaaatatgtagaattgtggttgatgattaatttgcgagactaactttgagagtgtaacagttttgaagaaaacattgaatgttttgcaaatgaaggggcttcacggaatgttacaatgttactaatataatttggcttttgttatgcaaattgttaacaccagctattaaaatatattttagtagaaatgctttaattcatatttttttcctctacactgtgaatctttaagccttggtggactagagcaacatcgtgctgcccaaaggactaacctatgcaaactagttcacattttagtggatgtcgcagttaatgtgtaataagacattatttcccctgcataatgtacaacagcattgaaatgacacattaagcctagcatcacattgtatagtacagtcactcacaaacccttcaaggctaccctaatcattaacattaatatttgtttaaaagcaaatcaccgatttatctattgaaactacttaaatgacggcaaaccaggaatgacagatggctgtgtcagcaatggctttaatgtgttccctgcaagtggtctcctatgatagaactgcgttctcaaatgcactctcttcagggtcttaatattctgtgttttctctctgtatttgtaaaacattataacacattaatttcctatctctacacatttggtttgcttaaataaatgcaggatataaaaaaaatggttcaaaaa

SEQ ID NO: 72106 - DNA, 975 bp, Homo Sapiens
aaaggtggcttgggagggaccagttttcctagatgcaggagacagcgtccatagtttcagttcgaagcaactggtggcaaaaggttagcatttaagatggcagggacagcgcgccatgaccgagagatggcgatccaggccaagaaaaagctcaccacggccaccgaccccattgaaagactccgactgcagtgcctggccaggggctctgctgggatcaaaggacttggcagagtgtttagaattatggatgacgataataatcgaacccttgattttaaagaatttatgaaagggttaaatgattatgctgtggtcatggaaaaagaagaggtggaagaacttttccagaggtttgataaagatggaaatggaacaatagacttcaatgaatttcttctcacattaagacctccaatgtccagagccagaaaagaggtaatcatgcaagcttttagaaagttagacaagactggagatggtgttataacaatcgaagaccttcgtgaagtatataatgcaaaacaccacccaaagtaccagaatggggaatggagtgaggaacaagtatttaggaaatttctggataactttgattcaccctatgacaaagatggattggtgacccctgaggagttcatgaactactatgcaggtgtgagcgcatccattgacactgatgtgtacttcatcatcatgatgagaaccgcctggaagctttaagcacatgacctggggaccaggccctgggacagccatgtggctccaaatgactaaatgtcagctcaaaaaccagaatcgtatttgatttcacactcatcctaatgtttttttctgtgtcaaaatattgcattttctggggccaaaaaacaggcagaaataaaagacattgagtagccaactgtgagtttgccttgcctaagactgtttcctttgttctaaaataggacttaaataaaatgagctctgtaaaaa

SEQ ID NO: 72107 - DNA, 961 bp, Homo Sapiens
ggtgagaaacctttatctttttcatacctttctattctcaatcacttctccaaaagtgtgtctttccagctctgatttattcaaaacacaagcatttctgtttagagattctagcccatgggttatctggctagttattacctctcctgttcacttagttatactttattattgctcacaggctggggaggcagaatgactctgtcaccactaggagccattagggcttcttccctggaggactgcctgcttgctttctggggacactagccctcatttcccttctgtggtacagtggggcaaattatttgtattaagcaaacatttatgggaaacaacccgctcccgaaaacggagcccccaagtaaagcacaaccctgaaagattatgaactatgaattgtctctagtagagataaatttctgcaaacatatctcagtcttccctctgtttctctggtgattaagaagttcctttttggtaaggaaaaggatttttaaccatagagttaggcatcatggaaattcaaaccagatttcttaatacctggtcttcctcaaagagaaataataacagtaatagtggtgctgggaacaatatggcagattattgaatgaaattgattaacttgaataaaatgctgtgaattttctctagctgaatgcttttcttgtatttgtcagttttaacatattgatgcacatttgatactttttctcaaatagactactagggaactgtttatacacttcagatatcagtttgtttttcactgataaagaaatgcaaaacactgtggttgtcgggtatatacgtactatattttagaactgtccatgtcccacttacctcctccacatacaaggaatcactagggtggacctgagtgtctccttttcattgtaggattgtctcctttttgtttctgtttttattcaacatttgataaagtctatgcact

SEQ ID NO: 72108 - DNA, 708 bp, Homo Sapiens
  misc_feature (44)..(44): n is a, c, g, or t
cccaccatgccccacttcaaatggcttctatccagtaagcaganctggccaaacttgaccacagaggagaggctggcgtcttccagccccctctccttctgggacccaccccctcagaatggccaaaaacccccaagtcgtcccagcagctctgcttctaagaagcagtatgtatagaggcctgtggcttatgtcacccaacagaggggtcctgagaagtctggctgcctgggatgccccctgccccctcctggaaggctctgcagagatgactgggctggggaagcagatgcttgctggccatggagcctcattgcaagttgttcttgaacacctgaggccttcctggtgcccaccaggcactacggcttcctctccagaatgtggctttgcctgagcacagacagagtcagcatggaatgctcttggccaagggtactgggggccctctggccttttgcagctgatccagaggaacccagagccaacttaccccaacctcaccctatggaacagtcacctgtgcgcaggttgtcctcaaaccctctcctcacaggaaaaggcggattgaggctgctgggtcagccttgatcgcacagacagagcttgtgccggatttggccctgtcaaggggactggtgccttgttttcatcactccttcctagttctactgttcaagcttctgaaataaacaggacttgatcaca

SEQ ID NO: 72109 - DNA, 1152 bp, Homo Sapiens
cgcatgtactatagacagtcgtacacaaagcaggctggtacggtccggaatcccgggatatcgtcgaccacgcgtcggaaggagccaagctcctgatggacttgcgttgggatgtgggggacacctgtggcatggtaaggctccctgagtcccttactccaggtcagatgccagtgggactcatgcgccctatgagggctgcagggccagtgctgcccctcggactcctcgaggggttgggtgctaagcgcgagcctcgccgtccctgctggagccctcgcctgcctgcccctctgcctgtgctcctggcagtgtggcttcccggtgctcacctgcacagcagttaacagcagaggccgagcgggagcctctggggagcgaggctgaaacctgaacctgcccatggagacagttgtggtgagggttgccacacacagtgagggcggagcagggtggctgagggcacaggtgcctgggtctgtcccacggggcagggctttggggctgtgatgctctgggaagccagcttgggtcctgggtctacagagggccctggccccggagcccagccagctctgcctctctcagggcctggagtcctgggggagctcagccagctctgcctttctcagggcctggagtcctggatgaatcctgcaggtttttggttgcaccggcccagggaggaagcggggggtttgtcaggtgggctctcctggaggtcctcgagtggcaggggtgaggaggggattatctgaggcatctggagatgtatatcctgtggtttcccctgcccctctgtttccgatgaggtgtacggatgagtgacctgcactaagaagtgagttgccacagtgaaaatgggttggtttttgtcttcgacgctcagggtctgggcgcctcgcatttgcagtctgttgtgacagacacggggagctccgcgtgccagcctgtggctgccctgctgtgggggtcctggggccggcgaggccccttcagtcttgttctggggggacggcccactccggggagggggtgtgctgtgctgagcgctgtatccctgaatatagtttattttttctacatttgaattctgttgtagatttatgtaaaaatacattctttttgaaaataaaaattttcatgtcttct

SEQ ID NO: 72110 - DNA, 854 bp, Homo Sapiens
  misc_feature (740)..(767): n is a, c, g, or t
  misc_feature (773)..(773): n is a, c, g, or t
  misc_feature (832)..(832): n is a, c, g, or t
gctggaccggtccggaattcccgggatatcgtcgaccacgcgtccggcgcgagcttggagccgggtagagggcgggccttccgggacgagggcgcgtgggtgaggaaggtcaggtctaggaactctaactccttgccactcaagaaatgtcctccctttcagaatatgccttccgcatgtctcgtctcagtgcccggctatttggtgaagtcaccaggcctactaattccaagtctatgaaagtggtgaaactgtttagtgaactgcccttggccaagaagaaggagacttatgattggtatccaaatcaccacacttacgctgaactcatgcagacgctccgatttcttggactctacagagatgagcatcaggattttatggatgagcaaaaacgactaaagaagcttcgtggaaaggagaaaccaaagaaaggagaagggaaaagagcagcaaaaaggaaatagtgttggtccctcaagagggagactttcttcctcagtggcggagagaagaaagtgcatttattgtctttccacatattggaggaatgtcatcttcctaaatgaagtttatttggaggaacacagtcatctccttggtgaaatctaatccggttacattgtggctggtttcttgaacacattctaactgtgcaaaattatcttggccttggccgtgtaatgtgaggtttacctgattctctaatgaaataaatacctaagttattgtttgacaannnnnnnnnnnnnnnnnnnnnnnnnnnnctgttnggcgcgcttggccctttaaaaacttttccaaaccttttcttttggccccccggcccccntaagggaagtgaactgggcctt

SEQ ID NO: 72111 - DNA, 965 bp, Homo Sapiens
  misc_feature (54)..(54): n is a, c, g, or t
agtcagttagtagacgtcttcattcattggagtaactgtgtaggctttccagtntgaaaaggagcagagagctgtccatctggattgatggaagaaaagagaacctcatccatgcctggagaacatctagaaaaccttcagccagcctccagtgctgtcgagagaccaccttcccccgacccggaggcacttccttggggtctttctctagggtctcttctctacaaagcacaacactaatgttcgtttccttagacctcagttcaagtgcccctatttatttcaataagaacgcacatatcccagctgttttttgtttgtcacctctatttagttgttacctgtttctctcttctttcaccccttgtccttttccacccttttaagagttacgctagcagatcttactccacgtatactttttggtttgtgaaggcatcggttaagggcacaaagacagccatggggacatttatgtaaatacgtctctaattgccacactgcagctgaacagtgtgtagtattttcccagtcagctttgccatactgacgtcaatcatttgagagaaattattcagattttatttttgtatctgtggtaacaaaacattaaccaaaagattttctgtccagaagcctccccgaccccccaagctatttgctcacattaacaaattaaagtgcctgaagcataattcattctttacctgtatactaaaaaccctgttgtattgatttttttataataagcctttttacctctgtgtaaaaaatatatatacaagtgtatgatgtacattttagttcttaacttttttttatggtttctaatatgtatgaccaatgtagcccatgcttttaaaatgtccgtgttacttttaacacatcctatcaggaaaaggacagaaaacccaagataaagggagaaaaaagggcagagaaaaagggggcgaaagagaaagagg

SEQ ID NO: 72112 - DNA, 902 bp, Homo Sapiens
  misc_feature (197)..(219): n is a, c, g, or t
ggagatggttttcctcagatgagggggccccaaaattgatagtgcacatctgcacgctttctgcgaggcctcagaacttttcccagggcccctccctcaaattgtctccatgggaaacttgacccagtggcaagttgcactttggtgatcttggtggtctacacacccgttctgtggagagtcgatttacataagcnnnnnnnnnnnnnnnnnnnnnnngcgtgtatgtgcgcctgaccctgatttctgcaacctccagatttctttcttgacccttcaaagtggaacagtccagtgccaaaaattttagagtttgagaaggtcacagaaatcctctagttggtgcctccacagtcttcattttacagaggaactcagggctaatggagttaatgcaactagatcagggttttgggtctgtgttctttctaccgtcagcacctgtgtggtcaattctggacacttcccagagaagtctttgagtagagaatcctactcaaatttcactgtatattttaagcattcctctcctttccctttgcctcccctgttgccttttcttcccctgatttctcctctggtcatctcctctcccttctgcgtgtaagccatgggaaagggatgagggaggacagcttctggttaaacacaggtccctcttccacatcaaatgaacattggcttcctgggacagaaggccttcaaaggagggattgcaaagcaaggcaaagcgttctgtcttcattttccccatccccatgagacaagactgatggaaagggtggtggggcaacactgcttaatggatgccttttcacatcatttcagtttttagccctcatgactgtattttctaatcagagacaataacattttaaataaaacaacgacaaagaagtctg

SEQ ID NO: 72113 - DNA, 1784 bp, Homo Sapiens
actgcagactcacactatcttctcactgctgggagtggaccatgcttatgtcaccagtattggcagactcattggaatcgttactctaaaggagctccggaaggccatcgagggctctgtcacagcacagggtgtgaaagtccggccgcccctcgccagcttccgagacagtgccaccagcagcagtgacacggagaccactgaggtgcatgcactctgggggccccactcccgtcatggcctcccccgggagggcagcccttccgacagcgacgacaaatgccaatgagcccctcgtgggtggcctaggatggtgctagccatgcccgtcagcccagaatgtgcatctttcattccttctgccttcggaaggcaggaggcagctacagctggaggctgcaccccagccccctccagacctggggtgccagcttctcccagttcatcctacctggaatctgacccactacccacctgcaacaagtcttccagaggcaggaagataggccctgccctggcaggatgggttggggtcacttgacccctgctccccctttgaggggaaaggggtggaactaagatgggtttataactggaacctccaatgaccagatgtatatagagatttacaaagatttttatattaatttaataaaacaaattcttaaatagaacaaaataaacacctaatgagccacttatatatagaatgcttgtgcccgttggctctcgtccttaccttgggccctcttacctgccaaagcctacaaggcccttaattctaaagccacccacccttcccacaaccataaaaacgtacagtccagtgaccttggaatgcaggatctgccagaggcctccactacgtgggcattaacaccctggctggggcggggccctgtactgtagccttggcctttcattcagacagaaaggctctaccttctttcctccccaagaagagacactccctcatgactgtcactcactggcacaattcctgcctctcagcaggcatcagctgacaactcccggccacccctgtggccctcttgtggccctctctagaagaacatgaagtcccagctctgtggcaaccagagccatcctttcttccacctcccgctcagagagctctgcgtgaatgggcagcccggctggctgtgaggcgccagcacactgcccgcacatcctaggaggggttgggaaagggcccaggccccattagggggccaggaaaagggtggagggtacatgctttcatcattccaaagcctcccagagaagagaagatccgactgaaaaaacagaccaaaaccttctgtctttaggaaaaaagaggaagatttagagacgatggagaggtgaatgaagcacagcacgagcccagctgggcaggggcccttgagggacggctcaacccataggctccgggagggcaggagccagcccctccaggtgggggtgattctatcaagcactgcacatggactcggaagtgagaagaaaagcagagaagagagaggcatggggagggtggggggttgctgggccccctcccaccccaccctcacacagcccagtcacaacccccttagtggttcacattatccgaggaggaaatgtgtgtgtggcattttaagaacatgaacatcactgtctgccacagctgtagccatgccccagaggccccgggcaacccccggcaagccccgggagtgggggcagacatgcgccccccctcgtgccgaattcgccaccaggcctcgtacctagcctaagtt

SEQ ID NO: 72114 - DNA, 1469 bp, Homo Sapiens
  misc_feature (1240)..(1286): n is a, c, g, or t
gggcggttcagttgctggagctgtgaagttaaaccgacaacagactgatatggctgttaattgggctggaggattacatcatgctaagaaatcagaagcatcaggattctgttacgttaatgatattgtgcttgccatccttgaattactaaagtatcatcagagagtcttatatattgatatagatattcatcatggtgatggtgttgaagaagctttttatacaacagatcgtgtaatgacggtatcattccataaatatggggaatactttcctggcacaggaaaccttgagggatatttggtgctgggaaaaggcaaatactatgctgtcaattttccaatgagagatggtatagatgatgagtcatatgggcagatatttaagcctattatctcaaaggtgatggagatgtatcaacctagtgctgtggtattacagtgtggtgcagactcattatctggtgatagactgggttgtttcaatctaacagtcaaagctcatgctaaatgtgtagaagttgtaaaaacttttaacttaccattactgatgcttggaggaggtggctacacaatccgtaatgttgctcgatgttggacatatgagactgcagttgcccttgattgtgagattcccaatgagttgccatataatgattactttgagtattttggaccagacttcaaactgcatattagtccttcaaacatgacaaaccagaacactccagaatatatggaaaagataaaacagcgtttgtttgaaaatttgcgcatgttacctcatgcacctggtgtccagatgcaagctattccagaagatgctgttcatgaagacagtggagatgaagatggagaagatccagacaagagaatttctattcgagcatcagacaagcggatagcttgtgatgaagaattctcagattctgaggatgaaggagaaggaggtcgaagaaatgtggctgatcataagaaaggagcaaagaaagctagaattgaagaagataagaaagaaacagaggacaaaaaaacagacgttaaggaagaagataaatccaaggacaacagtggtgaaaaaacagataccaaaggaaccaaatcagaacagctcagcaacccctgaatttgacagtctcaccaatttcagaaaatcattaaaaagaaaatattgaaaggaaaatgttttctttttgaagacttctggcttcattttatactactttggcatggactgtannnnnnnnnnnnnnnnnnnnnnnnnnnnnnnnnnnnnnnnnnnnnnnattgtgagtttttctaattatgaagcaaaatttcttttctccaccatgctttatgtgatagtatttaaaattgatgtgagttattatgtcaaaaaaactgatctattaaagaagtaattggcctttctgagctgatttttccatcttttgtaattatctttattaaaaaattgtacttggatt

SEQ ID NO: 72115 - DNA, 508 bp, Homo Sapiens
  misc_feature (182)..(217): n is a, c, g, or t
  misc_feature (415)..(447): n is a, c, g, or t
gaagacagcaataaccacagtacatattactgtagttctctatagttttacatacattcataccataactctgttctctcctcttttttgttttcaactttaaaaacaaaaataaacgatgataatctttactggtgaaaaggatggaaaaataaatcaacaaatgcaaccagtttgtgagnnnnnnnnnnnnnnnnnnnnnnnnnnnnnnnnnnnncacctgaatgcggaagagctcggctcccgtttagcattttgtacttaaggaaataaaaaaccaacaaaggatctcacattttcttaaaaagtgaagattgctgtatactatttattcaacttataatttatgttactccttgatctttgtcttttgtcatgacaaagcatttatttaataaagttatgcattcagttnnnnnnnnnnnnnnnnnnnnnnnnnnnnnnnnngaccgcgtatgcggccgcaagcttattcccttgtagtgagggttaattttagcttaggcac

SEQ ID NO: 72116 - DNA, 2792 bp, Homo Sapiens
  misc_feature (2445)..(2492): n is a, c, g, or t
  misc_feature (2674)..(2707): n is a, c, g, or t
gcgagagagtatgaagtcgacggcgcgccgaattcggcacgaggaactttaggagggtgctagactttagaagccagataggaagaatcagtctaaactggccatgctttggaagggacaagactatgtgctccgctgcccaccttcagcctgcaatgagggactgaggcccacgagtctttccagctcttcctccattctggccagtccctgcatcctccctggggtggaggatggaaggaaagctgggacaagcagggaacgcatgattcagggatgctgtcactcggcagccagattccgaaactcccattctccaatgacttcctcaaccaatgggtggccttgtgactgttctttaaggctgaagatatccaggaaagggggcttggacactggccaaggagaccccttcgtgctgtggacacagctctcttcactctttgctcatggcatgacacagcggagaccgcctccaacaacgaatttggggctacgaagaggaatagcgaaaaagcaaatctgtttcaactgatgggaaccctatagctatagaacttgggggctatctcctatgcccctggacaggacagttggctggggacaggagaagtgctcaatcttcatgagacaaaggggcccgatagggccagcagccacaaggccttgacctgccgagtcagcatgccccatctctctgcacagctgtcccctaaacccaactcacgtttctgtatgtcttaggccagtatcccaaacctcttccacgtcactgttctttccacccattctccctttgcatcttgagcagttatccaactaggatctgccaagtggatactggggtgccactcccctgagaaaagactgagccaggaactacaagctccccccacattcctcccagcctggacctaattcttgagaggggctctctcttcacggactgtgtctggactttgagcaggcttctgccccttgcgttggctctttgctgccagccatcaggtgggggattagagcctggtgtaagtgcgccagactcttccggtttccaaagttcgtgcctgcgaacccaaacctgtgagtctcttctgcatgcaggagtttctcctgggcagctggtcactccccagagaagctgggccttcatggacacatggaactaagcctcccaaatgggagttctggctgagcccagggtggggagatcctgggaagggaggcactggaggaagacggcacctcttcccccatggcagggtgtgagggaggcaggtttggaatggtgcgagtatggcaatctaagcaggggtctggtctctttgactccaggctggcctttggccgactgtctgctcacccagagaccttggactccggactatccatggctccgaatctaagtgctgcccactcccatgctcacacccacagaaggtcttcccatcccctttagattcgtgcctcactccaccagtgaggaagatgcctctgtctttcccacgactgccaggagatagggaagcccagccaggactgaccctccttcctccagcctgccctgacccacctggcaaagcagggcacatggggaggaagagactggaacctttctttgacagccaggcctagacagacaggcctggggacactggccccatgaggggaggaaggcaggcgcacgaggtccagggaggcccttttctgatcatgccccttctctcccaacccatctccccaccaccacctctgtggcctccatggtacccccacagggctggcctcccctagagggtgggcctcaaccacctgctcccgccacgcaccggttagtgagacagggctgccacggcaaccgccaagcccccctcaaggtgggacagtaccccggacccatccactcactcctgagagggctccggcccagaatgggaacctcagagaagagctctaaggagaagaaaccccatagcgtcagagaggatatgtctggcttccaagagaaaggaggctccgttttgcaaagtggaggagggacgagggacaggggtttcaccagccagcaacctgggccttgtactgtctgtgtttttaaaaccactaaagtgcaagatttacattgcactgtttctccactttttattttctcttaggcttttgtttctatttcaaacatactttcttggttttctaatggagtatatagtttagtcatttcacagactctggcctcctctcctgaaatccttttggatggggaaagggaaggtggggagggtccgaggggaaggggaccccagcttccctgtgcccactcaacccactccaccagtccccggtcgccagccggagtctcctctctaccgccactgtcacaccgtagcccacatggatagcacagttgtcagacaagattccttcagattccgagttgcctaccgnnnnnnnnnnnnnnnnnnnnnnnnnnnnnnnnnnnnnnnnnnnnnnnngaagacagcaataaccacagtacatattactgtagttctctatagttttacatacattcataccataactctgttctctcctcttttttgttttcaactttaaaaacaaaaataaacgatgataatctttactggtgaaaaggatggaaaaataaatcaacaaatgcaaccagtttgtgagnnnnnnnnnnnnnnnnnnnnnnnnnnnnnnnnnncacctgaatgcggaagagctcggctcccgtttagcattttgtacttaaggaaataaaaaaccaacaaaggatctcacattttctt

SEQ ID NO: 72117 - DNA, 1128 bp, Homo Sapiens
  misc_feature (1012)..(1013): n is a, c, g, or t
caacacatagctaggttacgaggcctgcgttggtttaagtcggcacgaggcaggagaacagtaatgtatggatggttccggccagagtcgatgtggggaggaacagagggctgaagggagagggggctgactgttccattctagctttggcacaaagcagcagaaagggggaaaagccaatagaaatttccttagcttccccaccatatgtattttctaggatttgagaggaaagagaggaaaatgggggaatgggttgcaaaatagaaatgagcttaatccaggccgcagagccagggaaggtgagtaactttaggagggtgctagactttagaagccagataggaagaatcagtctaaactggccatgctttggaagggacaagactatgtgctccgctgcccaccttcagcctgcaatgagggactgaggcccacgagtctttccagctcttcctccattctggccagtccctgcatcctccctggggtggaggatggaaggaaagctgggacaagcagggaacgcatgattcagggatgctgtcactcggcagccagattccgaaactcccattctccaatgacttcctcaaccaatgggtggccttgtgactgttctttaaggctgaagatatccaggaaagggggcttggacactggccaaggagaccccttcgtgctgtggacacagctctcttcactctttgctcatggcatgacacagcggagaccgcctccaacaacgaatttggggctacgaagaggaatagcgaaaaagcaaatctgtttcaactgatgggaaccctatagctatagaacttgggggctatctcctatgcccctggacaggacagttggctggggacaggagaagtgctcaatcttcatgagacaaaggggcccgatagggccagcagccacaatgccttgacctgccgagtcagcatgcccatctctctgcacagctgtccctaaacccactcactttctgtagtcttaggcagtaccnnaactctcacgtactgttcttcaccatctccttgctctgagcatatcactagactgcagtgatctggtgcatcctgagagatgacagatacactccaatctcactgacatctgagc

SEQ ID NO: 72118 - DNA, 854 bp, Homo Sapiens
gagtatgaaagtcgacggcgcgccgaattcggcacgaggagcgtcagagaggatatgtctggcttccaagagaaaggaggctccgttttgcaaagtggaggagggacgagggacaggggtttcaccagccagcaacctgggcaggggtctggtctctttgactccaggctggcctttggccgactgtctgctcacccagagaccttggactccggactatccatggctccgaatctaagtgctgcccactcccatgctcacacccacagaaggtcttcccatcccctttagattcgtgcctcactccaccagtgaggaagatgcctctgtctttcccacgactgccaggagatagggaagcccagccaggactgaccctccttcctccagcctgccctgacccacctggcaaagcagggcacatggggaggaagagactggaacctttctttgacagccaggcctagacagacaggcctggggacactggccccatgaggggaggaaggcaggcgcacgaggtccagggaggcccttttctgatcatgccccttctctcccaccccatctccccaccaccacctctgtggcctccatggtacccccacagggctggcctcccctagagggtgggcctcaaccacctgctcccgccacgcaccggttagtgagacagggctgcacggcaaccgccaacccccctcaaggtggacagtacccggaccatccctcactctgagaggctccgccaaatggaactcaaaagagctctagagagaaccctacgtcaaaagattgctgctcaaaaaagagccctttcattgagagaaagaaggttcccccaactgcctttg

SEQ ID NO: 72119 - DNA, 885 bp, Homo Sapiens
gcgagagagtatgaagtcgacggcgcgccgaattcggcacgagggcagaaagggggaaaagccaatagaaatttccttagcttccccaccatatgtattttctaggatttgagaggaaagagaggaaaatgggggaatgggttgcaaaatagaaatgagcttaatccaggccgcagagccagggaaggtgagtaactttaggagggtgctagactttagaagccagataggaagaatcagtctaaactggccatgctttggaagggacaagactatgtgctccgctgcccaccttcagcctgcaatgagggactgaggcccacgagtctttccagctcttcctccattctggccagtccctgcatcctccctggggtggaggatggaaggaaagctgggacaagcagggaacgcatgattcagggatgctgtcactcggcagccagattccgaaactcccattctccaatgacttcctcaaccaatgggtggccttgtgactgttctttaaggctgaagatatccaggaaagggggcttggacactggccaaggagaccccttcgtgctgtggacacagctctcttcactctttgctcatggcatgacacagcggagaccgcctccaacaacgaatttggggctacgaagaggaatagcgaaaaagcaaatctgtttcaactgatgggaaccctatagctatagaacttgggggctatctcctatgcccctggacaggacagttggctggggacaggagaatgctcatctcatgaacaagggcccgatgggcagcagcacaggcctgactgcgagtacatgcccatccttgcaagtgtcctaaccactcagttcgtagctagcatatccactctcagtctgtctc

SEQ ID NO: 72120 - DNA, 1383 bp, Homo Sapiens
gggggaagagtatgaagtcgacggcgcgccgaattcggcacgaggcccgtaatagcatttttgcctgcctcgaggcagagtttcccgtgagcaataaactcagcttttttgtggggcacagtactggatttgacagtgattccccacgtgtgttcatctgcacccaccgagccaggcagaggccagccctccgtggtgcacacagcacgcgcctcagtccatcccattttagtctttaaaccctcaggaagtcacagtctccggacaccacaccacatgagcccaacaggtccacgatggatccaccagtcccaccccagccttttcctttcatctgaacagaatgtgcatttttggaagcctccctcactctccatgctggcagagcaagagggagactgaagtaagagatggcagagggagatggtggcaaaaaggtttagatgcaggagaacagtaagatggatggttccggccagagtcgatgtggggaggaacagagggctgaagggagagggggctgactgttccattctagctttggcacaaagcagcagaaagggggaaaagccaatagaaatttccttagcttccccaccatatgtattttctaggatttgagaggaaagagaggaaaatgggggaatgggttgcaaaatagaaatgagcttaatccaggccgcagagccagggaaggtgagtaactttaggagggtgctagactttagaagccagataggaagaatcagtctaaactggccatgctttggaagggacaagactatgtgctccgctgcccaccttcagcctgcaatgagggactgaggcccacgagtctttccagctcttcctccattctggccagtccctgcatcctccctggggtggaggatggaaggaaagctgggacaagcagggaacgcatgattcagggatgctgtcactcggcagccagattccgaaactcccattctccaatgacttcctcaaccaatgggtggccttgtgactgttctttaaggctgaagatatccaggaaagggggcttggacactggccaaggagaccccttcgtgctgtggacacagctctcttcactctttgctcatggcatgacacagcggagaccgcctccaacaacgaatttggggctacgaagaggatagcgaaaagcaatctgttcaactgatgggaccctatagctatagactgggggcttctctatgccctgacagacagtgctgggacagaaagtgccatctctgaacaaggccgatagcagcacacagctgactgcatactgccttttgcatgtctaacatagttcgtgtagcgtacacttcgtctgttcctcctgttgatcatgtgcagacggctcgaagc

SEQ ID NO: 72121 - DNA, 1410 bp, Homo Sapiens
  misc_feature (80)..(89): n is a, c, g, or t
  misc_feature (147)..(183): n is a, c, g, or t
gggcgagagagtatgaagtcgacggcgcgccgaattcggcacgaggagcgcagcagcctctgtgggggaggataggctgnnnnnnnnnngtgggctcgtatttatctacaggactccatatagtcatatataggcatataaatctannnnnnnnnnnnnnnnnnnnnnnnnnnnnnnnnnnnnaaaggtttgcattaacttttcaaagtagttcctataggggcattgaggagcttcctcattctgggaaaactgagaaaacccatattctcctaatacaacccgtaatagcatttttgcctgcctcgaggcagagtttcccgtgagcaataaactcagcttttttgtggggcacagtactggatttgacagtgattccccacgtgtgttcatctgcacccaccgagccaggcagaggccagccctccgtggtgcacacagcacgcgcctcagtccatcccattttagtctttaaaccctcaggaagtcacagtctccggacaccacaccacatgagcccaacaggtccacgatggatccaccagtcccaccccagccttttcctttcatctgaacagaatgtgcatttttggaagcctccctcactctccatgctggcagagcaggagggagactgaagtaagagatggcagagggagatggtggcaaaaaggtttagatgcaggagaacagtaagatggatggttccggccagagtcgatgtggggaggaacagagggctgaagggagagggggctgactgttccattctagctttggcacaaagcagcagaaagggggaaaagccaatagaaatttccttagcttccccaccatatgtattttctaggatttgagaggaaagagaggaaaatgggggaatgggttgcaaaatagaaatgagcttaatccaggccgcagagccagggaaggtgagtaactttaggagggtgctagactttagaagccagataggaagaatcagtctaaactggccatgctttggaagggacaagactatgtgctccgctgcccaccttcagcctgcaatgagggactgaggcccacgagtctttccagctcttcctccattctggccagtccctgcatcctccctggggtggaggatggaaggaaagctgggacaagcagggaacgcatgattcagggatgctgtcaacgcgcagccagattccgaactccattctcaatgacttctcaaccatggtgggctgtgctgttcttaaggtgagaattcagaaaggggctggacctgcaagaacccctctgctggacactcttcatcttgcctgctgaccacgaacgctccaaacattgggccaaagatagaaaacatggttatgggacctactagattggggtcttcccgagattggggagaagctttta

SEQ ID NO: 72122 - DNA, 863 bp, Homo Sapiens
  misc_feature (250)..(250): n is a, c, g, or t
tcggagcaccgtcatgcatcttgaaaagcagagcagggatgggagacagacggagagtggatctgctagcatcaaacggagtggttaggacactggcaagagatgggcagtactcgcagtcaggcctgtgctgtgccctatcggccccttgtctcagaagatgagcattctcctgtccccagccaacttcctgtccaggggcataggagatagcccccaagttctatagctatagggttcccaccagtgnaaacagattggctttttcgctattcctcttcgaagccccaaattcgttgttggaggcggtctccgctgtgtcatgccatgagcaaagagtgaagagagctgtgtccacagcacgaaggggtctccttggccagtgtccaagccccctttcctggatatcttcacccttaaagaacagtcacaaggccacccattggttgaggaagtcattggagaatgggagtttcggaatctggctgccgagtgacagcatccctgaatcatgcgttccctgcttgtcccagctttccttccatcctccaccccagggaggatgcagggactggccagaatggaggaagagctggaaagactcgtgggcctcagtccctcattgcaggctgaaggtgggcagcggagcacatagtcttgtcccttccaaagcatggccagtttagactgattcttcctatctggcttctaaagtctagcaccctcctaaagttactcaccttccctggctctgcggcctggattaagctcatttctattttgcaacccattcccccattttcctctctcctcgtgccgcctcgtgccgaattcggcgcgccgtcgacttcatactctctccc

SEQ ID NO: 72123 - DNA, 767 bp, Homo Sapiens
  misc_feature (66)..(66): n is a, c, g, or t
  misc_feature (95)..(95): n is a, c, g, or t
  misc_feature (101)..(101): n is a, c, g, or t
  misc_feature (109)..(110): n is a, c, g, or t
  misc_feature (118)..(118): n is a, c, g, or t
gtcttgtgacagcatcgcaagccagctgatcagagacagaccctgttagatgcatattgcacatcnaactgctccctcacacctgcatggggagnagtgcntctctccnngtgctccnttcccagatctccccacctgggctcagccagactcccattgggaggcttagttccatgtgtccatgaaggcccagcttctctggggagtgaccagctgcccaggagaaactcctgcatgcagaagagactcacaggtttgggttcgcaggcacgaactttggaaaccggaagagactggcgcacttacaccaggctctaatcccccacctgatggctggcagcaaagagccaacgcaaggggcagaagcctgctcaaagtccagacacagtccgtgaagagagagcccctctcaagaattaggtccaggctgggaggaatgtggggggagcttgtagttcctggctcagtcttttctcaggggagtggcaccccagtatccacttggcagatcctagttggataactgctcaagatgcaaagggagaatgggtggaaagaacagtgacgtggaagaggtttgggatactggcctaagacatacagaaacgtgagttgggtttaggggacagctgtgcagagagatggggcatgctgactcggcaggtcaaggccttgtggctgctggccctatcgggcccctttgtctcatgaagattgacctcgtgccgaattcggcgcgccgtcgacttcatactctctccccgtta

SEQ ID NO: 72124 - DNA, 796 bp, Homo Sapiens
ttaggggcgagagggtatgaagtcgacggcgcgccgaattcggcacgagggccgcagagccagggaaggtgagtaactttaggagggtgctagactttagaagccagataggaagaatcagtctaaactggccatgctttggaagggacaagactatgtgctccgctgcccaccttcagcctgcaatgagggactgaggcccacgagtctttccagctcttcctccattctggccagtccctgcatcctccctggggtggaggatggaaggaaagctgggacaagcagggaacgcatgattcagggatgctgtcactcggcagccagattccgaaactcccattctccaatgacttcctcaaccaatgggtggccttgtgactgttctttaaggctgaagatatccaggaaagggggcttggacactggccaaggagaccccttcgtgctgtggacacagctctcttcactctttgctcatggcatgacacagcggagaccgcctccaacaacgaatttggggctacgaagaggaatagcgaaaaagcaaatctgtttcaactgatgggaaccctatagctatagaacttgggggctatctcctatgcccctggacaggacagttggctggggacaggagaagtgctcaatcttcatgagacaaaggggcccgatagggccagcagccacaaggccttgacctgccgagtcagcatgccccatctctctgcacagctgtcccctaaaccaactcacgtttctgtatgtcttaaggcagtatccaaaactcttcccc

SEQ ID NO: 72125 - DNA, 595 bp, Homo Sapiens
  misc_feature (52)..(52): n is a, c, g, or t
ataaccgggccaccggccgggagcaggaagcccaggtggagcagctgctggngatggtcgagggcttggtgctggagcacaagggcgcccattactccaacgaggtgtatgagctggcgcaggtgctgcgctgggcaggccctgaggagcggctcccggcgggtggcggagcgcgtggcagccagggtgcagaggaggccatggggcgcctggctgtcggcccggctgtggaagtggctgaagtcccccaggagctggaggctgggcctggccctgctgctggggggcgcgctcctgttctgggtgctgctccacaggcggtggtcggaggccgttgcggaggtcgggcctgactgacagcgcaggtcctaaaactgaaggcaacttggttaagggaggctgaattcttggagctgaagggaaaacttcattccaacggaaggaatcctgtagtttcaggcatagttttaatgacacagaaaactttgctgcatcacctttgcaactttgccaaagctcagagttcactttttaagtttttaactcattttaaatgatgtgtatgcagagttttaaaataaattcgtctaacatt

SEQ ID NO: 72126 - DNA, 2053 bp, Homo Sapiens
  misc_feature (1991)..(2013): n is a, c, g, or t
ggtccggaattcccgggatcgaccgcatgacgctgacgatggccgtggagctgcccgactccttctcccctgaactacgctccctgctggaggggttgctgcagagggatgtcaaccggagattgggctgcctgggccgaggggctcaggaggtgaaagagagcccctttttccgctccctggactggcagatggtcttcttgcagaagtaccctcccccgctgatccccccacgaggggaggtgaacgcggccgacgccttcgacattggctccttcgatgaggaggacacaaaaggaatcaagttactggacagtgatcaggagctctaccgcaacttccccctcaccatctcggagcggtggcagcaggaggtggcagagactgtcttcgacaccatcaacgctgagacagaccggctggaggctcgcaagaaagccaagaacaagcagctgggccatgaggaagactacgccctgggcaaggactgcatcatgcatggctacatgtccaagatgggcaaccccttcctgacccagtggcagcggcggtacttctacctgttccccaaccgcctcgagtggcggggcgagggcgaggccccgcagagcctgctgaccatggaggagatccagtcggtggaggagacgcagatcaaggagcgcaagtgcctgctcctcaagatccgcggtgggaaacagttcattttgcagtgcgatagcgaccctgagctggtgcagtggaagaaggagctgcgcgacgcctaccgcgaggcccagcagctggtgcagcgggtgcccaagatgaagaacaagccgcgctcgcccgtggtggagctgagcaaggtgccgctggtccagcgcggcagtgccaacggcctctgacccgcccacccgccttttataaacctctaatttattttgtcgaatttttattatttgttttcccgccaagcggaaaaggttttattttgtaattattgtgatttcccgtggccccagcctggcccagctcccccgggaggggcccgcttgcctcggctcctgctgcaccaacccagccgctgcccggcgccctctgtcctgacttcaggggctgcccgctcccagtgtcttcctgtgggggaagagcacagccctcccgccccttccccgagggatgatgccacaccaagctgtgccaccctgggctctgtgggctgcactctgtgcccatgggcactgctgggtgggcccatcccccctcaccaggggcaggcacagcacagggatccgacttgaattttcccactgcaccccctcctgctgcagaggggcaggccctgcactgtcctgctccacagtgttggcgagaggaggggcccgttgtctccctggccctcaaggcctcccacagtgactcgggctcctgtgcccttattcaggaaaagcctctgtgtcactggctgcctccactcccacttccctgacactgcggggcttggctgagagagtggcattggcagcaggtgctgctaccctccctgctgtcccctcttgccccaacccccagcacccgggctcagggaccacagcaaggcacctgcaggttgggccatactggcctcgcctggcctgaggtctcgctgatgctgggctgggtgcgaccccatctgcccaggacggggccggccaggtgggcgggcagcacagcaaggaggctggctggggcctatcagtgtgccccccatcctggcccatcagtgtacccccgcccaggctggccagccccacagcccacgtcctgtcagtgccgccgcctcgcccaccgcatgccccctcgtgccagtcgcgctgcctgtgtggtgtcgcgccttctcccccccggggctgggttggcgcaccctcccctcccgtctactcattccccggggcgtttctttgccgatttttgaatgtgattttaaagagtgaaaaatgagactatgcgtttttataaaaaatggtgcctgnnnnnnnnnnnnnnnnnnnnnnncctgagcagcggccgcaagcttattccctttagttgaggg

SEQ ID NO: 72127 - DNA, 2051 bp, Homo Sapiens
aaggcagtactctaacggtttaaggtagcgaggcctgggtggcgaattcggcacgagggatcttttcccagaagctggggtacctgctcttccgagacttctgcctgaaccacctggaggaggccaggcccttggtggaattctatgaggagatcaagaagtacgagaagctggagacggaggaggagcgtgtggcccgcagccgggagatcttcgactcatacatcatgaaggagctgctggcctgctcgcatcccttctcgaagagtgccactgagcatgtccaaggccacctggggaagaagcaggtgcctccggatctcttccagccatacatcgaagagattggtcaaaacctccgaggggacgtgttccagaaattcattgagagcgataagttcacacggttttgccagtggaagaatgtggagctcaacatccacctgaccatgaatgacttcagcgtgcatcgcatcattgggcgcgggggctttggcgaggtctatgggtgccggaaggctgacacaggcaagatgtacgccatgaagtgcctggacaaaaagcgcatcaagatgaagcagggggagaccctggccctgaacgagcgcatcatgctctcgctcgtcagcactggggactgcccattcattgtctgcatgtcatacgcgttccacacgccagacaagctcagcttcatcctggacctcatgaacggtggggacctgcactaccacctctcccagcacggggtcttctcagaggctgacatgcgcttctatgcggccgagatcatcctgggcctggagcacatgcacaaccgcttcgtggtctaccgggacctgaagccagccaacatccttctggacgagcatggccacgtgcggatctcggacctgggcctggcctgtgacttctccaagaagaagccccatgccagcgtgggcacccacgggtacatgggctccggaggtcctgcagaagggcgtggcctacgacagcagtgccgactggttctctctggggtgcatgctcttcaagttgctgcgggggcacagccccttccggcagcacaagaccaaagacaagcatgagatcgaccgcatgacgctgacgatggccgtggagctgcccgactccttctcccctgaactacgctccctgctggaggggttgctgcagagggatgtcaaccggagattgggctgcctgggccgaggggctcaggaggtgaaagagagcccctttttccgctccctggactggcagatggtcttcttgcagaagtaccctcccccgctgatccccccacgaggggaggtgaacgcggccgacgccttcgacattggctccttcgatgaggaggacacaaaaggaatcaagttactggacagtgatcaggagctctaccgcaacttccccctcaccatctcggagcggtggcagcaggaggtggcagagactgtcttcgacaccatcaacgctgagacagaccggctggaggctcgcaagaaagccaagaacaagcagctgggccatgaggaagactacgccctgggcaaggactgcatcatgcatggctacatgtccaagatgggcaaccccttcctgacccagtggcagcggcggtacttctacctgttccccaaccgcctcgagtggcggggcgagggccgaggccccgcagagcctgctgaccatgaaggagatccagtcggtggaggagacgcagatcaaggagcgcaaggtgcctgctccctcaagaatcgcggaggggaaaacagatccattttggcagtgcgaatagcgaccctggagctgggggcagtgggaacaaggagctgcggccgacccctaccgggaagggcccaccagcttggggcacccggttgccccaagaaggaagaaacaacccgccgcctcccccctgggtgggaacgtgaaaaagggggccccctgggccccacggggggcagtggccaagcggcctttggaacccgccccacccggctttttataaaaccctctaaattaagttttgggccgaatttttt

SEQ ID NO: 72128 - DNA, 505 bp, Homo Sapiens
  misc_feature (331)..(345): n is a, c, g, or t
aatatattttattttctctagaaattactcaaacaaaagcagccttctatcttgccttgtcttaatgctttaaaataaccaaactggagatctaactaccaaactgttcattatattattaaataccaactttggttacagtatagtgtctttactttagctgatggttctgtaaccttgtgctttttaaagcaatttttatgttttggtgcaaaagttgtccagtgtctcttgttcccttcactagagaacatgcttagaggtatgtttgtaggtatttttgtttagaagaactatttcatgcgctccattttatttattataataggtnnnnnnnnnnnnnnnggttgtaattcatcacccatgtaaacatgctcatgaagttgaaagtaattaagatttgatacactgatatcaatttatttatgtaactaaatcactgttttataaacttgttaatgatcaacaatttttgttttgattaaaattagttttttgaaagttg

SEQ ID NO: 72129 - DNA, 494 bp, Homo Sapiens
  misc_feature (20)..(20): n is a, c, g, or t
  misc_feature (52)..(52): n is a, c, g, or t
  misc_feature (171)..(171): n is a, c, g, or t
  misc_feature (208)..(208): n is a, c, g, or t
  misc_feature (318)..(332): n is a, c, g, or t
aaacaaaagcagccctcctntccttgccctgtccttaatgcctttaaaatancccaaacgggagatcctaacctccccaaacgggtccaataaattattaaaatccccaaccttgggttaccagtaaagtgccctttacctttagcctgatggttcggtaacccttgtgcnttttaaagcaaattttatgttttggtgcaaaagttgnccagtgtctcttgttcccttcactagagaacatgcttagaggtatgtttgtaggtatttttgtttagaagaactatttcatgcgctccattttatttattataataggtnnnnnnnnnnnnnnnggttgtaattcatcacccatgtaaacatgctcatgaagttgaaagtaattaagatttgatacactgatatcaatttatttatgtaactaaatcactgttttataaacttgttaatgatcaacaatttttgttttgattaaaattagttttttgaaagcttga

SEQ ID NO: 72130 - DNA, 1384 bp, Homo Sapiens
  misc_feature (709)..(866): n is a, c, g, or t
  misc_feature (869)..(870): n is a, c, g, or t
  misc_feature (881)..(893): n is a, c, g, or t
  misc_feature (936)..(1028): n is a, c, g, or t
  misc_feature (1075)..(1106): n is a, c, g, or t
  misc_feature (1189)..(1203): n is a, c, g, or t
  misc_feature (1223)..(1254): n is a, c, g, or t
  misc_feature (1261)..(1269): n is a, c, g, or t
aaacccttacaaggggagcatcagctctggaaagtgtgactctgtaggagtgtagaaggcagtggtgtatgatcttagcctcgtcctgatgcctgaatccagccagctgttgctctgacccacagcaatagagcaagttacccatcaccagcatttgtacagagcagggaattctggttttagtccattggtagcattgtgtgtatgaggagattcaacaccacagacagctgcaggactcgatatccatggcttctttccatcacaaaacgggtagaaacacattcactgcttcagggttctaatctgtgtgtctccttatgactccatttctgtaagctactctgtaactttgatatatgctgtattttctttctttaaaagatttagatgttttttcagcaagctagccatacaaccattgtatctctttctcttcagtatggtttagagcccagatcagttagtaggctttcgttgtcttctctttcaatacatgtacatctttactgtttgaaaagtgttacagctgtcaaagaatcttcatggacctgaagataatttcttgtgaagttgaatgcaagtgtactgtcattcatagtgtttatatcaaaataccaggaatcttcacttttgctaccttgatatagcattgggctatcatgttacaacattgaaatacattgatttattaaaaaatacttttatnnnnnnnnnnnnnnnnnnnnnnnnnnnnnnnnnnnnnnnnnnnnnnnnnnnnnnnnnnnnnnnnnnnnnnnnnnnnnnnnnnnnnnnnnnnnnnnnnnnnnnnnnnnnnnnnnnnnnnnnnnnnnnnnnnnnnnnnnnnnnnnnnnnnnnnnnnnnnnaannggggagggggnnnnnnnnnnnnnaaaaaaaattcttaaaacctttttgggggcgggggcccccccnnnnnnnnnnnnnnnnnnnnnnnnnnnnnnnnnnnnnnnnnnnnnnnnnnnnnnnnnnnnnnnnnnnnnnnnnnnnnnnnnnnnnnnnnnnnncgccccgggggggcccaaccgccgttttttctaaaaaaccccccccnnnnnnnnnnnnnnnnnnnnnnnnnnnnnnnntgtctttaaaccaagggggcccccccgggggtttttttaaaatatatatccccccccgcggcccgccgttggtttttttaaannnnnnnnnnnnnnnaaaaaaatacaccaaaactnnnnnnnnnnnnnnnnnnnnnnnnnnnnnnnnacaaaannnnnnnnntgggaagacatcgtgtttcccccgcgggggggttaacacaacccacctctttgaaacccgggttggaaaataataatctctctccccccccggggggaaaaaacacggcgccaac

SEQ ID NO: 72131 - DNA, 581 bp, Homo Sapiens
agaacacagttgtacctctttattggcacagtaacttttcaaaggctggtatgaataaaaagttccaagtagcaagacaaggtggtctggagccactgctcagaactttccgacagccgacgaaagcacatcaatgaacaaggccttgcattatgggagggttgaggatatacagcgagggaatcatgcagtgtaagtcccgggggacgagcgctgtgcgatgcagcccctactgctcaaaccagtacatggcagcgtgctcatttgtactgtgtaggcctttgaatgaatatgatcattttacaccaccggctatggatttgaagccatacgtgtttaaccgtgtgccatgtgatttcctgtgatctatgctgaagtcgggaggtgaaatttaactaaagggtacacaatccacttatccagaaatacagggcataggaaagaacagcctcctcatccatgagtaacacctaaaacatggggctcaattcatagttttgcaaggggtgacactggcgaagctaaaacaacaatgtagtttcaagatttaggtgcgttaggtgaaaaaaaggactgtggag

SEQ ID NO: 72132 - DNA, 1763 bp, Homo Sapiens
  misc_feature (129)..(221): n is a, c, g, or t
  misc_feature (1587)..(1602): n is a, c, g, or t
ggcctgggtggctttctcagacgaggcccaggtagaggggtccgcgctggcggcggcggcggcgctgttccccgcgcggtccgcggagcggggtccgggctgcgcgacgtggggcggcggcggcactgnnnnnnnnnnnnnnnnnnnnnnnnnnnnnnnnnnnnnnnnnnnnnnnnnnnnnnnnnnnnnnnnnnnnnnnnnnnnnnnnnnnnnnnnnnnnntcccccgctggcggggcccggacagaagatggtgcagaagaaaccagccgaacttcagggtttccaccgttcgttcaaggggcagaaccccttcgagctggccttctccctagaccagcccgaccacggagactctgactttggcctgcagtgctcagcccgccctgacatgcccgccagccagcccattgacatcccggacgccaagaagaggggcaagaagaagaagcgcggccgggccactgacagcttctcgggcaggtttgaagacgtctaccagctgcaggaagatgtgctgggggagggcgctcatgcccgagtgcagacctgcatcaacctgatcaccagccaggagtacgccgtcaagatcattggagaagcagccaggccacattcggagcagggttttcagggaggtggagatgctgtaccagtgccagggacacaggaacgtcctagagctgattgagttcttcgaggaggaggaccgcttctacctggtgtttgagaagatgcggggaggctccatcctgagccacatccacaagcgccggcacttcaacgagctggaggccagcgtggtggtgcaggacgtggccagcgccttggactttctgcataacaaaggcatcgcccacagggacctaaagccggaaaacatcctctgtgagcaccccaaccaggtctcccccgtgaagatctgtgacttcgacctgggcagcggcatcaaactcaacggggactgctcccctatctccaccccggagctgctcactccgtgcggctcggcggagtacatggccccggaggtagtggaggccttcagcgaggaggctagcatctacgacaagcgctgcgacctgtggagcctgggcgtcatcttgtatatcctactcagcggctacccgcccttcgtgggccgctgtggcagcgactgcggctgggaccgcggcgaggcctgccctgcctgccagaacatgctgtttgagagcatccaggagggcaagtacgagttccccgacaaggactgggcccacatctcctgcgctgccaaagacctcatctccaagctgctggtccgtgacgccaagcagaggctgagtgccgcccaagtcctgcagcacccctgggttcaggggtgcgccccggagaacaccttgcccactcccatggtcctgcagaggtgggacagtcacttcctcctccctccccacccctgtcgcatccacgtgcgacctggaggactggtcagaaccgttactgtgaatgagtgaagatcctggaggaccctgggccccaggccagctcccatcgctgggggacggtgaacggccatgtgttaatgttacgatgtttttaaaagacnnnnnnnnnnnnnnnncctcaaaagtttttttaaagtgggggaaaaacatccaagcactttaattccaatgtaccaggtgaactgacggagctcagaagttttcctttacaccaactgtcaatgccggaattttgtattctgttttgtaaagatttaataaaagtcaaaaaacttgc

SEQ ID NO: 72133 - DNA, 933 bp, Homo Sapiens
  misc_feature (573)..(595): n is a, c, g, or t
  misc_feature (775)..(783): n is a, c, g, or t
  misc_feature (810)..(811): n is a, c, g, or t
  misc_feature (822)..(822): n is a, c, g, or t
  misc_feature (824)..(824): n is a, c, g, or t
acgagttccccgacaaggactgggcccacatctcctgcgctgccaaagacctcatctccaagctgctggtccgtgacgccaagcagaggctgagtgccgcccaagtcctgcagcacccctgggttcaggggtgcgccccggagaacaccttgcccactcccatggtcctgcagaggaacagctgtgccaaagacctcacgtccttcgcggctgaggccattgccatgaaccggcagctggcccagcacgacgaggacctggctgaggaggaggccgcggggcagggccagcccgtcctggtccgagctacctcacgctgcctgcagctgtctccaccctcccagtccaagctggcgcagcggcggcaaagggccagtctgtcctcggccccagtggtcctggtgggagaccacgcctgaccctcccatctcccctctgtacataggtcacccgtcccccaatcaaatctaaaggttttttaagctatcgccagccggtgtccagcgggctgcccctcctctgcctggattcccaggcactaagctcagctgaggggggtgttttatagaaggnnnnnnnnnnnnnnnnnnnnnnncctgtttccacccctccccgttattttttcctttggatggttaaaagcattgcaggcaccccgggaaggtgagcagaggggtaaggtgggtgggccttgcccccctccccgggtcccctgggcctggttccccctctgccaatgggacggggcccccaggtgtcacccttgtttgcgcannnnnnnnnagccccgccagggtttgaaccgagganncccacacaacnancacacccaccccaatttccaccaatcctccggatatcttggggggaaggtgagcactcaattcccgcccccctctcgcgttccataaagcgcaaggctcgcgcaaagtc

SEQ ID NO: 72134 - DNA, 511 bp, Homo Sapiens
  misc_feature (308)..(320): n is a, c, g, or t
gcggccgcccctcctgaatctcgtatgatggtcacagtccggtggccgtgggggtgctctgccttccctggtccccactgcccatatctgtggactgccccttccaaagacccctgggggggatggggcattccgcccacccctttccaccatcacttctcgcctgtcagtgattccatgtttcgtaacgggggattctctgcctttttgtatcaaagaacaagcaaatggacccccgcccgctgcaggcgcccatagccatcgggtctctaaagctgagtggctagcagcgtttgtttgtttgttgnnnnnnnnnnnnnctgaaggtgggacagtcacttcctcctccctccccacccctgtcgcatccacgtgcgacctggaggactggtcagaaccgttactgtgaatgagtgaagatcctggaggaccctgggccccaggccagctcccatcgctgggggacggtgaacggccatgtgttaatgttacgatgtttttaaaagacaaa

SEQ ID NO: 72135 - DNA, 588 bp, Homo Sapiens
  misc_feature (572)..(580): n is a, c, g, or t
ttagattatgataaataggtttgtcattttgcaagttacatgttttaaacatttatcaatgaagtcatcctttagacttgtaatcgccacattgtttcattattcagtttcctctgtaaagggatcttgagttgttttaatgtttttttctgcatctgaatctgcatgatttccaaaccctgtaccatctgaattttgcattttagcacttgcactattactcagcagcagtaacatggtaacacttaaaatggtactcggggacctccaaagactaaactgacaagccttcaaggagcccaggggtaagttaacttgtcaacggcatggtttaatcccttctttacacttgtgtaaatttcagttactggtcatagaaggctttcaatgttgagtggccttttattaacatgtttatggtactgcatagatacgggtatttattttaccctaagaagattttgaagtttaaaagtacttaaactatttggcaaagatttgtttttaaaaatctatttggtcaatctaaatgcattcattctaaaaaattttttgaaccagataaataaaannnnnnnnngacaccac

SEQ ID NO: 72136 - DNA, 821 bp, Homo Sapiens
  misc_feature (653)..(672): n is a, c, g, or t
  misc_feature (674)..(678): n is a, c, g, or t
  misc_feature (680)..(680): n is a, c, g, or t
gcacgaggcttgccccagtcactcctgtgcctgtggtagagagccttcagttgaatggcggtggcgacgtagcaatgcttgaacttacaggacagaatttcactccaaatttacgagtgtggtttggggatgtagaagctgaaactatgtacaggtgtggagagagtatgctctgtgtcgtcccagacatttctgcattccgagaaggttggagatgggtccggcaaccagtccaggttccagtaactttggtccgaaatgatggaatcatttattccaccagccttacctttacctacacaccagaaccagggccgcggccacattgcagtgcagcaggagcaatccttcgagccaattcaagccaggtgccccctaacgaatcaaacacaaacagcgagggaagttacacaaacgccagcacaaattcaaccagtgtcacatcatctacagccacagtggtatcctaactaccgtctttttgctaggacttaaactgacttgagtgtggcaaaaagttaacaaaaaaggagaaaaaatgaacaatcgtttgtggtttcttgggaaaacttttcataccaggtgatactattcaaaaaccccgttgtctccctgcaagtgctgatttgaaatgcagaagccacagtgaaaannnnnnnnnnnnnnnnnnnnannnnncntgttggccgcctcgtccctccacaagatacttactagattcttcttgttgcgccgcggccccaggaaggaagagcatggtggtcatatgttgtcttacgaggaacatgcctgatcgagaacagctgggtagtattcccaac

SEQ ID NO: 72137 - DNA, 1130 bp, Homo Sapiens
  misc_feature (700)..(713): n is a, c, g, or t
  misc_feature (823)..(823): n is a, c, g, or t
  misc_feature (879)..(879): n is a, c, g, or t
  misc_feature (938)..(938): n is a, c, g, or t
  misc_feature (1005)..(1005): n is a, c, g, or t
  misc_feature (1020)..(1020): n is a, c, g, or t
  misc_feature (1057)..(1057): n is a, c, g, or t
  misc_feature (1066)..(1066): n is a, c, g, or t
ggtcggaattccgggatcaggaacaaaggtggctctgtttaatcgactacgatcccagacagttagtaccagatacttgcatgtagaaggaggtaattttcatgccagttcacagcagtggggagccttttttattcatctcttggatgatgatgaatcagaaggagaagaattcacagtccgagatggctacatccattatggacaaacagtcaaacttgtgtgctcagttactggcatggcactcccaagattgataattaggaaagttgataagcagaccgcattattggatgcagatgatcctgtgtcacaactccataaatgtgcattttaccttaaggatacagaaagaatgtatttgtgcctttctcaagaaagaataattcaatttcaggccactccatgtccaaaagaaccaaataaagagatgataaatgatggcgcttcctggacaatcattagcacagataaggcagagtatacattttatgagggaatgggccctgtccttgccccagtcactcctgtgcctgtggtagagagccttcaggtgagaacgcctagtccaagttggccttcagctctttgcagctactctcagctgtgacctggcatcatttcatttcatgggagttttgatttttctccaatcgtctgattaggggatttttatatacaccatttgttgatttaaagnnnnnnnnnnnnnnttaggaggagcgtacttgccagaaaatttaaatgtaaataaacttgtatgttatcttgaaatgtttttagctagctttgtaataaaaaacattttaattgcccttttttnaaaaaacaaatgaagttgaatgagaatctaatttgtgtactttaatgaaaaatganaagttttctcagtggtgtgattttctgtgaattgcagtttgatggcggtggggacgtancaatgcttgaacttacaggacagaatttcactccaaaattttaccagtgtgggtttgggggatgtanaaagctgaaactatngtacaggtactttgataaaactttttgcatcatccanaaggttttntaaaggggttgtgggggaccaggaaggattcttttccctgggccctggaatggaaatggaatta

SEQ ID NO: 72138 - DNA, 1048 bp, Homo Sapiens
ttctatctcttaatcttaggctaaagtaaataatgccagcctgattggactgggttatactcagacccttcgaccaggtaagtaaaggaattagtaacagaggggttgaggtggaaggtgatagagaaaacaatgaaaataacctgcagaacaacctgtagtcactgtaagttgatttggaccattctgtaacatttggttgttcagacagaaaacaatacagatcaaatacttttgcattaaaaaagtatgtatttctgactataatgtggtcactttggcctttgagtttggttgatcactcattgcccttaaccctgaacttcagagaaagtttgccatgatcatgctttcctcattacacatcagatagttataaataaccgattgagtaatagctgtttgcttatagctcgtatacccagctacaatccacaccattgattccatctgttgtttctagaaagttcagatctaattgtaatacttgtttcaagtgattgtggtgttttcttcttcctaggagtcaaattgactttatcagctttaatcgatgggaagaacttcagtgcaggaggtcacaaggttggcttgggatttgaactggaagcttaatgtggtttgaggaaagcatcagatttgtccctggaagtgaagagaaatgaacccactatgttttggccttaaaattcttctgtgaaatttcaaaagtgtgaactttttattcttccaaagaattgtaatcctccccacactgaagtctaggggttgcgaatccctcctgagggagatgcttgaaggcatgcctggaagttgtcatgtttgtgccacgtttcagttcagttctgaagtgttattaaatgtgttcctcagcgacagtgtagcgtcatgttagaggagacgatctgacccaccagtttgtacatcacgtcctgcatgtcccacaccattttttcatgaccttgtaatatactggtctctgtgctatagtggaatctttggttttgcatcatagtaaaataaaataaacccatcacatttggaacat

SEQ ID NO: 72139 - DNA, 1652 bp, Homo Sapiens; identical to SEQ ID NO: 3364
  misc_feature (1400)..(1543): n is a, c, g, or t
  misc_feature (1551)..(1551): n is a, c, g, or t
  misc_feature (1582)..(1582): n is a, c, g, or t
  misc_feature (1584)..(1584): n is a, c, g, or t
  misc_feature (1588)..(1600): n is a, c, g, or t

SEQ ID NO: 72140 - DNA, 1295 bp, Homo Sapiens
agcgaggcctgggtggcgaattcggcacgaggggaatgggccccaaacgggacagactgctcttgctgggcagtggtgtgggaacagtgcgtctctatgacacggaagccaagaagaatctctgtgaaatcaatatcaacgacaacatgcccagaatcctgtctcttgcgtgcagccccaacggggcctctttcgtctgttcggcagcagctccgagcctcacttcccaggtggacttctcagcaccagacatcggcagcaagggcatgaaccaggttcctggcaggctgctgctgtgggacacgaaaaccatgaagcagcagctccagttctccctggatccagaacccattgctatcaactgtacagccttcaatcacaacgggaacctgctggtcacaggggcagctgatggcgtcatccggctgtttgacatgcagcagcatgagtgcgcgatgagctggagggcccactacggggaggtctactctgtggagttcagctatgatgagaacaccgtgtacagcatcggcgaggacgggaagttcatccagtggaacatccacaagagtggcctcaaggtatccgagtacagcctcccctcagatgccacgggccccccttagtgctagtctggatacagcggctacaagcaggttcaagtccccaggggccgactcttcgcttttgactcagagggaaattacatgctgacatgttctgccacaggcggcgtcatctacaagctgggtggcgatgagaaggttctggagagctgcttgagcctaggtggccaccgagacccctgtggtcaccgtggactggagcactgccatggactgtgggacctgcctcaccgcctccatggatggcaagatcaagctgaccaccctcctggcccataaagcctgatgacttgccccaagggccacccgaggaagcagtattatctgcggtggggggaggagatataggacaggaaaaccacgtgctccactccagctccctgccagtgcagtgactctgcagggaaagactggcaaggaggctcaggtgcttccatctgtggtgactggaatgggacccacgtggagtaggtgacatatgcttcccagagactggtattgtggctgtgccaggagtacatgtgagactatgggaggaaagctccggaagaaggagaaacattgcagtggctactgtgttggcccagtagaaattgacagtattttgtatatatgtgcccatttatctttttcttttttaaaaaaagagaatactcttgtggtcccctg

SEQ ID NO: 72141 - DNA, 725 bp, Homo Sapiens
  misc_feature (19)..(19): n is a, c, g, or t
  misc_feature (76)..(76): n is a, c, g, or t
  misc_feature (120)..(143): n is a, c, g, or t
gagatatattcagggtccncaggaactcctcggtccagagaccaagtggtggccttggaaagcagatgtcaggctntggtgtgcctgtgaccaccctcattgctcccatattatcccccnnnnnnnnnnnnnnnnnnnnnnnngtagagacttggcctcccagaacccccttcctctgctcctccatgaatgacaattccaggcctcccctacctcatgtcctctcatttgggggattgctccgtgctgtccctttctctcaaggccgaagttgggaagtgagaaaccatgtttttaacttgtggctgcttttgctgctgctgctcctccgtatctggctgtatgggtggagaacccaccccctgcccaccacaggggtctccttccaggccactcaggacatttttagcttctctcctccccatgttcccttttttctctaaagtcccctgacatcagccctcccaactcctaagagggactacccatgagagtggggttctgaggctcccctatggggacagttccgttcttgaagtgtcagtgttggggaatatctgtggcctatgaggcccatctcaggtttggggatcccccagtccctatgatcagtgttggagtacccccctgggagagcctagtttctttgaggccccaggccctcttttaactacctttgaataggtgttatccctgtatttatggaaataaagttccatttcctc

SEQ ID NO: 72142 - DNA, 560 bp, Homo Sapiens
  misc_feature (402)..(435): n is a, c, g, or t
caaagacagtgacagctgactgagggcaaagagcaggcaccactcagaacgtggtgagtacagctcagctcagcactcagtcagtggtaacttgtgcccagccctgtgctaggcgctgacattaacaggagcaaccagggcccaattcctggccttggagctcaaatctttcctttgatttgtgctcctgatcatcaaggccccagtggcaaccatgtggtaagtggccaaccaagccctacccagggtcacccaacacactctgccttgagcctctcctcagggtatattccttgcgtggattatgtggccgtagcatgttacagttcaaacatgtctccactaccctgttaagagcagcctgggaacgtacaggccatcaagactatttagttaaatacnnnnnnnnnnnnnnnnnnnnnnnnnnnnnnnnnnttgtaagcactttttttgtaaaaccaatgtctgttttgttacatacctttcgtgtcgtgctttgtaaatgtcttatttgtgtaataaagttaatgcaagtagaagtgctggcactgaaatccaga

SEQ ID NO: 72143 - DNA, 409 bp, Homo Sapiens
  misc_feature (128)..(161): n is a, c, g, or t
gttctggatttcagtgccagcacttctacttgcattaactttattacacaaataagacatttacaaagcacgacatcaaaggtatgtaacaaaacagacattggttttacaaaaaaagtgcttacaannnnnnnnnnnnnnnnnnnnnnnnnnnnnnnnnngtatttaaataaatagtcttgatggcctgtacgttcccaggctgctcttaacagggtagtggagacatgtttgaactgtaacatgctacggccacataatccacgcaaggaatagaccctgaggagaggctcaaggcagagtgtgttgggtgaccctgggtagggcttggttggccacttaccacatggttgccactggggccttgatgatcaggagcaaaaatcaaaggaaagatttgagctccaag

SEQ ID NO: 72144 - DNA, 2023 bp, Homo Sapiens
ggaggcttccccaccctgtttaccctctactccccaaacctcaccaggtcctggtgagagtctatgccattcccaggagcatgggattcccacggacctggggtatgctgtggccccccaccactcgggtgtgtaccccatccacacgcagctctatgaggcctggaaatccgtgtggggcatccaggtgaccagcactgaggagtatccccatctccgccctgcccgcttaccgccgtggcttcattcacaatggcattatggtgctgccccggcagacatgtggcctcttcactcacacaatcttctataatgagtatcctggaggctctcgtgaactagaccggagcatccgaggtggagagctctttctgacagtgctgcttaatccgatcagcatctttatgacccatctgtccaattatggaaatgaccggctgggcctatacacctttgagagcttggtgcgcttcctccagtgttggacacggctgcgcctacagacccttcctcctgtcccacttgcacagaagtactttgaacttttccctcaggagcgaagccccctttggcagaatccctgtgatgacaagaggcacaaagatatctggtccaaggagaaaacctgtgatcgtctcccgaagttcctcattgtgggaccccagaaaacagggactacagctattcacttcttcctgagcctgcacccagctgtaactagcagcttccctagccccagcacatttgaggagattcagttcttcaacagccctaattaccacaagggtattgactggtacatggatttcttccctgttccttccaatgccagcactgatttcctatttgaaaaaagtgccacctactttgactctgaagttgtaccacggcggggggctgccctcctgccacgagccaagatcatcacagtgctcaccaaccctgctgacagggcctactcctggtaccagcatcagcgagcccatggagacccagttgctctgaactataccttctatcaggtgatttcagcctcctcccagacccctctggcactacgctccctgcagaaccgctgtcttgtccctggctactattctacccatctacaacgctggctgacttactacccctctggacagttgctgattgtggatgggcaagagctgcgtaccaacccagcagcctcaatggagagcatccagaaagttcctgggtatcacaccctttctgaactacacacggaccctcaggtttgatgatgataagggattttggtgccagggacctgaaggtggtaagactcgctgtctaggccggagcaaaggccggaggtatccagatatggacactgagtcccgtcttttccttacggattttttccggaaccataatttggagttgtcgaagctgctgagccggcttggacagccagtgccctcgtggcttcgggaagaactgcagcattccagtctgggctgatgtcccagcctcccataccagcaaaatgccccctgcttccctaaggggcaggtccagagcagggcccacaagggggattagagtggcctggcccctccccctctacctcagtagcccccaggcctgagatggctgagaagggaagggtatccttttcccacagttctgggacaaataaaggggcttcctttggtaccccacataatagtgctaggtacctttgacccatcatcttgggaggtggggaggaatgagagggtccaggcagggtgtaggggaatgtattagtccaatgagatttccctcttcatccgcagcagtgtatctattctatacctggctatgggagagaccccttgcatgggagggaccccttgctatggcccctttagccaggcagtgggatctacctgtggcccggcctccctaatgtcattcacattgaatggggatgaggtcggacagtggctcatagagccgagtatgagccctagctgtgggctagaaatgtccttaataaacatccttatttttcaaaaaa

SEQ ID NO: 72145 - DNA, 514 bp, Homo Sapiens
gtcgtccgggtttcgatgcgcggcggtgtggggagggcggagatggggatctcctcagtgctggtcacctggatgccccacacggatttccaggcctcatagagctgcgtgtggatggggtacacacccgagtggtggggggccacagcataccccaggtccgtgggaatcccatgctccagagcaaactgtttgttgagcctcatctggtcagccagcacggagcgattgtggaacaggtgtggctgcatgtggctccacatgtgggggaaccaccagaactctttgcggtgcttcagcagcatgtcgtcccctgcatcctcctcctctgtccctatgaccacacgctgaccactgaccacagccagtcagcccctgttccctcctttattttgtaacaacactgaccaccttccatccctgatccttgcctaagactttctatttgccccactgccaacttgccatccagccacccatgcgaacctaaattcatgggtggcatcgataaaca

SEQ ID NO: 72146 - DNA, 1467 bp, Homo Sapiens
  misc_feature (1272)..(1375): n is a, c, g, or t
  misc_feature (1382)..(1421): n is a, c, g, or t
ctggtaccggtccggaattcccgggatatcgtcgacccacgcgtccgcccacgcgtccgccattgcaacaaaatacattctttttgctctaaaatatttatgaagaaaatacttaaatgttatgtatatggtggtaataagggaaaaatcaagtattataaacaagaatgaaggtttttgtaaagatttctgttcagcgttttgcaaggtaaaattttaggcaagttttccctgaagttatgtgtatgtgagtattctcattcttcccaacttgcctttgaagagtgaaataccattattatcaagtagactactgttcagcttttattcctgccctgctgtttatcccttaagaatgagtttcttagacttttccaatatgtgattttttttcccatttagaatggtgattttaaatgtgtgagtgcatgtactatcttatctcagatatttgcacccccaatctgcccccaactcccaaaagctagaacactgccaactgatctgttataggtcctttagaaacacataattaacacttaaggttgggtgctgctaattctttgcaaaaatccaaatattgttaagggaccagggagatgccactaccccttgattttccatctaaaaatatacatgtttatgtaaacaaatctttccatatccatagtgacttttcaagtatttaagcctaaagattttgatctcacatttttatacctgtttaaattgctcacagttattacatacacatcagccatcaactaaagttgtactttaaaaatttactacaatatgtacatttctaagtcaaacacttgtgacttttgctttaattccatgaatgttcctgcctccttgatatttgtatttattctttttttctctagagtagaggtataattgtgtgatatttcagaaatacagataaatgattcaaaaagtcacagttaaggagaatcatgtttctttgatcatgaataactgattagtaagtcttgcctatattttcctgatagcatatgacaaatgtttctaaggtaacaagatgagaacagataaagattgtgtggtgttttggatttggagagaaatattttaatttttaaatgcagttacaaattataatgtattcatatttgtactttctgttaaaatgcatgattgcagaattgtttagattttgtgtttattcttgatgaaaagctttgtttgttcttgtttttaagtttgcactcaaatcttaagaaataaatccacccatgttatcannnnnnnnnnnnnnnnnnnnnnnnnnnnnnnnnnnnnnnnnnnnnnnnnnnnnnnnnnnnnnnnnnnnnnnnnnnnnnnnnnnnnnnnnnnnnnnnnnnnnnnnttggcgnnnnnnnnnnnnnnnnnnnnnnnnnnnnnnnnnnnnnnnngggcccggggccccaaagggaaaggaaccggggcaatactttttcc

SEQ ID NO: 72147 - DNA, 755 bp, Homo Sapiens
  misc_feature (21)..(21): n is a, c, g, or t
  misc_feature (70)..(70): n is a, c, g, or t
  misc_feature (97)..(97): n is a, c, g, or t
tgcattcccaacatcccatancatgtttcccactccagaaagtctctgggtttattccagcttttatctntgacgtgtcccattcacccccatggtntggtttggtttggttttgttttttaaatcaagaaagtttcagggaatcaaaagaggtcggacattttttaacctagcagaagtacagagtcatatattgtgctacgaatattgttgtagtacagaaaacccactttgcccgttagtgtgtggatagtatgtgtgtgtccgcactcatgataacttgaatgttgaaccagacatagggttcatttttgaaaggttaaaccacactgtttcaggaacttgctccaaatactacttggttatcccttcctttaccagttagaactaaagagtgtgatgtatgaacacactgggttgggattttctgttgaggatatgcagggcattttggcatgaggcaaatacagaagcaagatttcattctacttggtgatttgaatcatgacagtcctcattccaatctctctttaattctctctggccctgcccacactctgtatttgaaaatcttgtttttgctctttccggagcttcacccctctacttacatattgtaaagttgtataaatctatcattgaaaggtcctctctgccagcagtggtgccaccctttggtttgctgtggtactttgctgtgtactccgtggcatcatgttactgtgtaaataaattcattttaatacacactaaaa

SEQ ID NO: 72148 - DNA, 2951 bp, Homo Sapiens
  misc_feature (691)..(722): n is a, c, g, or t
  misc_feature (2735)..(2746): n is a, c, g, or t
  misc_feature (2880)..(2890): n is a, c, g, or t
gcgagagagtatgaagtcgaggcgcgccgaattcggcacgagggttgtgtccaccttgccgacgtcgctagccgtggggctgtcctgggaaggcggacggcgagcgcccggtgtccgcactcggccgcctgccgtgcccgtctgcgcccgtgtcatcctcactcgggacgcagggaccgtttttaaatcacaggggcgtgtgtcagcctgccctaggacttcatgtctatatatttccccattcactgccccgactatctgagatcggccaagatgactgaggtgatgatgaacacccagcccatggaggagatcggcctcagcccccgcaaggatggcctttcctaccagatcttcccagacccgtcagattttgaccgctgctgcaaactgaaggaccgtctgccctccatagtggtggaacccacagaaggggaggtggagagcggggagctccggtggccccctgaggagttcctggtccaggaggatgagcaagataactgcgaagagacagcgaaagaaaataaagagcagtagagtccctgtggactcccatgggtcataccagccagcatctgttcctgaactgtgtttttcccatcatgacggaagaagagagtgagccgcatttgttctgaaaatgtcaaacgaaggcttctgttttgcacctgcagatcaccgagttggnnnnnnnnnnnnnnnnnnnnnnnnnnnnnnnngaaatttgccgagcagtggagccctctgacaatttgcaaggccctctgagaaaggaagctgcttagagccagggggttagtgggtgaggggagcgagtgctgtttttgagatcattatctgaactcaggcagcctagtagaggcagtggtgggattccaatgggtcttggtgggtgggaggtggggcatgtgcaaagcaagcaaggaacatttggggtaagaaaacaaacatgaggcaaaagaaaaaatacatgtttttaagaaaacattgagcagagaactgcagccaggatgcgctcagcagacattcactctggctgctgggacatcagaaaacaaagtcttcatctctctctccagtttcacccaccccaccctttgctttcatttcaggtgtgttggtctatatgacagggaggagagtaaaggagagcaggagcaattggctgcctgcaaagccagctggaggtgaagtgcaggaaaggaaaggtcaccccattctactccatggcctctctgctcccagctgtggtaggctcacatagccagtgtgatcggtttttaagaggcagtgcttttcagcttttctccctgatatatccattttgcttcccagcactttttaggagtagtgagagcacttcctgcccttgttggaagccccagggtggacactcagcacgaaggtctctcccttaactgctgcccttccaagacttgctcccgagatggagtgggcgtggtcttccaggctggcccttccttctcctcaccgccaccttccctgccccagccccagcagccatgggtacatgggtccccagctcacctatggattcccgccagtctgcccagctgcagtactcacgccccatgggggatcttggtctgtttttcttgtgggagcctagtggagagcagacgtggctttttatgtgtcttgttggggaggtgacttgcatggtggggacaaggctgtcgtggcaaccttgggatcgagtttgagactaaaggatgtcatgagatccctggcttctccccatgttgttcccggacaagggcagaagggaggcatggcaagggacctctgctgtccttactcaacagtggtcctcatccctccccacctcccactgcttcctgcaagggcaccagttgtatgagaaagttggcctttggacttaggatttcttattgtagctaagagccatctgaagcagcaggttgcaggacaaatgcttcagtccgccgagagcagtaccgtgtggccaagaggtggactcagagccttccttgagctaaactcggccaaccaaggcacgcagcatgtcccctcaggtctccagtcagtccaggttgaccctcagttctggacgtgtgtatatagctgtatttaatacctcaaggtcattgtggctctggggatgccggggcaggaggacgagggtgcgctgtggacacagcagtccgcggaattccgttctgggaagccaatggtcgccggcacccttgcttcctccctctgttgtctgcctgtgtgacacacatcaatggcaataacttcttccaactcctcgcagaagtgggagaggccggcagcctgcaccgagaggggctttcctctctcttgctccccgcttcgttctgttttggctgcagagagtggttcatccatactctcattccctcgcctccccttgtggacgggggtcttgccttttcaattcctgtgttttggtgtcttcccttatctgctaccctgaatcacctgtcctggtcttgctgtgtgatgggaacatgcttgtaaactgcgtaacaaatctactttgtgtatgtgtctgtttatgggggtggtttattatttttgctggtccctagaccactttgtatgaccgtttgcagtctgagcaggccaggggctgacagctaatgtcaggaccctcagcggtggagcctgctggggggacccagctgctcttggacaagtggctgagctcctatctggcctcctcnnnnnnnnnnnnccaagtaatttgtgtgtatttctaactgattgtattgaaaaaattcctagtatttcagtaaaaatgcctgttgtgagatgaacctcctgtaacttctatctgttcttttttgaggctcagggagaaactagcannnnnnnnnnnccaaactactttttgtcactgtgacagttgtaaataaagtttgaaaatgctttccactctg

SEQ ID NO: 72149 - DNA, 822 bp, Homo Sapiens
  misc_feature (718)..(734): n is a, c, g, or t
agagtatgaagtcgacggcgcgccgaattcggcacgaggggagagcggggagttgtgtccaccttgccgacgtcgctagccgtggggctgtcctgggaaggcggacggcgagcgcccggtgtccgcactcggccgcctgccgtgcccgtctgcgcccgtgtcatcctcactcgggacgcagggaccgtttttaaatcacaggggcgtgtgtcagcctgccctaggacttcatgtctatatatttccccattcactgccccgactatctgagatcggccaagatgactgaggtgatgatgaacacccagcccatggaggagatcggcctcagcccccgcaaggatggcctttcctaccagatcttcccagacccgtcagattttgaccgctgctgcaaactgaaggaccgtctgccctccatagtggtggaacccacagaaggggaggtggagagcggggagctccggtggccccctgaggagttcctggtccaggaggatgagcaagataactgcgaagagacagcgaaagaaaataaagagcagtagagtccctgtggactcccatgggtcataccagccagcatctgttcctgaactgtgtttttcccatcatgacggaagaagagagtgagccgcaattgttctgaaaatgtcaaacgaggcttctgttttgcacctgcagatcaccgagttgggtttcttttcttttcttgccnnnnnnnnnnnnnnnnngaaatttgccgagcagtggagccctctgacaatttgcaaggccctctgagaaaggaagctgcttagagccagggggttagggggtggg

SEQ ID NO: 72150 - DNA, 2057 bp, Homo Sapiens
tggtaccgtccggatttaatcccgggatatcgtcgacccacgcgtccggtgtaccttctagtcccgccatggccgctctcacccgggacccccagttccagaagctgcagcaatggtaccgcgagcaccgctccgagctgaacctgcgccgcctcttcgatgccaacaaggaccgcttcaaccacttcagcttgaccctcaacaccaaccatgggcatatcctggtggattactccaagaacctggtgacggaggacgtgatgcggatgctggtggacttggccaagtccaggggcgtggaggccgcccgggagcggatgttcaatggtgagaagatcaactacaccgagggtcgagccgtgctgcacgtggctctgcggaaccggtcaaacacacccatcctggtagacggcaaggatgtgatgccagaggtcaacaaggttctggacaagatgaagtctttctgccagcgtgtccggagcggtgactggaaggggtacacaggcaagaccatcacggacgtcatcaacattggcattggcggctccgacctgggacccctcatggtgactgaagcccttaagccatactcttcaggaggtccccgcgtctggtatgtctccaacattgatggaactcacattgccaaaaccctggcccagctgaaccccgagtcctccctgttcatcattgcctccaagacctttactacccaggagaccatcacgaatgcagagacggcgaaggagtggtttctccaggcggccaaggatccttctgcagtggcgaagcactttgttgccctgtctactaacacaaccaaagtgaaagagtttggaattgaccctcaaaacatgttcgagttctgggattgggtgggaggacgctactcgctgtggtcggccatcggactctccattgccctgcacgtgggttttgacaacttcgagcagctgctctcgggggctcactggatggaccagcacttccgcacgacgcccctggagaagaacgcccccgtcttgctggccctgctgggtatctggtacatcaactgctttgggtgtgagacacacgccatgctgccctatgaccagtacctgcaccgctttgctgcgtacttccagcagggcgacatggagtccaatgggaaatacatcaccaaatctggaacccgtgtggaccaccagacaggccccattgtgtggggggagccagggaccaatggccagcatgctttttaccagctcatccaccaaggcaccaagatgataccctgtgacttcctcatcccggtccagacccagcaccccatacggaagggtctgcatcacaagatcctcctggccaacttcttggcccagacagaggccctgatgaggggaaaatcgacggaggaggcccgaaaggagctccaggctgcgggcaagagtccagaggaccttgagaggctgctgccacataaggtctttgaaggaaatcgcccaaccaactctattgtgttcaccaagctcacaccattcatgcttggagccttggtcgccatgtatgagcacaagatcttcgttcagggcatcatctgggacatcaacagctttgaccagtggggagtggagctgggaaagcagctggctaagaaaatagagcctgagcttgatggcagtgctcaagtgacctctcacgacgcttctaccaatgggctcatcaacttcatcaagcagcagcgcgaggccagagtccaataaactcgtgctcatctgcagcctcctctgtgactcccctttctcttctcgtccctcctccccggagccggcactgcatgttcctggacaccacccagagcaccctctggttgtgggcttggaccacgagcccttagcagggaaggctggtctcccccagcctaacccccagcccctccatgtctatgctccctctgtgttagaattggctgaagtgtttttgtgcagctgacttttctgacccatgttcacgttgttcacatcccatgtagaaaaataaagatgccacggaggaggttgtaggctcagcctctg

SEQ ID NO: 72151 - DNA, 1668 bp, Homo Sapiens
ggcacgaggcgcgcctcgcttgctgcgcgctgccggcgctccttcctcctcggctcgcgtctcactcagtgtaccttctagtcccgccatggccgctctcacccgggacccccagttccagaagctgcagcaatggtaccgcgagcaccgctccgagctgaacctgcgccgcctcttcgatgccaacaaggaccgcttcaaccacttcagcttgaccctcaacaccaaccatgggcatatcctggtggattactccaagaacctggtgacggaggacgtgatgcggatgctggtggacttggccaagtccaggggcgtggaggccgcccgggagcggatgttcaatggtgagaagatcaactacaccgagggtcgagccgtgctgcacgtggctctgcggaaccggtcaaacacacccatcctggtagacggcaaggatgtgatgccagaggtcaacaaggttctggacaagatgaagtctttctgccagcgtgtccggagcggtgactggaaggggtacacaggcaagaccatcacggacgtcatcaacattggcattggcggctccgacctgggacccctcatggtgactgaagcccttaagccatactcttcaggaggtccccgcgtctggtatgtctccaacattgatggaactcacattgccaaaaccctggcccagctgaaccccgagtcctccctgttcatcattgcctccaagacctttactacccaggagaccatcacgaatgcagagacggcgaaggagtggtttctccaggcggccaaggatccttctgcagtggcgaagcactttgttgccctgtctactaacacaaccaaagtgaaaggagtttggaattgaccctcaaaacatgttcgagttctgggattgggtgggaggacgctactcgctgtggtcggccatcggactctccattgccctgcacgtgggttttgacaacttcgagcagctgctctcgggggctcactggatggaccagcacttccgcacgacgcccctggagaagaacgcccccgtcttgctggccctgctgggtatctggtacatcaactgctttgggtgtgagacacacgccatgctgccctatgaccagtacctgcaccgctttgctgcgtacttccagcagggcgacatggagtccaatgggaaatacatcaccaaatctggaacccgtgtggaccaccagacaggccccattgtgtggggggagccaggaccaatggccagcatgctttttaccagctcatccaccaaggcaccaagatgataccctgtgacttcctcatcccggtccagacccagcaccccatacggaaagggtctgcatcacaagaatcctcctgggccaacttcttgggccccagacagaaggccctgaatgaaggggaaaaattccaaccggagggaggcccccggaaagggaaactcccaggcctggcgggggccaattattccccagaagggaacccttggaaaagggttggctggcccacaataaaggggtccttttgaaaaggaaaaattccgcccccaacccaaaacttcctaattggggggttccaccccaaaggcttccaccacccaattttcctgggccttgggggaaacccccttttggggtccccccccattgtggtattgga

SEQ ID NO: 72152 - DNA, 754 bp, Homo Sapiens
  misc_feature (232)..(302): n is a, c, g, or t
  misc_feature (721)..(721): n is a, c, g, or t
  misc_feature (739)..(739): n is a, c, g, or t
gcggccgcggctgtaggctttttttaattcttcccagtagaaacgtaggaacaatttcgtgaacgcaatccggagtgcccaacatggcggcggccgtaaggtgcatgggtagagccttgatacatcatcaaaggcatagcctttccaagatggtttatcagacatcactttgttcttgttctgtaaacatccgagtgcccaacagacattttgctgctgctacaaagtctgnnnnnnnnnnnnnnnnnnnnnnnnnnnnnnnnnnnnnnnnnnnnnnnnnnnnnnnnnnnnnnnnnnnnnnngcatatccctatatggaaggcgaacctgaggatgatgtctatttaaaacgcttatacccgagacagatatatgaggtggagaaagctgttcacttacttaagaaatttcaaattcttgactttactagtccaaagcaaagtgtttatcttgatttgacactggatatggcactgggaaagaagaaaaacgtggagccatttaccagtgttcttagtttgccatacccatttgcttccgaaatcaataaagttgctgtatttacagagaatgcatcagaggtcaaaatagcggaagaaaatggagctgcatttgcaggaggcactagtctgatacagaagatttgggatgatgaaattgttgcagacttttacgtagctgttccagaaataatgcctgaacttaatcgattaaggaaganactgaataaaaatatccnagctttctcgaattc

SEQ ID NO: 72153 - DNA, 1169 bp, Homo Sapiens
  misc_feature (154)..(224): n is a, c, g, or t
ccaacatggcggcggccgtaaggtgcatgggtagagccttgatacatcatcaaaggcatagcctttccaagatggtttatcagacatcactttgttcttgttctgtaaacatccgagtgcccaacagacattttgctgctgctacaaagtctgnnnnnnnnnnnnnnnnnnnnnnnnnnnnnnnnnnnnnnnnnnnnnnnnnnnnnnnnnnnnnnnnnnnnnnngcatatccctatatggaaggcgaacctgaggatgatgtctatttaaaacgcttatacccgagacagatatatgaggtggagaaagctgttcacttacttaagaaatttcaaattcttgactttactagtccaaagcaaagtgtttatcttgatttgacactggatatggcactgggaaagaagaaaaacgtggagccatttaccagtgttcttagtttgccatacccatttgcttccgaaatcaataaagttgctgtatttacagagaatgcatcagaggtcaaaatagcggaagaaaatggagctgcatttgcaggaggcactagtctgatacagaagatttgggatgatgaaattgttgcagacttttacgtagctgttccagaaataatgcctgaacttaatcgattaaggaagaaactgaataaaaaatatccaaagctttctcgaaattccattggccgtgacatccccaaaatgcttgaattatttaaaaatggacatgaaattaaggtagatgaagaaagggagaactttctccagaccaaaatagcaacattggatatgtcaagtgaccagatagctgccaatctgcaagcagttattaatgaagtttgtaggcacagaccgctgaatttgggtccctttgtggtacgtgctttccttcgtagttcaacaagtgaaggtttattactgaagattgatccattgttgcctaaagaagtaaaaaatgaagaaagtgaaaaagaagatgcctaaatgtggtgaattgtgaaattactttcagtggtttaagaagcaatggagaaaatgataatacagcataatttttacatttgatgtcttgttattgatcatacttgaaagtgaactttaacattgaaaaatcgtacagtcatttcaagaataagaaaataaaattttctctttgtctgaacctgcaaa

SEQ ID NO: 72154 - DNA, 1470 bp, Homo Sapiens
  misc_feature (1142)..(1196): n is a, c, g, or t
cttacggtctaggtacgaggcctggtgtcgaattcggcacgaggccaagaagaactgatggagatcgtgaagaagctgatgacccacgtagacaaggcagagggtaccacctaccgtgacgagctgctcaccaagatcattgacatctgcagccagtccaactaccagtacatcaccaacttcgagtggtacatcagcatcctggtggagctgacccggctggagggcacacggcacggccacctcatcgccgcccaaatgctggacgtggccatccgcgtgaaggccatccgcaagttcgccgtgtcccagatgtctgcgctgcttgacagtgcacacctgctggccagcagcacccagcggaacgggatctgtgaggtgctgtacgctgccgcctggatctgcggggagttctcagagcatctgcaggaaccacaccacactttggaggccatgctgcggcccagagtcaccacgctgccaggccacatccaggccgtgtatgtgcagaacgtggtcaagctctacgcctccatcctgcagcagaaggagcaggccggggaggcagagggcgctcaggccgtcacccagctcatggtggaccggctgccccagtttgtgcagagcgcagacctggaggtgcaggagcgggcgtcctgcatcctgcagctggtcaagcacatccagaagcttcaggccaaggacgtgcctgtggcagaggaggtcagcgctctctttgctggggagctgaacccagtggcccccaaggcccagaagaaggttccagtccccgaaggcctggacctggacgcctggatcaatgagccactctcggacagcgagtcagaggacgagaggcccagggccgtcttccacgaggaggagcagcggcgtcccaagcaccggccgtcggaggcggacgaggaagagctggctcggcgccgagaggcccggaagcaggagcaggccaacaaccccttctacatcaagagctcgccatcgccacagaagcggtaccaggacaccccgggcgtggagcacattcccgtggtgcagattgacctctccgtccccttgaaagttccagggctgcctatgtcagatcagtatgtgaagctggaggaggagcggcggcaccggcnnnnnnnnnnnnnnnnnnnnnnnnnnnnnnnnnnnnnnnnnnnnnnnnnnnnnnncaagcgccgccacagctcgctgcccacggagagcgacgaggacatcgcccctgcccagcaggtggacatcgtcacagaggagatgcctgagaatgctctgcccagcgacgaggatgacaaagaccccaacgacccctacagggctctggatattgacctggataagcccttagccgacagcgagaaactgcctattcagaaacacagaaacaccgagacctcaaaatcccctgagaaggacgttcccatggtagaaaagaagagcaagaaaccc

SEQ ID NO: 72155 - DNA, 1107 bp, Homo Sapiens
  misc_feature (11)..(11): n is a, c, g, or t
  misc_feature (32)..(32): n is a, c, g, or t
  misc_feature (40)..(40): n is a, c, g, or t
  misc_feature (91)..(91): n is a, c, g, or t
  misc_feature (109)..(109): n is a, c, g, or t
  misc_feature (133)..(133): n is a, c, g, or t
  misc_feature (182)..(182): n is a, c, g, or t
ctcggtgttanttaccccaagcctgagtggtntttaactntatggtgccccccgtgtagacatcccgagtcatttgttgcgtgaaatatcntgaccatcctttttactngtgactcttcccaatctctttggncaagaagtccccttctcgcccccaaaccagcaaaaggactcccccaccntgggtctgtgccctgccccgcgctgggcgccgagtcctgaaatgtggcttcaggggctcctgtcctgggccagggcctgatgggcaccacgtgaggggcacttggtggacagggcggggctgacgtggcctcctctggggtcgcctgcttttgacccaaaggtcctgacggttgcgtccgggggaggggaaggaagggccgctgtcgccaaggttttctctcccagaacccacagtgggaaagcggtcttgccaggcgttgtccattgtcagtgtgctcgtgggctggtgactgggtcttgggatcccaggccacgcgccagccaggctgtgggcagggcggggccagggacgccaaagagaggttgcagtcagaaccgtggacggggtgggttgaggcctctctgccacccgtcttcctggtcagcagaagtgcatctcggcttgggtttggggtggtccgcatcccctgcttgccactatgcgcaccaaggtttccccacatccttcccagcacccttaggaaggcccaggcagggcctggaagcagcggacctgggctgttctgtgttgaaggagtgtgcccagtgcccttgggcaggacctgtgagagccacctcacaggcagagcccccaccaggcagggcaaggagactccgctcactccccacggccagcgtgggcacaggactgacccttcttcagagataatgacattttatcttctccttttgatgaaaactgtcactttagcatgtaatccattacagaatcccatgcagtgattccaggatttgaaattgtatgatgtgttacataagaatttatttgctatcgacattcccgtataaagagagagacatatcacgctgctgtcatgattttgtgtcaagatgatccaataaagttgtaaaacaggcatttcc

SEQ ID NO: 72156 - DNA, 1710 bp, Homo Sapiens
  misc_feature (72)..(122): n is a, c, g, or t
  misc_feature (379)..(469): n is a, c, g, or t
  misc_feature (513)..(535): n is a, c, g, or t
  misc_feature (671)..(733): n is a, c, g, or t
  misc_feature (1598)..(1598): n is a, c, g, or t
  misc_feature (1627)..(1627): n is a, c, g, or t
ccccttgaaggttccagggctgcctatgtcagatcagtatgtgaagctggaggaggagcggcgccaccggcnnnnnnnnnnnnnnnnnnnnnnnnnnnnnnnnnnnnnnnnnnnnnnnnnnnagggcaagcgccgccacagctcgctgcccacggagagcgacgaggacatcgcccctgcccagcaggtggacatcgtcacagaggagatgcctgagaatgctctgcccagcgacgaggatgacaaagaccccaacgacccctacagggctctggatattgacctggataagcccttagccgacagcgagaaactgcctattcagaaacacagaaacaccgagacctcaaaatcccctgagaaggacgttcccatggtnnnnnnnnnnnnnnnnnnnnnnnnnnnnnnnnnnnnnnnnnnnnnnnnnnnnnnnnnnnnnnnnnnnnnnnnnnnnnnnnnnnnnnnnnnngctgaggacctggacttctggctgtctaccaccccaccgcctgnnnnnnnnnnnnnnnnnnnnnnngttccatccacgggggagctcagtgtgaacactgtcactaccccgaaggacgagtgtgaggacgccaagacggaggcgcagggcgaggaggacgatgccgaggggcaagaccaggacaagaaatctcccaagcctnnnnnnnnnnnnnnnnnnnnnnnnnnnnnnnnnnnnnnnnnnnnnnnnnnnnnnnnnnnnnnncagcctccaggcagcgaggaggcagcgggggagccggtgcagaatggcgcgccagaggaggagcagctcccgcctgaggccagctactccctcctcgctgaaaattcctatgttaaaatgacctgtgacatcccggggcagtctgcaggaggacagccaggtcactgtgggccatcgtgctgggagaacaggagcagcagcattcctcaagggcatggagctcagcgtgctggactcactcaatgccaggatggcccggccgcagggctcctccgtccacgatggcgtccccgtgcctttccagctgcccccaggcgtctccaacgaagcccagtatgtgttcaccatccagagcatcgtcatggcgcagaagctcaaggggaccctgtccttcattgccaagaatgacgagggtgcgacccacgagaagctggacttcaggctgcacttcagctgcagctcctacttgatcaccactccctgctacagtgacgcctttgctaagttgctggagtctggggacttgagcatgagctcaatcaaagtcgatggcattcggatgtccttccagaatcttctggcgaagatctgttttcaccaccatttttccggcctcctgaagctgtggccaagggcagcccaagaaggtggcccctgctctgggggtggggctgcagccatgcaatgtccgggaagcctaacactgcccgctctgttgcagttgtggagcgagtggactcctgcgcctccatgtacagccgctccatccagggccaccatgtctgcctccctggtgaaaagggtgagaactctgtctcagtcgacgggaagtgcagtgactccacgctactgagcaacttgttanaagagatgaaggcgacgctggccaagtgntgagagctgcctgcgagccccggacccacccgggggagcacgtaccccagggaccgcaggccctgacgtgtctcgccctctcc

SEQ ID NO: 72157 - DNA, 2298 bp, Homo Sapiens
  misc_feature (426)..(514): n is a, c, g, or t
  misc_feature (548)..(582): n is a, c, g, or t
acacctgggggtggagaaaataaccggggtgagaatgacctcacggtccccttgcaggtacaagggctgccaatgtcagatcagtatgtgaagctggaggaggagcggcggcaccggcagaagctggagaaggacaagaggaggaaaaagaggaaggagaaggagaagaagggcaagcgccgccacagctcgctgcccacggagagcgacgaggacatcgcccctgcccagcaggtggacatcgtcacagaggagatgcctgagaatgctctgcccagcgacgaggatgacaaagaccccaacgacccctacagggctctggatattgacctggataagcccttagccgacagcgagaaactgcctattcagaaacacagaaacaccgagacctcaaaatcccctgagaaggacgttcccatggtnnnnnnnnnnnnnnnnnnnnnnnnnnnnnnnnnnnnnnnnnnnnnnnnnnnnnnnnnnnnnnnnnnnnnnnnnnnnnnnnnnnnnnnnnaggctgaggacctggacttctggctgtctaccannnnnnnnnnnnnnnnnnnnnnnnnnnnnnnnnnngttccatccacggggggagctcagtgtgaacactgtcactaccccgaaggacgagtgttgaggacgccaagacggaggcgcaaggcgaggaagaccatgccgaggggcaagaccaagacaagaaatctcccaagcctaagaagaagaagcacaggaaggagaaggaggagcggaccaaaggcaagaagaagtccaagaagcagcctccaggcagcgaggaggcagcgggggagccggtgcagaatggcgcgccagaggaggagcagctcccgcctgagtccagctactccctcctcgctgaaaattcctatgttaaaatgacctgtgacatccggggcagtctgcaggaggacagccaggtcactgtggccatcgtgctggagaacaggagcagcagcatcctcaagggcatggagctcagcgtgctggactcactcaatgccaggatggcccggccgcagggctcctccgtccacgatggcgtccccgtgcctttccagctgcccccaggcgtctccaacgaagcccagtatgtgttcaccatccagagcatcgtcatggcgcagaagctcaaggggaccctgtccttcattgccaagaatgacgagggtgcgacccacgagaagctggacttcaggctgcacttcagctgcagctcctacttgatcaccactccctgctacagtgacgcctttgctaagttgctggagtctggggacttgagcatgagctcaatcaaagtcgatggcattcggatgtccttccagaatcttctggcgaagatctgttttcaccaccatttttccgttgtggagcgagtggactcctgcgcctccatgtacagccgctccatccagggccaccatgtctgcctcctggtgaaaaagggtgagaactctgtctcagtcgacgggaagtgcagtgactccacgctactgagcaacttgttagaagagatgaaggcgacgctggccaagtgttgagagctgcctgcgagccccgcaccaccccgcggagcacgtacccagggaccgcagccctgacgtgtctcgcctctcctcagtcgtgtgtactgtacccaagcctgagtgttaatttaactctatgttgtccgccgtgtagacatccgaggtcatttgttgcgttgaattatctgaccatccttttttactgtgactcttcccattctctttggcaagaagtccccttctcgcccccaaaccagcaagggactcccccacctgggtctgtgccctgccccgcgctgggggccgagtccttgaatgtggcttcaggggctcctgtcctgggccagggcctgatgggcaccacgtgaggggcacttggtggacagggcggggctgacgtggcctcctctggggtcgcctgcttttgacccaaaggtcctgacggttgcgtccgggggaggggaaggaagggccgctgtcgccaagttttctctcccagaacccacagtggggaaagcggtctggccaggcgttgtcaatgtcagtgtgctcgtgggctggtgactgggcctggggatcccagggcaagcgcaacaggtgtgggcaggcgggcccgaccgccagagaggtgcgtccgaccgtgcgggggggttgggccccgcgccgttccggtccaaggtctcgtggtggggggcgccccgtggcctgcccgtccccttctccttagcggggtaccggctttgcgcct

SEQ ID NO: 72158 - DNA, 882 bp, Homo Sapiens
cgctaggtacgaggcctgggtggcgaattcggcacgaggctgtgctgatcatgtacaaggtgttcctgaagtaccccgagtcgctgcgccctgcctttccccggctgaaggagaagctggaggaccccgaccccggggttcagtcggctgccgtcaatgtcatctgcgagctggccagacgcaaccctaagaactacctgtccctggccccgctctttttcaagctgatgacgtcctccaccaacaactgggtcctcatcaagatcatcaagctgttcggtgctcttactcctttggaaccgcggctgggcaagaagctgatcgagcccctcaccaatctcatccacagcacgtctgccatgtctctcctctatgaatgtgtgaacaccgtgattgcagtgctcatctcgctgtcctccggcatgcccaaccacagcgccagcatccagctttgtgttcagaaattaaggatattgatcgaggactccgatcagaacttgaagtacctggggctgctggcaatgtccaagatcctgaagacccaccccaagtccgtgcagtcccacaaggacctcatcctgcagtgcctggacgacaaggacgagtccatccggctgcgggccctggacctgctctatgggatggtgtccaagaagaacctgatggagatcgtgaagaagctgatgacccacgtagacaaggcagagggtaccacctaccgtgacgagctgctcaccaagatcattgacatctgcagccagtccaactaccagtacatcaccaacttcgagtggtacatcagcatcctggtggagctgacccggtctggagggcacacgcacggccacctcatcgccgtcccaaagcaaaagcatcctgcta

SEQ ID NO: 72159 - DNA, 923 bp, Homo Sapiens
tgcagtggggtagggttacctgttaattgctgagactcagatgaaagtccagctctccctgggcaaccctagagggcagcagaggaccccagagctcattcaggccttgctgcttgttctaaactacaccttaggattttttcttctttccaaaacattccattgattttataaagactttctatagagaggctttcacttttgagttctttgagtttaaagattgcttttcttgaaacgctctttttttaatgtagaaaaattttactttttcaaatatgcatacaatttgtaaaacagtagaagcaaattcattttaatgaccatgtaaagagcgaatgtcagacagtattattaccagtttattcaaattacatacatgttcctaccaaggtggaaagaaattcaaacctcatggtaaaacttaagcacgatttaagataaaagcatagtatttcttcagtgtagacttattaagtgccttattgaacaggatcttaacctgctttttctgtttttttgaaagagttaatgcaattgttgaagcttctaaccaagaaacaacttaaggaattgggagacttggtcccctcgttgtcagggttctggctataagtacctccccacctttgggttttcttaaatatgccaaaaggaattctagtttttataaccaatgggtttttttgtttgtgtgcttatggatttgtgtaatcattgatgcttaatgttgtggattcataatataaaaagtggctcctgtcctttatatttattcatgtgctagaaatagtatgcattatataaagagtatgaagttttcataagcctttatatttcaagctctttatttaaacattgttggaatatgtggcataagccttgtttcatttatttaataaactggagtaatatataataat

SEQ ID NO: 72160 - DNA, 788 bp, Homo Sapiens
  misc_feature (90)..(184): n is a, c, g, or t
  misc_feature (186)..(313): n is a, c, g, or t
cctcttaatatttaattgaaccactcagtcggtactgaaacagttgttagggaggcctgtgttagtgagacctggcctgccacgtatggnnnnnnnnnnnnnnnnnnnnnnnnnnnnnnnnnnnnnnnnnnnnnnnnnnnnnnnnnnnnnnnnnnnnnnnnnnnnnnnnnnnnnnnnnnnnnnngnnnnnnnnnnnnnnnnnnnnnnnnnnnnnnnnnnnnnnnnnnnnnnnnnnnnnnnnnnnnnnnnnnnnnnnnnnnnnnnnnnnnnnnnnnnnnnnnnnnnnnnnnnnnnnnnnnnnnnnnnnnnnnnncggacctgaagtgacagtggctccttggggctgagggttgaaaggctgatgaactgcaaaggggtacaagaaactttggggcatagggaatttcctctatcttggttgtggcagtagttccgttagtgtatccatttgtaaacgtgcattgaattacacattttaaagtggtgcagtctgttgtaccgaaattatgcctttataaagttgatttcatcatcttaatttctccatactagcaattagcagctagaaaatgaaattcaataaaacataatagagattaacagccagaatcattacatgcttaacaatacatgcaatgaagcaggtacaaggcccctaaaagcaattggtgagaaaaattaaagaaggctaaataaatatatatcatgttcattgcttggaagactcaattttgttagcatattacatcaacacaattctgcttaatatttctagtaggagattttag

SEQ ID NO: 72161 - DNA, 524 bp, Homo Sapiens; identical to SEQ ID NO: 4623

SEQ ID NO: 72162 - DNA, 969 bp, Homo Sapiens
  misc_feature (304)..(304): n is a, c, g, or t
  misc_feature (315)..(315): n is a, c, g, or t
  misc_feature (338)..(338): n is a, c, g, or t
  misc_feature (360)..(360): n is a, c, g, or t
ttgcgtttgggacacagccttgattgagggaattgatgtcaatcctttaactatatacagtgcatcctaccagaacagttattgaccctatgacccagtactaaagaaaaagagtctaccatgtccatcctcagagaatctgcgaacgagctcagtatatatcgtgccttcacatgtgaggagctactaacactagtactctcacaatgaaggacctggaatgaaaaatctgtgtctaaacaagtcctctttagattttagtgcaaatccagagccagcgtcggttgcctcgagtaatctttcnatgggtacctntggaaaagctctcaggagacctnacctagatgcctattcaagctntggacagccatcagattgtcagccaagagccttttatttgaaagctcattcttccccagacttggactctgggtcagaggaagatgggaaagaaaggacagattttcaggaagaaaatcacatttgtacctttaaacagactttagaaaactacaggactccaaattttcagtcttatgacttggacacatagactgaatgagaccaaaggaaaagcttaacatactacctcaagtgaacttttatttaaaagagagagaatcttatgttttttaaatggagttatgaattttaaaaggataaaaatgctttatttatacagatgaaccaaaattacaaaaagttatgaaaatttttatactgggaatgatgctcatataagaatacctttttaaactattttttaactttgttttatgcaaaaaagtatcttacgtaaattaatgatataaatcatgattattttatgtatttttataatgccagatttctttttatggaaaatgagttactaaagcattttaaataatacctgccttgtaccattttgtaaatagaagttacttcattatatgttgcacattatatttaataaaatgtgtcaatttg

SEQ ID NO: 72163 - DNA, 1003 bp, Homo Sapiens
ccagaatgctggagcgtaggtgaaaggacaaaagccagacacatttcaacatgagggacccactgacagattgtccgtataataaagtatacaagaacctaaaggagttttctcaaaatggagagaatttctgcaaacaggtcacatctgttcttcagcaaagggcaaacctggaaattagctatgccaaaggacttcagaaactggcaagcaagctgagcaaagcattacagaacacgagaaaaagttgtgttagcagtgcctgggcctgggcctcagagggaatgaaatccacagcggacctgcatcaaaaacttggcaaagcaattgaattggaagcaataaaaccgacttatcaagtcctaaatgtacaagagaagaagagaaaatcacttgacaatgaagttgaaaagacagcaaatcttgtcattagcaactggaatcagcaaattaaggccaagaagaaattaatggttagtaccaagaaacatgaagcacttttccagcttgtagaaagctccaagcaatctatgactgagaaggagaagcggaagctcctcaataaactgacaaaatcaactgaaaagttggaaaaaggaagatgaaaattactaccaaaaaaacatggcgggttattctaccagactgaaatgggaaaacacactagagaactgctaccagagcattctggagctggagaaggaaagaattcaacttttatgcaataacttaaaccagtacagccaacatatttctctttttggccaaaccctgaccacatgccacacgcagattcactgtgccatcagcaagatgaccttgaacacagatatccaggcgtaatggaagaaactgcaatttatctacagaaaacaatctgagttcctgttacgggattctttgaagaagatcctaacagtgcatgggtacgagagacgaaagtcttactaaaccaaattttgaactgcgagcggacttgtaaaagcctcaaagaccaggacgg

SEQ ID NO: 72164 - DNA, 1070 bp, Homo Sapiens
cacatttcaacatgagggacccactgacagagtgtccggtataataaagtatacaagaacctaaaggagttttctcaaaatggagagaatatctgcaaacaggtcacatctgttcttcagcaaagggcaaacctggaaattagctatgccaaaggacgttcagaaactggcaagcaagctgagcaaagcattacagaacacgagaaaaagttgtgttagcagtgcctgggcctgggcctcagagggaatgaaatccacagcggacctgcatcaaaaacttggcaaagcaattgaattggaagcaataaaaccgacttatcaagtcctaaatgtacaagagaagaagagaaaatcagccaagaagaaattaatggttagtaccaagaaacatgaagcacttttccagcttgtagaaagctccaagcaatctatgactgagaaggagaagcggaagctcctcaataaactgacaaaatcaactgaaaagttggcacacggaagatgaacaattactaccaaaaaaacatggcgggttattctaccagactgaaatgggaaaacacactagagaactgctaccagagcattctggagctggagaaggacaagaattcaacttttatgcaataacttaaaccagtacagccaacatatttctctttttggccaaccctgaccacatgccacacgcagattcactgtgccatcagcaagattgacattgaaaaagatatccaggctgtaatggaacgaaactgcaattttatctacagaaaacaaatctgagttcctgttaacggattactttgaagaagatcctaacagtgcaatggataaagagagacgaaagtctttactaaaaccaaaattattgagactgcagagagacattgaaaaagcctcaaaagacaaggaaggtgtgtaaccatctctttgaatggccagaaaagggaccatatgatgctcagaggtttcattcagagttaggattgatctgcttttgctatttggcaggggtcttctcatttaaagaaccatatatcaaacttcagttgtgtgaacaaaaaaaa

SEQ ID NO: 72165 - DNA, 1124 bp, Homo Sapiens
cgttggtggggctgggggatgagagctgcaccgcgcgggacaagtcgccggcggcgcccgacggagcagaagagagagcatggagctggagaggatcgtcagtgcagccctccttgcctttgtccagacacacctcccggaggccgacctcagtggcttggatgaggtcatcttctcctatgtgcttggggtcctggaggacctgggcccctcgggcccatcagaggagaacttcgatatggaggctttcactgagatgatggaggcctatgtgcctggcttcgcccacatccccaggggcacaataggggacatgatgcagaagctctcagggcagctgagcgatgccaggaacaaagagaacctgcaaccgcagagctctggtgtccaaggtcaggtgcccatctccccagagcccctgcagcggcccgaaatgctcaaagaagagactaggtcttcggctgctgctgctgcagacacccaagatgaggcaactggcgctgaggaggagcttctgccaggggtggatgtactcctggaggtgttccctacctgttcggtggagcaggcccagtgggtgctggccaaagctcggggggacttggaagaagctgtgcagatgctggtagagggaaaggaagaggggcctgcagcctgggagggccccaaccaggacctgcccagacgcctcagaggcccccaaaaggatgagctgaagtccttcatcctgcagaagtacatgatggtggatagcgcagaggatcagaagattcaccggcccatggctcccaaggaggcccccaagaagctgatccgatacatcgacaaccaggtagtgagcaccaaaggggagcgattcaaagatgtgcggaaccctgaggccgaggagatgaaggccacatacatcaacctcaagccagccagaaagtaccgcttccattgaggcactcgccggactctgcccgagccttctaggctcagatcccagagggatgcaggagccctatacccctacacaggggccccctaactcctgtcccccttctctactcctttgctccatagtgttaacctactctcggagctgcctccatgggcacagtaaaggtggcccaaggggaaaa

SEQ ID NO: 72166 - DNA, 437 bp, Homo Sapiens
agcagcaggtcgccttgtgtttccccttctcttcgttggtgtgtgcatatgtcagtgcttcccccagcaccccaggcgtgtactttattttttccttttgatttgaggatatatgatccaggggaaatttcagtttggtataactactttaattagccataattattcattctaagtttttgctcagaaacaaatggcactggaaagaaattctttgttaaagggagaaagctaagcagttgcttttttggaggaggctttatatcggtagcctcatctcatgttttgattttgagaaggcgaaaagcctaaacaggatctccttgactccagagattaaggcctttcacgtctggattttttctccataggtcatctctgaatttgagcaatggtgaaacggaatctgtgaaaaccatgattgtccatgatgatgt

SEQ ID NO: 72167 - DNA, 2033 bp, Homo Sapiens
  misc_feature (601)..(646): n is a, c, g, or t
  misc_feature (1955)..(1964): n is a, c, g, or t
cccagaaaccctcctccccggctgaagtcaaaaaaatggtcgaagaagttttttagttttatagaagggtgcctggtgaagaattacatgcagcggccctctacagagcagcttttgaaacatccttttataagggatcagccaaatgaaaggcaagttagaatccagcttaaggatcatatagatcgtaccaggaagaggagaggcgagaaagatgaaactgagtatgagtacagtgggagtgaggaagaagaggaggaagtgcctgaacaggaaggagagccaagttccattgtgaacgtgcctggtgagtctactcttcgccgagatttcctgagactgcagcaggagaacaaggaacgttccgaggctcttcggagacaacagttactacaggagcaacagctccgggagcaggaagaatataaaaggcaactgctggcagagagacagaagcggattgagcagcagaaagaacagaggcgacggctagaagagcaacaaaggagagagcgggaagctagaaggcagcaggaacgtgaacagcgaaggagagaacaagaagaaaagaggcgtctagaggagttggagagaaggcgcnnnnnnnnnnnnnnnnnnnnnnnnnnnnnnnnnnnnnnnnnnnnnnttgaaagagaacaggagtatatcaggcgacagctagaagaggagcagcggcacttggaagtccttcagcagcagctgctccaggagcaggccatgttactggagtgccgatggcgggagatggaggagcaccggcaggcagagaggctccagaggcagttgcaacaagaacaagcatatctcctgtctctacagcatgaccataggaggccgcacccgcagcactcgcagcagccgccaccaccgcagcaggaaaggagcaagccaagcttccatgctcccgagcccaaagcccactacgagcctgctgaccgagcgcgagaggttcctgtgagaacaacatctcgctcccctgttctgtcccgtcgagattccccactgcagggcagtgggcagcagaatagccaggcaggacagagaaactccaccagcagtattgagcccaggcttctgtgggagagagtggagaagctggtgcccagacctggcagtggcagctcctcagggtccagcaactcaggatcccagcccgggtctcaccctgggtctcagagtgggctcccggggaacggcttcagagtgagatcatcatccaagtctgaaggctctccatctcagcgcctggaaaatgcagtgaaaaaacctgaagataaaaaggaagttttcagacccctcaagcctgctgatctgaccgcactggccaaagagcttcgagcagtggaagatgtacggccacctcacaaagtaacggactactcctcatccagtgaggagtcggggacgacggatgaggaggacgacgatgtggagcaggaaggggctgacgagtccacctcaggaccagaggacaccagagcagcgtcatctctgaatttgagcaatggtgaaacggaatctgtgaaaaccatgattgtccatgatgatgtagaaagtgagccggccatgaccccatccaaggagggcactctaatcgtccgccagagtacagttgaccaaaagcgtgccagccatcatgagagcaatggctttgccggtcgcattcacctcttgccagatctcttacagcaaaggcattcctcctccacttcctccacctccctcctccccatcctccagccagcccgacacccaccatgtcccccacagacacccccaggacaagctcactggctaatgagactcaatcccgctaggtagcacactcccagaaacacaaaatcttccctcctccctttacaccttttttatagacccccagaattacctaccgatttcttccatctaagcggaaacaacaagtggacattttnnnnnnnnnnaattttcctggggaatggggatggaaaccaggaagcccctaaggggaaagaatccttccccgggaaaag

SEQ ID NO: 72168 - DNA, 580 bp, Homo Sapiens
ttaaaaaaagagaatactcttgtggtcccctgatgtctctttctaggatgtgtgtcactttgcttcagtgacagccctcccacccagcctggctctgctggccccgaactgaacctctccaggctctcctgttgctttgccatggagccaggtcagctctctgtctgttctgctgggtaacaaggtttggcagttcctgtttctctgggcttaagtcaaggccacagaattctttttcttccctgaaagctggcagcttttgttacagaagattctcaggatgaaggcaggggctgaggcctctgctactggctgcccctttccatccagtggctgctgtttcccaagacgggctaagcgtttcttatctgaaatgcttgggacaggagtgttacagattttggattttttcagactttggaatatttgcatatatacataatgaggtatcttggtaggtctcatgtctaaacatgaaattcattcatgttttatatataccttatacatgtagcctgaaggtaactctatacagtattttaaataattttgtacatgaaacaaagtattgattgtggtc

SEQ ID NO: 72169 - DNA, 664 bp, Homo Sapiens
  misc_feature (425)..(442): n is a, c, g, or t
atcaacagcaagcacagccaccaccagcagcccctgcaggtgcaccaactacaactcaaactaatggacaaggagatcagcagaatccagccccagctggacaggttgattataccaaggcttgggaagagtactacaagaaaatgggtcaggcagttcctgctccgactggggctcctccaggtggtcagccagattatagtgcagcctgggctgagtattatagacaacaagcagcctattatgcccagacaagtccccagggaatgccacagcatcctccagcacctcagggccaataataagaagtggacaatacagtatttgcttcattgtgtgggggaaaaaaacctttgttaaatatatggatgcagacgacttgatgaagatcttaattttgtttttggtttaaaatagtgtttccnnnnnnnnnnnnnnnnnngaaaatgtacaaaatatctatcactactgataggaggttaatatttctgtgtagaaatgaaaattggtttgtttttagtatttagtgtagatgtacacattccagcaaatgtatttgcaattatgtggttgatgctttgtgatataaatgtactttttcaatgtatactttcacttttaaaatgcctgttttgtgctttacaataaatgatatgaaacctcc

SEQ ID NO: 72170 - DNA, 518 bp, Homo Sapiens
  misc_feature (201)..(209): n is a, c, g, or t
ctagtttttttgttcggttttgttttccatcaggaatttgagttctctctaacccagcttactgtgggacataggaaaactcagtagaaatacctttggtgatcttgttgagtttaagtctgatcttgatcttaaactcagtaagccactatctgcaattttgtacattatatagtattttgaagatatggaaccttatgnnnnnnnnntagcaaattagttctttttcccccagaggggaaagttatgttctgcaaatagtgtgtgtcttattttactgttgaacagcaattgctatttatttttttattgcctagaacttcaacatgttgtataggaatcctgtagtgccactagttaaatgccgaattctcatctggatgttaccatcaaacatcagtacacttgtcatttcacatgtgtttaatgtgacagtttttcagtactgtatgtgttaatttctactttttttaatatttaaaattgcttttaaataaacatattctcagttgatccca

SEQ ID NO: 72171 - DNA, 1138 bp, Homo Sapiens
  misc_feature (650)..(659): n is a, c, g, or t
  misc_feature (955)..(1004): n is a, c, g, or t
ctcatcaagaaggattgaagggataactatgaggtaagctggacattggagccgtgtttgctgccacgtcagcgtcttgctgggtgaatgtcaagccataaatgggctccagggctctggatctcatcagcattggaaatctattgcctctcatcagtctgaccaaattatgtagagcattaatgtagagactcccattaatgggaatacaagaggcagctggcataaaacatttctttcactttcctttcccactcagattgcttcaagagacgaacagaacacagggatcaaaaacaaggaaaatttagcaacttcattaccttctaataagtaattcctgttagccactgcatcccaccaaaactagtttatttttcccctcaaattcatgatttttacgtctgttacaaagggaattttgctgatagctctttgggtcccactgttccattttatgctaatagattccattctagggcccagccgtctcttgactgatggtgttccctttaacccttggcatgtataatagaattttggtgaatgaaagaacccaaataggccagatagtccccccaggccctgatatccataaaaggcttgggaatgcattatgtaattgtccttagtctttttgttgttttagnnnnnnnnnncaagatgggctcagatggatgcctacgtaaaaatggttcctagctgtgtactcataacttttctttgaattgagtagtgaaaggaaggaggaggaaaggaaattaaatgtccttctagtattctctggactcaagtctgacatatgagataataacctatattgaaatgccaagaattgtatctgaaacaagagaacagtttgacacatttatcatgccttcatattacatattaactgaaaccaattaataaacatatgaaatatccattgcacaaggcaaaggcacctaaaccnnnnnnnnnnnnnnnnnnnnnnnnnnnnnnnnnnnnnnnnnnnnnnnnnnaggggaacctatataattatgacccagtgatgtcttttggtgacttaagcttatgaattcaggttacaattgagttgattctagatggttactaccttgaaaaggatgttggtgccttatgtgacacgagccag

SEQ ID NO: 72172 - DNA, 785 bp, Homo Sapiens
  misc_feature (80)..(80): n is a, c, g, or t
gaccagcagtttcaagaggaaaaagtaaataaattgcagaagttacttatctttttagagggtctgctggatctgggaanaacaccattgtctcgatttctgcttggtcagaatcgtgatggcattgtgttcagcactgatgactattttcaccatcaagatgggtacaggtataatgttaatcaacttggtgatgcccatgactggaaccagaacagaggtttgttttgggctaagtgtcccaggatagaatatttggctaggagtcaaaagacctagattttattttcagcttaggtttttaccagctgaatgactgtaggcaagccgtttaaatagctttgagacctaatttctccatctgttagaggtggtgataattatacttgccctacctgatcagggtttttgtgaaaagcagagaatttagataaaacgctttgtaaactgtaaatagtttatcagtataagctggtaaaataatagcagcatgggatattttaagaggctttattttatacttgatgagtaaattcagagaactttgaatctgtaccattgttatgtagtcccaaagttatttccccgagaataatgctaatgttttccaaggcttaatatactggttgtgaatattaaaagtttttctcattgatattgctctacaagaaacctacttaatacattttttagcggacatgggtcaatttctgtttatcattaataggggttcttaacctgggctacacttttgaatttcttggggactttaaaaaaaagcaaaa

SEQ ID NO: 72173 - DNA, 627 bp, Homo Sapiens
attttaaactacttaaactccaagacaggctcactaactctttgtcaagtgcaacaacaaatgtgttagctgaaaatagctaatttaatgattatttgtgacacagacacgattatgtgagccaagagagcctccccacctctgtctcccctgtggaggaggaggtctttgtgtgcttttgtgtgatggttccactgaattcattacaatagaaatggacatttgatattcataacgatccaacatctgagcaatcttctttcgagacacaccatgtttattcctcttttctaattcttcaggatcaaatttccaccaagtttcaggttcatgaaactctactctgtatccttttcctatggcctacacaaaggaaaggaagaaaacaaaaacccaaagaagtacttcttaaagtaaaaagaaggcagacagttaaatttcatttcgacaatactatacacttgctcgaccaagaaaaatgacgctttataaaataatatggtttataacagttaagactatttaaccggataaattttgattactattctcaaggaatagtaattccttaagattactatccttaaggaaagtcaaaacaatatgaggctgggcgtggtggctcat

SEQ ID NO: 72174 - DNA, 2044 bp, Homo Sapiens
agggtcataataatggtctcttaaaacctgatgaagaaaagaaagatcttagtaataaagctatgccatcacattgtgattatcagcagaacttggggaatgagccagacaaatatccctgtaatggacaagtaatacctacattttgtgacacttcatttacttctttcaggcctgaatggcagtcagtatatccttttatagtgccctatggtccccctcttcccagtttgaactatcatttaaacattcagagattcagtggtccaccaaatccaccatcaaatattttccaagcccaagatgactctcagatacaaaatggatattatgtaaataattgtcatgttaactggaattgcatgacttttgatcagaacaatgaatatactgactgtagtgagaataggagtagtgttcatccctctggaaatggctgcagtatgcaagatcgatatgtgagtaatggtttctgtgaagtcagagaaagatgctggaaagatcattgtatggacaagcataatggaacagacaggtttgtgaaccagcagtttcaagaggaaaagttaaataaattgcagaagttacttattcttttaagaggtctgcctggttctgggaaaacaacattgtctcgaattctgcttggtcagaatcgtgatggcattgtgttcagcactgatgactattttcaccatcaagatgggtacaggtataatgttaatcaacttggtgatgcccatgactggaaccagaacagagcaaaacaagctatcgatcagggaagatctccagttataatagataacactaatatacaagcttgggaaatgaagccatatgtggaagtggccataggaaaaggatacagagtagagtttcatgaacctgaaacttggtggaaatttgatcctgaagaattagaaaagaggaataaacatggtgtgtctcgaaagaagattgctcagatgttggatcgttatgaatatcaaatgtccatttctattgtaatgaattcagtggaaccatcacacaaaagcacacaaagacctcctcctccacaggggagacagaggtggggaggctctcttggctcacataatcgtgtctgtgtcacaaataatcattaaattagctattttcagctaacacatttgttgttgcacttgaaaaagagttagtgagcctgtcttggagtttaagtagtttcaaataaaaaaaggctacagtgcctcacaaaggatgttcccagcaagttgtttaaattcccagcaagttgttaaagtgtaaataaaaatatatgaaattgtattttaaatgtttttatattctcttgttgtaatactcttggctgttatggaagcacctgagtaatagagtggtgggtaggagctaggactgtttttctacaatcgaattttaaactaatttatctattttatagacactatagaacagttttttaatagttcatatctaaatctaacttttcataaaactttacggtttttccttcactaccttaaatatgcaagaaatactgacttggtatagggtaccttagttttctctattcattagacaggtaaaattatatttcagctgattgatctgtgtgacaaaattatttcttagctataatcagcacatcacttagttcaaacaaaattccccagcaaatgttagatagtaggtatatcagtcacctggggagttttcttcataatatgcatattcatcttgtaatgcatacatagttatcatcctccttctcaacccatctccctaaccccacatgcttgccagttcttgaagggataaagtgattgtaataatgttttacttctctctgttcaatttaatgtgatataattctagtataaaaatattttggacagttgcttaacatggtcataagaggatttgtactatagaatatcttctagtactaatttttctgtagagcaaattatatttctctcactggatagtttttagatgtgtttcttcatataaaattaaaaactgagatggaattcaaaaa

SEQ ID NO: 72175 - DNA, 381 bp, Homo Sapiens
tacgaatcgagcggtaccctatgtctcgatcgtcagcttgttttgctctgtctggttccagtcatgggcatcaccaagttgattaacattatacctgtacccatcttgatggtgaaaatagtcatcagtgctgaacacaatgccatcacgattctgaccaagcagaattctctgtctcccctgtggaggaggaggtctttgtgtgcttttgtgtgatggttccactgaattcattacaatagaaatggacatttgatattcataacgatccaacatcagagcaatcttctttcgagacacaccatgtttattcctcttttctaattcttcaggatcaaatttccaccaagtttcaggttcatgaaactctactctgtatcc

SEQ ID NO: 72176 - DNA, 703 bp, Homo Sapiens
atgatatcaaatggtccattgctatggtaaggaattcagcggaaccatcacacgagaagcacacaaagacctcctcctccacaggggagacagagaattctgcttggtcagaatcgtgatggcattgtgttcagcactgatgactattttcaccatcaagatgggtacaggtataatgttaatcaactgggtgatgcccatgactggaaccagaacagagcaaaagaagctatcgatcgagaacatatgggggatcatcatagagtcgaactgctggtcatgggatggtggagaatgtggccgtactgtggacagatggtcgtgggagaggggatacagagtagagtttcatgaacctgaaacttggtggaaatttgatcctgaagaattagaaaagaggaataaacatggtgtgtctcgaaagaagattgctcagatgttggatcgttatgaatatcaaatgtccatttctattgtaatgaattcagtggaaccatcacacaaaagcacacaaagacctcctcctccacaggggagacagagaattctgcttggtcagaatcgtgatggcattgtgttcagcactgatgactattttcaccatcaagatgggtacaggtataatgttatcaacttggtgatgccatgaatggaccagaaagagcaaaaaagctacgatcgaaactaggggatctctgagtgc

SEQ ID NO: 72177 - DNA, 289 bp, Homo Sapiens
ccatattctcgatcgttatgaatatcaaatgtccatttctattgtaatgaattcagtggaaccatcacacaaaagcacacaaagacctcctcctccacaggggagacagagaattctgcttggtcagaatcgtgatggcattgtgttcagcactgatgactattttcaccatcaagatgggtacaggtataatccctaatcaacatctggtgatgcaccatcgaccggaacccagaacagacgccaccagctcacgatcgaggacataccggtaccgagctcgattcga

SEQ ID NO: 72178 - DNA, 375 bp, Homo Sapiens
tatggctgcaggatcacattgtcgcgacggggcaggttcatgaaactctactctgtatccttttcctatggccacttccacatatggcttcatttcccaagcttgtatattagtgttatctattataactggagatcttccctgatcgatagcttgttttgctctgttctggttccagtcatgggcatcaccaagttgattaacattatacctgtacccatcttgatggtgaaaatagtcatcagtgctgaacacaatgccatcacgattctgaccaagcagaattctctgtctcccctgtggaggaggaggtctttgtgtgcttttgtgtgatggttccactgaatcattaaatagaaatgcatttgatattca

SEQ ID NO: 72179 - DNA, 205 bp, Homo Sapiens
gcctactactactatacggctgcgagaagacgacagaagggatgagccaccgcgcctggcccatttcttctttttttgacccatacttaatgttgcagaaactattcttgtcataacattatctctcatgtacagtaattatatgtaaattaattgaagcaaatatggaaactttacaatagaaataaagataggcagccagcgc

SEQ ID NO: 72180 - DNA, 701 bp, Homo Sapiens
  misc_feature (42)..(42): n is a, c, g, or t
  misc_feature (76)..(76): n is a, c, g, or t
cccactaagccaacaaaagagagcatctcttctcatgaagcntacactcaaattattgccaacgatcgtggtcatntactgccttctgtgccccgttccaaggcaaatccttggggttccttcatgggcacctggcaaatgcctctgaagataccccctgctcgggtgaccctgacctcccgtacaactgctggtgctgcctccctcaccaaatggatacagaaaaatcctgatttactcaaggcctccaatgggctgtgtcctgaaatcttaggcaagccccatgatccagacagtcagaagaaactcagaaagaagtctatcacaaagactgtacaacaagcacgaagtccaaccataattccaagctccccagctgccaacctcaattccccagatgaactccaaagctcacacccctctgcaggtcatactccaggtccccaaagaccagccaaatcctaagagcccacctggaagtccacgtatgctagaactctgggcagggcctaatctagctgaggtccagaaatacaaacctggaacttcatatggaccaagtggccacacactgaaaaacccgtatagcgactcagtgaaataaacaagagcccccagtcagaactgtgaaacagggaaattttggggtgggagtaaaagcaaatttggaaaataaacttttttttgttgaatcttaaaaa

SEQ ID NO: 72181 - DNA, 1004 bp, Homo Sapiens
  misc_feature (75)..(109): n is a, c, g, or t
aatgtaagatatatagggcgctgcgcttagagcgaacgacgagcgcagcgaagtcagtgagcgaggaagcggcgnnnnnnnnnnnnnnnnnnnnnnnnnnnnnnnnnnncagtcgacggtaccggacatatgcccgggaattcggccattacggccgggggtattattaagaatgaatgatttttgcatttaagttgtttgaaggcatgtattttgaaaaatatctgttacaaatttataatttcaagacaaattgaatcttattttataatacttttggaatttcattaataaggctaaaatttgaggaatataactaattttcagccttaagacatttaagtttggaagtccttgctattcaacagaataacaagaaaacttcagaatgtatcactctcctgaaaagaagatattaataagcccttttatttatggttatagttttatttatagtctcaaaattcctaaagcaatgctacaaccattgaatttgccatattttgtatcagtgctgttaatttgctgttgcctcaagaaaaagtgctttttctccatggatgaggctagaccctaagaagtaattaagtcaatgtaaatcaaatggaagttttcccatgaactaagcatttattagttccctgattagactggaagaagaaaccactatttcatgaaaagcatggaatattatattttattgttcataattaatgaataaaattgatatgaatgaatatagtgttctttgaattagtaaacagtacatctgtgacaatcatttttaacaagctctacttgtgttctttataaagtgtgattttcagaaagcaaacaacacaattacaaggttgaatctgaggaaaataatccttgtgccatagaagtatttacgaaattgcatttcattgttatgttttattttctgatacatgatgttcaattttatctttaggtaatattttatatcatagattaaaatttatagtgaactttaaaaaaaa

SEQ ID NO: 72182 - DNA, 447 bp, Homo Sapiens
gctttaatcagtgcatgtaataaacagaagctgaagacccaagaaacctggtggatgccaaactgcacaggagaaggtcaggcaggaggccaagcaaggcgaaaaagctctccggagtccaagtggccagacagatggcagcgcatgtatgtgcacaactagatggtgtggctggaactgggtaagtgaccccaaacacaggctttccctcccgaaggggtcatctggagaacaacctcaaaacatttttctttcttcgcttggtgaagcaggctagccattccgggaagcagaacaggaaagatgaaagtttccaaatattctttgggagaacatgtttttgggttgattgtttccgatttatcttgaggacagggtgtacgtgagatcatggtgaaatgggaaaccggaaaatagtgctctgcactgaagccatgaaaaagcatt

SEQ ID NO: 72183 - DNA, 1731 bp, Homo Sapiens
  misc_feature (15)..(15): n is a, c, g, or t
cgcgtccggataaantcggaaacaatcaacccaaaaacatgttctcccaaagaatatttggaaactttcatctttcctgttctgcttcccggaatggctagcctgcttcaccaagcgaagaaagaaaaatgttttgagaggaaaagaaccaaattcattgcctgtgattttctgactgagtggttatacaaccaaaatccaaagagggcaggggagccattcacagaatttttctccattccatttgtggaggagcggctaaagcaacacccacggccgccaatcccactctcgctcctgctgacagaagaggaagcagccctctacattcaatccttctggagagcctgtgtggttcgctgtgatcctgagattcaagaactgcgtcagtggcagaagaaacttcgcgaggccaagcacattcaccagcaagtcaaaattttctgggccaagcaagaacaaaaagtgaaatgcaaaatggaggacgatgcagtacctgcagccaagatgaaaattccatcatcttaaccatagctaagacgtatctttgcccattcgagcacaagttaccttgtgcaaggaaaatgtccaaatgatgctctctctcttgtgatttctttaacaagacttggaacatgtgcaaatggaatcttttctgtacaagataggattcattgcaaacaagctttaatgcaaatagtttagaaaagaaaggaccagtcttcactttctgcattatccccacattttattcattcatccagattacttcttcagtgcctcaggagtattcttctacaccagctgctgttaaaatgtacaatgaactctagtcccaaggaatacagaagtgctcttattaccagttttcccacttgtggccgcctttgcaaagatccatattctaatttaagtccccaacctctgaatttggttttaagtttacctagtgactgactactctctttataaaaaagaccttatacttaatgatcatttccaaaggagaccactccttaacttttactgcaaacccaacaagatgagacacttaaacccagacagatgtaacaaaggatttttgttgtctaagtcccaaagtattatatagaaagttcctgcttttatgggtaaacttattaccttaatatgttctgtggtttgctgttaaccaagattctcccatttaaaatgccacagaccgaccctcaaggcagatccgaaagcctagtagttagttgcactgggttgttttgacaagctaccacacgtcttaagtaaatagtaaagcctttatttttgtgttaagaacagcattttgaaaataaaacctatctgcccatgctttacagccttttaaatttgtaatatttatatagtcgtttatggtacatattgattgtcttgaaatttctttaacttcttttttataagtatgcaacagtcagccgggggaagataaaggtacattataaaacacacattaatgcatttaataaatatatattatctatcaaaagtgagccttagctcttcatcagttaataaaaagcacctgctgagaactcctgtaagctggtatcatcattgcatcattggattataaaagccacaatgctccctttcaacttggggtttggcctgaggcgttcaactcagccttggccaaccgagaccaccacccgagttcacccttgttcagtgggtcctgacggcatctgggctaaaaaa

SEQ ID NO: 72184 - DNA, 1486 bp, Homo Sapiens
  misc_feature (1020)..(1050): n is a, c, g, or t
  misc_feature (1052)..(1059): n is a, c, g, or t
  misc_feature (1061)..(1093): n is a, c, g, or t
  misc_feature (1095)..(1096): n is a, c, g, or t
  misc_feature (1098)..(1105): n is a, c, g, or t
  misc_feature (1107)..(1110): n is a, c, g, or t
  misc_feature (1112)..(1113): n is a, c, g, or t
  misc_feature (1115)..(1119): n is a, c, g, or t
  misc_feature (1124)..(1125): n is a, c, g, or t
  misc_feature (1127)..(1215): n is a, c, g, or t
cagtcgacggtaccggacatatgcccgggaattcggccattacggccggggagagtttggggatctacagcagccaaaggcttgtccctgactttatatggctgctcctggcgagcgactgagtcgtccgtgaggaaaaagaggcgaggcttttccgagatcgtctcagcgatggcgcttcggtcgcagttttgggggttgttctcggtttgcaggaaccctgggtgcaggttcgcagccctgtcaaccagctccgagccggcagcgaaacctgaagtggaccctgtggaaaatgaagctgtcgccccagaattcaccaaccggaacccccggaacctggagcttttatctgtagccaggaaagagcggggctggcggacggtgtttccctcccgtgagttctggcacaggttgcgagttataaggactcagcatcatgtagaagcacttgtggagcatcagaatggcaaggttgtggtttcggcctccactcgtgagtgggctattaaaaagcacctttatagtaccagaaatgtggtggcttgtgagagtataggacgagtgctggcacagagatgcttagaggcgggaatcaacttcatggtctaccaaccaaccccgtgggaggcagcctcagactcgatgaaacgactacaaagtgccatgacagaaggtggtgtggttctacgggaacctcagagaatctatgaataaatggaagcattaattgttttgaacatgtaaatataaatctgtcagccactacagccatcaaaagagagcatctggaagaacagccagcttggaagttttacagcaataatgttgcagtggaatattatttgtagttaaggtcatcctcctcccctttctgtttttttaaatcaagaactacgttctgcccctctcttgggcttcagaagcatctaagaaaagcagtcatcaattataattaactttcaaagggcaagtcagaagttgtttataaattacaaaataaaggcatattatgaactcttnnnnnnnnnnnnnnnnnnnnnnnnnnnnnnncnnnnnnnncnnnnnnnnnnnnnnnnnnnnnnnnnnnnnnnnncnncnnnnnnnncnnnncnncnnnnnccccnncnnnnnnnnnnnnnnnnnnnnnnnnnnnnnnnnnnnnnnnnnnnnnnnnnnnnnnnnnnnnnnnnnnnnnnnnnnnnnnnnnnnnnnnnncccaaaacaattttacacaaacctcctcttcggggcgggggggccccctaagataaaaataaaaatgcccctaccccctttcttccgaaaaaaacccgcggtgtgcaaccctcggggccttgggtttccccccccacaaataacacaaccccggggggggcactcaacgggtgcctcctcataaaaacatccacaaaagagacgctcctgggctggccttatctcgtgggtgtctctccacccgggggagtcacccctacctctatgttct

SEQ ID NO: 72185 - DNA, 819 bp, Homo Sapiens
  misc_feature (738)..(738): n is a, c, g, or t
gggggaggggcgggcccttctccaagttagagttggggttctgagcgagtcgtgcgttttaggtttagtgtcttttccttgtccctgctcggggagcgtgaggcagatcggccggctttgctccaggcctcaggagtggtgcaggttcgcagccctgtcaaccagctccgagccggcagcgaaacctgaagtggaccctgtggaaaatgaagctgtcgccccagaattcaccaaccggaacccccggaacctggagcttttatctgtagccaggaaagagcggggctggcggacggtgtttccctcccgtgagttctggcacaggttgcgagttataaggactcagcatcatgtagaagcacttgtggagcatcagaatggcaaggttgtggtttcggcctccactcgtgagtgggctattaaaaagcacctttatagtaccagaaatgtggtggcttgtgagagtataggacgagtgctggcacagagatgcttacaggcgggaatcaacttcatggtctaccaaccaaacccgtgggaggcagcctcagactcgatgaaacgactacaaagtgccatgacagaaaggtggtgtggttctacgggaaccctcacagaatctaatgaataaatggaaccattaattgttttgaacatgtaaatattaaatctgtcagccacctacagccattcaaaagagagcatctggaagacagccaagcttggaagttttacagncaataatggtgcagtggaatattaattttgtagtttaaggtcatcctccttcccctttctgtttttttaaatcaagaacta

SEQ ID NO: 72186 - DNA, 904 bp, Homo Sapiens
cagtcgacggtaccggacatatgcccgggaattcggccattacggccgggggcgtctggcgtggagagtttggggatctacagcagccaaaggcttgtccctgactttatatggctgcgcctggcgagcgactgagtcgtccgtgaggaaaaagaggcgaggcttttccgagatcgtctcagcgatggcgcttcggtcgcagttttgggggttctcggtttgcaggaaccctgggtgcaggttcgcagccctgtcaaccagctccgagccggcagcgaaacctgaagtggaccctgtggaaaatgaagctgtcgccccagaattcaccaaccggaacccccggaacctggagcttttatctgtagccaggaaagagcggggctggcggacggtgtttccctcccgtgagttctggcacaggttgcgagttataaggactcagcatcatgtagaagcacttgtggagcatcagaatggcaaggttgtggtttcggcctccactcgtgagtgggctattaaaaagcacctttatagtaccagaaatgtggtggcttgtgagagtataggacgagtgctggcacagagatgcttagaggcgggaatcaacttcatggtctaccaaccaaccccgtgggaggcagcctcagactcgatgaaacgactacaaagtgccatgacagaaagggtggtgtgggttctacggggaccctcaggagaaatctatgaaataaatgggaaaccattaattggtttttgaaacatggaaaataataaatctggccagcccactacaagccatccaaaagagaagcctctggagaagaacagcccagccttggaaagtttttaacagcaattaatggtgcacagggggaattatttttttggaaggtttaaagggcct

SEQ ID NO: 72187 - DNA, 943 bp, Homo Sapiens
tgatcctttctgagagcgtgtgagggcgctctgccccatggccaggccaaggtcgaccagaaggacgtacgtgacccagcttccgagtgtgggtcgatctgtgactcggactgcactctgcttgctggtgggagtcacacgcgagtatagctcccgctcctcacaagatggctatgagttggcaaggttggcccgacacgcgaaggccgggtgagcccatccatgcttggtgtgcctcgaggaagtcctggaccagtgtgtgagaccctgcagaagcagaccagggtggcaaggctgcaccaacaagccccccaggtgccggggaagaggggccaggcctgggggccgcccagctcctcggaatgtgtttgacttcctcaatgaaaagctgcaaggtcaggctcctggggccctagaagccggggcggccccagcggggaggaggagcaaggacatgtaccatgccagcaagagtgccaagcgggccctgagcctgcggctcttccagactgaggagaagatcgagcgaacccagcgggacatcaggagcatccaggaggctctcgcccgcaacgctggccggcatagcgtggcgtcagcccagctgcaggagaagctggcaggagcccagcgccagctggggcagctccgggctcaggaagccggcctgcagcaggagcagaggaaggcagacacccacaagaagatgactgagttctagagaccccacaagcactatggacgaagcgtgggaccccagcacgggctgccctcaggaagaccagtgttgcccgaggaggggccggcctgctggcctggggcgtgcggacactgctgagtggagacagagctgcggggtcccatctggacacttacttgcccacctgccagtgtcttgggcatttccttggcaaggacattaaagtgatttcatcacagtgtc

SEQ ID NO: 72188 - DNA, 694 bp, Homo Sapiens
tgaaggaattaacagatagtatcaagcgcagaaggaatgtgccagtatgcgtccctgggtgaacagcttggccttttttgggtgtcttgacaggccaagaagaacaaatgactcagaatggattaacatgaaagttatccaggcgcagagttgaagaagcataagcaagacaaaaacagagagaccgcagaaggaggaagatactgtggtactgtcataaaaaacagtggagctctgtattagaaagcccctcagaactgggaaggccaggtaactctagttacacagaaactgtgactaaagtctatgaaactgattacaacagactgtaagaatcaaagtcaactgacatctatgctacatattattatatagtttgtactgagctattgaagtcccattaacttaaagtatatgttttcaaattgccattgctactattgcttgtcggtgttattttattttattgtttttgactttggaagagatgaactgtgtatttaacttaagctattgctcttaaaaccagggagtcagaatatatttgtaagttaaatcattggtgctaataataaatgtggattttgtattaaaatatatagaagcaatttctgtttacatgtccttgctacttttaaaaacttgcatttattcctcagattttaaaaataaataaataattcatttaagattc

SEQ ID NO: 72189 - DNA, 813 bp, Homo Sapiens
  misc_feature (13)..(13): n is a, c, g, or t
  misc_feature (64)..(64): n is a, c, g, or t
  misc_feature (794)..(794): n is a, c, g, or t
ggggttatgtctntcatatgactgtgtaaaacaaagacaggacttggaggggaagcacaccacncagtgtgccatgactgaggtgtctcgttcatctctcagaagcaccttggggcctcgccagggccgtggtcttcaccgaggcgtgggtgggcagccgttccccaggctgtgtggggtcctgctttcttctgctgagacagtgacgctttccagtttccaccctaatcagccactgctggtcacagccccacagccatgggtatttctgtggtctcctcgcttcattgaagcaaagcatgagccttcctagacaagggcagctggggaggggaagggaccggaagtttgtgaagttgaacagtccatccatctgcactgagaggctggatcctgagtcccggggcagcaggatcccaggaaccttcctcctccagggcagcacaggactcagccatgtctggaccggccctgctgaggctacagtcactctggaagctctgcgcttcatcaggaggcaggactgtggcgggaggggtccttgaagatgggtgtggggagcagtgggtcaggaagtgggagccagaggtttgactcactttgctttatttttcaggctacaatacaggtcagagacaatggcttataaaggtttagtgtggtctcaggatgtgacaggcagtccagcctgacctttctgcacactccagacaaacttcccagacaagctcctttgtgcctctacgtggagagggtgtggaaagttatcacattaaaagatggaggatttgcanaaaaaaacctcgtgccgaa

SEQ ID NO: 72190 - DNA, 727 bp, Homo Sapiens
  misc_feature (74)..(74): n is a, c, g, or t
  misc_feature (77)..(111): n is a, c, g, or t
aaactaacactacttgggcggctctgttgcagccgaacgacgagcgcagcgaagtcagtgagcgaggaagcggncgnnnnnnnnnnnnnnnnnnnnnnnnnnnnnnnnnnncagtcgacggtaccggacatatgcccgggaattcggccattacggccgggcactgtcaattttatgggaagctcatagtattttaatattttattaacatggaactcttgtttttttaatctttagaacttaaattctacaagaattttaaatattttctgtatataattatgacattgtcacacagaaattacacattttatgtgccagaagccttaaacatctttctgtgaaaatgctgatatattgtgacagttatttcacatttgatatgtagagaggaataggggttagtttatgtttatattgaaaaactttaaagactatttggaagttccagaaattctggttttaattcaagtaaaatgataaaatagtcattatatagttcagatgctaatattctaagtaataatatatatttacattgaagctaaaactgttaagcaaaacaatgcccatttgtcggcttacagctcttccggagtctagagcctgttggtgttctgtccctactttaagaatttaattgctcacttattctgaaagctttgttcaaacaagatgatattaaatttgttttcactaaaactactgggatatctgcctctgggga

SEQ ID NO: 72191 - DNA, 319 bp, Homo Sapiens
tgtgcacataatgctttatgtacctgctgttaaaaattggaattaaacagaagtgggtaattagtaaaggctaaaattaaattgcagaagtaaactggcaaggattttttgtgcatgtcacattaaaatcatcacctacttttcaacgggagagatcataaaatttagccaactatttgaagtatcctttaataaactggggtctgaacatttgaaagacaatgcctatcctgtttttgtagatttttttgaaattaaaactttgtttcttggccagggattggtggctcatgccttacagtcccagcacttttgggag

SEQ ID NO: 72192 - DNA, 1277 bp, Homo Sapiens
aggctggaccggccggattcccgggatagaaattccggaagctggtgaactctacaaccggatgctgaagcgtttccggcaggagaaagctgtgtggatcaaatacggcgccttccttctgcggaggagccaggctgcagccagtcaccgcgtgctgcagcgagccctggagtgcctgcctagcaaggagcatgtggatgtcattgccaagtttgcccagcttgagtttcagctgggggatgcagagcgggccaaagccatttttgagaacacgctgagcacctacccaaagcgcacagatgtctggtcggtctatatcgacatgaccatcaagcacggcagccagaaggacgtccgggacatctttgagcgggtcattcatctgagcttggcccccaagagaatgaagttcttcttcaagcgctacctggactacgagaagcagcatggcactgagaaggatgtgcaggcagtcaaggccaaggccctggagtatgtggaggccaagagctcagtgctagaggactagtggcaggctggctctgtgggacactgtcaacaaggggccagcccggccccgctctcgagtgcctgggcactcggaaaactgttacctcaggactctatttaaatgctgctttttctgcagcacgcttggggaaatcctgtcaggatgaaaaggaagttgagattttttaaatccctcttcgcttgctttattttcagtaccaacttgttatctttttccttatctgaggctacctggggattgtgggcagcaggcccctggactcccagaaatgctgagggtccctcttccaggggagttccctggggagcaagagtagaggggctattcccgagggtcctgtggtcagggtcctgctttgtccctggcaggctgtcagtccagctggagggggtcagtaggctccagggagtgggccctcccctccgatcttggagtctctgggtgttccttcagcctcagcctcactggtaccttctgccctttaggggaggctatgagtctgggacaggaggacaaattcagagcccagagggggaaatggagaaacctgggctgctgaggaaagccacgggtgttggcgtgaactgatgatgtctcatcccacgcccactatggccacattacctaacctctccatatctgggctattcaaggtcttggaggccagcacagacccagctagttgttgaagccagttcttttttgtcttggtcatgagggaattaaacgttttctctggcagaaa

SEQ ID NO: 72193 - DNA, 1066 bp, Homo Sapiens
  misc_feature (123)..(124): n is a, c, g, or t
  misc_feature (185)..(185): n is a, c, g, or t
  misc_feature (242)..(243): n is a, c, g, or t
  misc_feature (253)..(254): n is a, c, g, or t
  misc_feature (304)..(304): n is a, c, g, or t
  misc_feature (308)..(308): n is a, c, g, or t
  misc_feature (313)..(313): n is a, c, g, or t
  misc_feature (329)..(329): n is a, c, g, or t
  misc_feature (342)..(342): n is a, c, g, or t
  misc_feature (429)..(429): n is a, c, g, or t
gaggttcacatgtgtctgctggtctgttgcatccctcctgtacaagtctcgagccgcaggatgcactggggagagagtgctatgatatagcacagagtttcaatagattcgatccaatgcacnntctcttcccaccttgattcatcaccatatgccaaaggagagcttgggagcggaagtctacntgcaatcctgcttggatacactccaagtcactggtgcctgtgtatgtgaagtgagcnnctcagctgannggcacccccgggagcaccggcaagcgagtgtccacctgccccttttgctntgcnccctntgtgacaactgaggcntatgagctgcatntgaaggagagcacccacatcatgcccacagtccacacggtcctgaagtctcccgccttcaagtgcatccactgctgtggggtctacnacgggaaatatgaccctggctgccatcgccgtccatttggtgcgctgcagaagtgctcccaaggacagcagctcagacctgcaggcccagccgggttttattcacaacagtgaactgcttttagtcagtggtgaagtgatgcatgattccagtttttctgttaagagaaagctgcctgacggccacttaggggccgaagaccagcggcatggggaggagcagcctcccatcctaaatgccgatgcagccccgggtccagaaaaggtgacgagtgttgtgccttttaaaagacaaaggaatgaaagcagaacagagggacctattgtcaaggacgaggctcttcagattttagcattagatcctaaaaaatatgaaggccgttcttatgaagaaaagaagcaatttcttaaagattatttccataagaaaccatatcctagtaaaaaggaaatagaactgttgtcctcactcttttgggtgtggaaaattgatgtggcttcattttttggaaaaagaaggtatatttgcatgaaagcaataaaaaatcacaagccttctgtacttttaggctttgatatgtctgaacttaaaaatgtgaaacatagattgaactttgaatatgaaccataaaacttgc

SEQ ID NO: 72194 - DNA, 566 bp, Homo Sapiens
tgttccagtcatgcccttgagcctctaaagctcctaggtgagagacgtagcagctgacagcacttcccacttgatttgggtgactccagcctccccagcaacaataagagatcaaaagcatcgttgaggaagcagcttgctgaaacgctgagtgcccgccactctcaggtcaggtgggaccggcaggccagcatgagttcctgaacacttggttctcaatactggccacagccacactgtaaggggaaacaagagggcgctgtatgcaaacatctcttgaactctggagtctgctcaccttcctgcctcaagcccctctcccacgtggtccagtcaccattctccacagagactaccctaaaacccagcgactctcgtgtgcctgcagaatggcacagcccgttctcatagcagcactcctgtttaatcagagggatgttaacgaccaagtcatatttgctcgatttgtgttcaatatatttcatttgtaccgataaaacttaaaaatatccccacacatgcattgcctattaaagagtatcttccaggtacacctcccttaaaaa

SEQ ID NO: 72195 - DNA, 592 bp, Homo Sapiens
  misc_feature (44)..(44): n is a, c, g, or t
gaagccaggcttggaaccctcaaagatagagtgtttattggttntgaagtcaccttgatcatctgactcttggcagatttatttgccatgattttgttcattgcctttccaacctgtaacaggatagagagtgctgttgactgggtatcctggcagccctggaaattccccagaagagggctttggcagtgattggcttagcaaggttaatgcgttccagccaacctaagtataacagacttcatgggagcagtgtgcagggctggacactggggctctagtcctgctcctgcatctgcaccctgcgttttccacctcacccctgccttttagtgcaagactcttagtgcacccctgcgtcacccctgtctcttagtgcatttattgcctttgcaatgtcgctatgtccacaccagatggcacctttgttccatctaactttccatctttcctaggatgctgatcctcccgctggcttccagacagacctgggacttggcagtcatgccgggtgatggtgttcctgcggagaccctcagttgtcctattccttcctagcttccctgcaataaaatcaagctgcttttgttgg

SEQ ID NO: 72196 - DNA, 990 bp, Homo Sapiens
  misc_feature (130)..(130): n is a, c, g, or t
  misc_feature (133)..(133): n is a, c, g, or t
  misc_feature (168)..(168): n is a, c, g, or t
  misc_feature (189)..(189): n is a, c, g, or t
  misc_feature (228)..(228): n is a, c, g, or t
  misc_feature (255)..(256): n is a, c, g, or t
  misc_feature (293)..(293): n is a, c, g, or t
gattgattggtactgagatagacggatcctctctgctcaaccatgggaccagcacttcttcctgaccgatgtcttgagatgcgccctgatgagcagatcactgggtatggtgacatacagatcccagccngcntgcgaccagacctgtagtttgcagctgtagtgatntagtgcagaaatattttgtgntcataagtggcccaccagatcagcatgctcagagtatgnggcccatccctgtcagagtactggtgnnccctgagacaaagctcatagctcaagaatcagtgttntgaaggtaggactgggaaaaagcattttaaactagatctccaggtgattctatttactatgtgccagacactgctaaaggatttatagggatgattccattgaatacaacttgtgaggtagaaactcttagctactctatagttgaagagacgggctcagaaacaggcttctgatgagtctgatgccaaccaggtcctgcccagtctctctgtcttctgtcttgaccctgagtgggcctgtctgctggcactgtgtgggggtcactctacagggctcgggtcatggtccccctgtgtttgtttcagaagcacgagttctctgtggacatgacctgtggaggctgtgctgaagctgtctctcgggtcctcaataagcttggaggagttaagtatgacattgacctgcccaacaagaaggtctgcattgaatctgagcacagcatggacactctgcttgcaaccctgaagaaaacaggaaagactgtttcctaccttggccttgagtagcaggggcctggtccccacagcccacaggatggaccaaagggggcaggatgctgatcctcccgctggcttccagacagacctgggacttggcagtcatgccgggtgatggtgttcctgcggagaccctcagttgtcctattccttcctagcttccctgcaataaaatcaagctgcttttgttggaaaaaaa

SEQ ID NO: 72197 - DNA, 449 bp, Homo Sapiens
ggacccagatgctgcctctgagaatgcggcccttggatgaaagcagaatcacctgggaagcacgagttctctgtggacatgacctgtggaggctgtgctgaagctgtctctcgggtcctcaataagcttggaggagttaagtatgacattgacctgcccaacaagaaggtctgcattgaatctgagcacagcatggacactctgcttgcaaccctgaagaaaacaggaaagactgtttcctaccttggccttgagtagcaggggcctggtccccacagcccacaggatggaccaaagggggcaggatgctgatcctcccgctggcttccagacagacctgggacttggcagtcatgccgggtgatggtgttcctgcggagaccctcagttgtcctattccttcctagcttccctgcaataaaatcaagctgcttttgttggaaaaaaaa

SEQ ID NO: 72198 - DNA, 981 bp, Homo Sapiens
  misc_feature (516)..(516): n is a, c, g, or t
  misc_feature (518)..(518): n is a, c, g, or t
  misc_feature (523)..(524): n is a, c, g, or t
  misc_feature (529)..(529): n is a, c, g, or t
  misc_feature (531)..(531): n is a, c, g, or t
  misc_feature (533)..(534): n is a, c, g, or t
cagtcgacggtaccggacatatgcccgggaattcggccattacggccgggggaagggagagaggcgctgctgacaccgccgccacaccgccgccacaccgccgctgcctcagtcatgccgaagcacgagttctctgtggacatgacctgtggaggctgtgctgaagctgtctctcgggtcctcaataagcttggaggagttaagtatgacattgacctgcccaacaagaaggtctgcattgaatctgagcacagcatggacactctgcttgcaaccctgaagaaaacaggaaagactgtttcctaccttggccttgagtagcaggggcctggtccccacagcccacaggatggaccaaagggggcaggatgctgatcctcccgctggcttccagacagacctgggacttggcagtcatgccgggtgatggtgttcctgcggagaccctcagttgtcctattccttcctagcttccctgcaataaaatcaagctgcttttgttggaaaaaaaaaaantnacaannaaaananannccttgtcggcgcgccctcggccttcgaaaaagctttctaagaccgttcgtttgggcgcgcggggcccagaaggtgaagtgaaacatgtccatagcctggtttccctaaggaaaaccctgggccaaggactaaagggcttggaattccccccccaaataaaaaaccgcccgggggggcaaacccaagccgtttctgaaacacaaccccgaatgggaagttcctggagggccatttactggggaatcctaaccaaacagggaagctcccaagcggcagagctccgaaataccacaattttacggcccccgggcccttgggcccactttattttcgccaggaacccggtgtgggtagaaatccaattaaaaaggcaattttctggccccgaaaaattgggagagacccccacttccaccacaaaaccggggccattgggattaaaaccct

SEQ ID NO: 72199 - DNA, 617 bp, Homo Sapiens
ggagagaagccatataagtgtaaggagttgtgggaaagccttcaaccacagctccaacttcaataaacaccacagaatccacaccggggaaaagccctactggtgtcatcactgtggaaagaccttctgtagcaagtccaatctttccaaacatcagcgagtccacactggagagggagaagcaccgtaactttcaagcgctcctgttgttgtcgttgttttaaactttagaatctgaaaaccagaaagaagtcttgtcattgcagcagcatcgattccggtgatagagtttgtatcactcaacatcaggggatgcctgaggagtgcgagctccacagcaacatggcaggcaggaggtcctcagaaggtgtcaggaggttccacactcgccagttcactggagcagagtcccttcgccacacttagggtcccagtaagccatgccagcattaccttttgcgtagttaaacagacgtgtatccagtctagttaaggaagaaacattaagattgtttaatttttaacatatattcaagaattttaatttgtaaagaattgagccacattgaacacaattgaatgagattcagaataaacttataacatcttgtaatgcc

SEQ ID NO: 72200 - DNA, 534 bp, Homo Sapiens
tgaaggcttggattgtatttaagttggatccattccagtgatgacagctgtgctaacgtcacctctggtggctttgtccccaagattcgagattacggtgagccctttcaggaagcaatgtggttggacctggttaaggaaaggctgattacggaaatgtacacggtggcatggtttgtgcgagacatgcgcctgatgtttcgcaaccataaaacattttacaaggcttctgactttggccaggtaggacttgacttagaggcagaatttgaaaaagatctcaaagacgtgctcggttttcatgaagccaatgacggcggtttctggactcttccttgaccctgttctgtaaagactgaagcatccccacctcaggattcagctgatgggaccctggcttggactgttgattgccagtgagtctgggatgtaattggctgccctcaggacccaaacccagacacttcataggattatcacaccctccatctttattctttctttttacctttaaaagtctatatctacactaaa

SEQ ID NO: 72201 - DNA, 553 bp, Homo Sapiens
gggattcttgacactctgggagtgtcccacctcatggctgagcccatccttccgagggaagacagtgccagccacgggaatggtggccatttccaggggcttgcccctctgctcaccttgtgtccaacctctcaggatgctgtggagttgcaccttctgcaggatgaagaggtcttcaggaagccaacagtgccatcatgtatctaagaccctggagaggcagatgcagcctcaggaccagctggcttctgactttgcccaggtaggacttgacttagaggcagaattggaaaaagatctcaaagacgtgctcggttttcatgaagccaatgacggcggtttctggactcttccttgaccctgttctgtaaagactgaagcatccccacctcaggattcagctgatgggaccctggcttggactgttgattgccagtgagtctgggatgtaattggctgccctcaggacccaaacccagacacttcataggattatcacaccctccatctttaatctttctttttaccttttaaaagtctatatctacactaa

SEQ ID NO: 72202 - DNA, 889 bp, Homo Sapiens
  misc_feature (127)..(149): n is a, c, g, or t
  misc_feature (159)..(159): n is a, c, g, or t
  misc_feature (295)..(295): n is a, c, g, or t
  misc_feature (317)..(317): n is a, c, g, or t
  misc_feature (812)..(829): n is a, c, g, or t
atcgcacgaggacagtccagagagaacacagatgccataagcccatgaagatgcgccagcccgtagtcatagcgaaatacgaatcagacccaatggatactactttacacatactaggatgctattnnnnnnnnnnnnnnnnnnnnnnntagcaagtgntgccaaggatgtggagacatcataatccctgtgctttgccgctgggggtgtgaaatggtgcagccactgtggaagacagtatgacagctcctcagaaggttcaacatagaatcaccagagaagcataaaccccaanagaggtgaaacagggacccaanatggatgcttttctatgaatattcatggcagcacctttcacagtggccaaaaggtggaaatgactcaagtgtgctccagcagaggaatgagtaaacaaatgtgttacaagcacacaacagaatcttactcagccatgaaaaggaatgaaattctgacacaggctacagcatggatggcccgaggtcattatgctgagtgaaataagccagtcacaacagggcacaccctgcgggattccgtaaacaaggcacctagagccgtcagattcagagagacagaaagtggactggtacgtgccaggggctgggggccggagcggtgtggagttagtgtttaatgggtacggagtttctgtttagggtgatgaaaaggtggtggcggctgcacagcactgtgagtggacttcacgctgctccactgtacacttacacatgcttaaaaggcaaattttatgctatattttaataccacaataaaaactgtataaaccgggnnnnnnnnnnnnnnnnnngaccgcgtatgcggccgcaagcttattccctttagtgagggtaatttcggctaggcactg

SEQ ID NO: 72203 - DNA, 1136 bp, Homo Sapiens
accgccgtaatatgaacagtggttcaaaaagcaggctggtaccggctccggaaattcccgggatatcgtcgacccacgcgtgcgaacaaagccgccaagacccagctggctgtgtgccagcagcggatccgaaggcagcttgcccgggagaagaagctctatgccaatatgtttgagaggctggctgaggaggagaacaaggccaaggcagaggcttcctcaggagaccatcccactgacacagagatgaaggaggagcagaagagcaacacggcagggagccagtctcaggtggagacagaagcatagcccctctccaccagccctactcctgcggctgcctgccccccagtctccccactccaccctgttagttttgtaaaaactgaagaattttgagtgaattagacctttatttttctatctggttggatggtggctttaggggaagggggaaaggtgtaggctgggggattgaggtggggaatcattttagctggtgtcagcccctcttcccttcctccattgcacatgaacatatgtccatccatatatattcatcagaatgttaatttattttgctccctctgttaggtccattttctaagggtagaagaggcaagtggtagggatgaggtctgataagaacccagggtggagagggagactcctgggcagccgttttcctcatcctttccctctcccagtccatttccaaatgtggcctccatgtgggtgctagggacatgggaaaaaccactgctatgccatttcttctctctgttcccttcctcacccccgacggtgtggctgatgatgtcttctggtgtcatggtgaccaccccctgttccctgttctggtatttcccctgtcagtttcccctctcggccaggttgtgtcccaaaatcccctcagcctcttctctgcacgttgctgaaggtccaggcttgcctcaagttccatgcttgagcaataaagtggaaacaataaaacctgggtgtcagacaaccctttctgttcagccttggagtggtgggtatgggtgggtacataatgggtagtagcacaatcaaggggtcacccacttagttccagttgagcttaaataagtgagcatctcatgtagacctcgtgc

SEQ ID NO: 72204 - DNA, 959 bp, Homo Sapiens
ggcagtaactctaacggtttaaggtagcgaggcctgggtggcgaattcggcacgaggccgcgcccggcctcccgcacgccccgcaggtagcgcccccgcccgcggcccagagtgcgctcgcgccggcaccagctcccggataaacggcgcgccgcgcggagatgacagccgaggagatgaaggcgaccgagagcggggcgcagtcggcgccgctgcccatggagggagtggacatcagccccaaacaggacgaaggcgtgctgaaggtcatcaagagagagggcacaggtacagagatgcccatgattggggaccgagtctttgtccactacactggctggctattagatggcacaaagtttgactccagtctggatcgcaaggacaaattctcctttgacctgggaaaaggggaggtcatcaaggcttgggacattgccatagccaccatgaaggtgggggaggtgtgccacatcacctgcaaaccagaatatgcctacggttcagcaggcagtcctccaaagattccccccaatgccacgcttgtatttgaggtggagttgtttgagtttaagggagaagatctgacggaagaggaagatggcggaatcattcgcagaatacagactcgcggtgaaggctatgctaagcccaatgagggtgctatcgtggaggttgcactggaaggggtactacaaggacaagctctttgaccagcgggagctccgctttggagattggcgagggggagaacctggatctgccttatggtctggagagggccattcagcggcatggagaaaggagaacattccatcgtggtacctcaagccaagctatgctttgggcagtgttggggaaggaaaagttccaaatccacccaaatgctgagctggaatatgaattacccctcaagagtttttgaaaggcccaaggagtcttggggagatgaaattcac

SEQ ID NO: 72205 - DNA, 1017 bp, Homo Sapiens
  misc_feature (737)..(737): n is a, c, g, or t
agatatatggtagtacgaggcgggtggtgtaatcggcacgaggagtcggcgccgctgtccatggagggagtggacatcagccccaaacaggacgaaggcgtgctgaaggtcatcaagagagagggcacaggtacagagatgcccatgattggggaccgagtctttgtccactacactggctggctattagatggcacaaagtttgactccagtctggatcgcaaggacaaattctcctttgacctgggaaaaggggaggtcatcaaggcttgggacattgccatagccaccatgaaggtgggggaggtgtgccacatcacctgcaaaccagaatatgcctacggttcagcaggcagtcctccaaagattccccccaatgccacgcttgtatttgaggtggagttgtttgagtttaagggagaagatctgacggaagaggaagatggcggaatcattcgcagaatacagactcgcggtgaaggctatgctaagcccaatgagggtgctatcgtggaggttgcactggaagggtactacaaggacaagctctttgaccagcgggagctccgctttgagattggcgagggggagaacctggatctgccttatggtctggagagggccattcagcgcatggagaaaggagaacattccatcgtgtacctcaagcccagctatgcttttggcagtgttgggaaggaaaagttccaaatcccaaccaaatggctgagctgaanatatgaattacacactcaagagttttgaaaaggccaaggagtcttgggagatgaattcagaagagaagctgtgaacagagcacccatagtggaaagagcggggcactgtgtacttcaaggaaagtaaatacaagcaagctttactaccgtataagaagatcgtgtcttggcttggaatattgagtctagttttttccaatgagggagccccagaaagcacagggccccttcgactgggcctctcacctcaaacccgggccatgtggtcatctgaaaacta

SEQ ID NO: 72206 - DNA, 1451 bp, Homo Sapiens
  misc_feature (1401)..(1411): n is a, c, g, or t
gagccgctcctgacccacctaccccagctctcgcgccgcgtgcagaggtgctcaagcctcctcgcggtccgcagtcagtgcctgccgcgcccggcctcccgcacgccccgcaggtagcgcccccgcccgcggcccagagtgcgctcgcgccggcaccagctcccggataaacggcgcgccgcgcggagatgacagccgaggagatgaaggcgaccgagagcggggcgcagtcggcgccgctgcccatggagggagtggacatcagccccaaacaggacgaaggcgtgctgaaggtcatcaagagagagggcacaggtacagagatgcccatgattggggaccgagtctttgtccactacactggctggctattagatggcacaaagtttgactccagtctggatcgcaaggacaaattctcctttgacctgggaaaaggggaggtcatcaaggcttgggacattgccatagccaccatgaaggtgggggaggtgtgccacatcacctgcaaaccagaatatgcctacggttcagcaggcagtcctccaaagattccccccaatgccacgcttgtatttgaggtggagttgtttgagtttaagggagaagatctgacggaagaggaagatggcggaatcattcgcagaatacagactcgcggtgaaggctatgctaagcccaatgagggtgctatcgtggaggttgcactggaagggtactacaaggacaagctctttgaccagcgggagctccgctttgagattggcgagggggagaacctggatctgccttatggtctggagagggccattcagcgcatggagaaaggagaacattccatcgtgtacctcaagcccagctatgcttttggcagtgtggggaaggaaaagttccaaatcccaccaaatgctgagctgaaatatgaattacacctcaagagtttcgaaaaaggccaaggagtcttgggagatgaattcagaagagaagctggaacagagcaccatagtgaaagagcggggcactgtgtacttcaagggaaggtaaatacaagcaagcttaactacagtataagaagatcgtgtcttggctgcaatatgagtctagtttttccaatgaggaagcacagaaagcacaggcccttcgactggctctcacctcaacctggccatgtgtcatctgaaactacaggccttctctgctgccattgaaagctgtaacaaggcctagaactggacagcaacaacgagaagggctctccgcggggagaggccacctggcgtgatgacttgaactggcacgggtgattccagaaggtctgcagtctacccaaaaaaggcgcagaccaagtggtggtgcagcacggatcgaggcgtgcgggaaagaagctatgcaatgttggannnnnnnnnnnaaggcagggaaggcccggaaccccggggctcaagggaaga

SEQ ID NO: 72207 - DNA, 1358 bp, Homo Sapiens
gccagtaactactaacggtcctaaggtagcgaggcctgggtggcgaattcggcacgagggagagggccattcagcgcatggagaaaggagaacattccatcgtgtacctcaagcccagctatgcttttggcagtgttgggaaggaaaagttccaaatcccaccaaatgctgagctgaaatatgaattacacctcaagagttttgaaaaggccaaggagtcttgggagatgaattcagaagagaagctggaacagagcaccatagtgaaagagcggggcactgtgtacttcaaggaaggtaaatacaagcaagctttactacagtataagaagatcgtgtcttggctggaatatgagtctagtttttccaatgaggaagcacagaaagcacaggcccttcgactggcctctcacctcaacctggccatgtgtcatctgaaactacaggccttctctgctgccattgaaagctgtaacaaggccctagaactggacagcaacaacgagaagggcctcttccgccggggagaggcccacctggccgtgaatgactttgaactggcacgggctgatttccagaaggtcctgcagctctaccccaacaacaaagccgccaagacccagctggctgtgtgccagcagcggatccgaaggcagcttgcccgggagaagaagctctatgccaatatgtttgagaggctggctgaggaggagaacaaggccaaggcagaggcttcctcaggagaccatcccactgacacagagatgaaggaggagcagaagagcaacacggcagggagccagtctcaggtggagacagaagcatagcccctctccaccagccctactcctgcggctgcctgccccccagtctccccactccaccctgttagttttgtaaaaactgaagaattttgagtgaattagacctttatttttctatctggttggatggtggctttaggggaagggggaaacgtgtaggctgggggattgaggtggggaatcattttagctggtgtcagcccctcttcccttcctccattgcacatgaacatatgtccatccatatatattcatcagaatgttaatttattttgctccctctgttaggtccattttctaagggtagaagaggcaagtggtaagggatgaggtctgataagaacccagggtgggagagggagactcctgggcagccggttttcctcatcctttccctctcccagtccatttccaaatgtggccttccatggggggtgctaagggacatggggaaaaaaccactgcctatgcccattttctttctctcctgggtcccctttcctcaaccccccggacgggtggttggcctgaata

SEQ ID NO: 72208 - DNA, 1562 bp, Homo Sapiens
  misc_feature (21)..(21): n is a, c, g, or t
  misc_feature (60)..(60): n is a, c, g, or t
  misc_feature (580)..(610): n is a, c, g, or t
  misc_feature (864)..(876): n is a, c, g, or t
cggaaacggcattcagaactntaccacgagctcaaccagaagttccacactttcgaccgntaccgcagccagtccacggccaaggataagcccagccctggggagcgccccagcttgtcccaacatcggcgccatcagagctggagcaccttcaaatctatgacactgggctcgctgccccccaagccccgagaacggctgactttgcaccgggcagcagcctgggagcccacagaaccaccggatggtgacttccagacagaggtgtgagtgccacgctggactgcccactgcatataaatatatatatctctctattttcacactccactttggaactacccaggagccagcgccctctcccctctcccgagggctgggcagggaggcgccgtggactcagccaggctgggggagccggacatggcttggcctggggtcccagggcccttccttgtttctcagaggcccctcagccactggaaccccatcttcagcccagcctgtccgtccctgtcccgggctggggaggggggaggggaactttgttgggaataaacttcactctgtgcgaaacacnnnnnnnnnnnnnnnnnnnnnnnnnnnnnnngggggcgccgcccaaaaagttccccccgagaggggcgcccaaggtgttataccgcgttcccccaggttttcctgtgggtcccaacggtggcgccccataatagggagagcgctcggtattatttaacgcgcatagggcatttggcgccggcgctgtttacacaaccgtctgggtaagaccgtggggagaacaccttggcaccgcctggggggcctcttcggaaaagaggggagccccttttaactctccctgtnnnnnnnnnnnnncagccaatattctgggggcgccacaacctcaccccataacagaagagattttaaaacggcctctacaagggggggacaatttttataaagcttttttaaaaacgcggttgtcataaccggggtgtgttaccacacataccgcgcgggcaatattgcgacttgggcagcctttggaacagagcttttgtgggccagaatcgcggggagtatattgaactttgtggaacaaacattttttttatacccgcgcggggcctttgcttttattataaaaccgcggcgaaccgagcgtgcggcgacctcacgctggcaggccgcccagcgcgacaacagcagacgcctccatccaggcagacgccatctcgaacgagctggcggcgcggataagcgcgatagtacgagacgcacggcgcagggctgcgtctcgtggatggtacgggatacgactgggacagctcgagacgtgcgtgcgcagcgctgtcgaactgaagcagcaaacacgacgcacactgcgacgaacaactgaaattacaccgacgaacagtgcggaggctgcgcagccatccaagcgagcgctgctcccggcaagccacacccgccaccgcgcaggccgccgcgactagaccacacaggtaacagcacacgcaaccacaaaccggcacgcgcacacacacctaacacacccc

SEQ ID NO: 72209 - DNA, 939 bp, Homo Sapiens
tttgagacggtgtctcactctgtcccccaagctggagatggcatttcggttggtgcacgagctcgtccaggaggtctgggatgtctggttatatctgatttctgagctctgggcatggaggtctgtctgcagaggcccgggcctgggcacaaagggagagaggcctccattgtcccgcaggggccgaaatgcagaccgtgcatccccggtgacctcggggaccgttctctgatcatcaggattctcttggactctggggtccttgtcctgctcaggcatccctgccccgctctccttgagggccctcaacactatcttccctggacacaagtctggggacagccgggtgttgtggaccccaaaggggtgactacctgctcctgggccccacagagtccttgtgctcagtgtagtggctgagctgggggatgccctggaactcggagcacacagcactggcttactgtggtacctgtgcagtgaaattgaagacagaatcaccaggatggaacacaggtcttgcaggatcacggaaaaccttcttagagttgtcttgacaccactgatgtcgagtgtccgggtgtttgtaggatggcctgccactcagtccaggggcaggagcaacggggagatcccacaagcaaagtgaactgggggatgggctgaaggggctccaggcaactgagccctactcgcaggtcctcggccttggccccaacacaggaatgaggggcacatgagtgcccgggtaacccgctcctgggagcaggtggggaactgtcggatacttgaactctgcaggagctggggctctggagcgtctcgtccagtgccaacttgtcaaggttaagccaggcaattgtctgtgccgggaacgggaattttaaactgatggagtggggttgagctatggccatggacgaggacaaatgtaaacgg

SEQ ID NO: 72210 - DNA, 507 bp, Homo Sapiens
agcaggagagcaggaatcttcagtgatccacgggcagatctgcagccattgtgggcacctgttcctcccgcgacctttgtgcccacgtctctccctccagtacctattgcacgaccccccacgtccgcctcctgccattgccagcaagtgccttgcgcgggtacctggctgcgcttattaatccattatggtcgctctgtcactggtgccattatgtgctcacgcgcccactccctcaggtttagaaggcgcgttgcccggcaacagaacaatctgctggcttagcctttggccaagttggcagctggacgaggacgctcagagcccagctcttgagagttcaagtatccgacagttccccactgctcccaggagcggttacccgggcactctgtgcccctcattcctgtttgggccaaggcacgaggacctgcgagtagggctcagttgcctggagccccattcagcccatcccccagttctctctcctgagaggatcctctagag

SEQ ID NO: 72211 - DNA, 619 bp, Homo Sapiens
  misc_feature (42)..(42): n is a, c, g, or t
  misc_feature (45)..(45): n is a, c, g, or t
gaataaatactacactattgatagtggagatatattaatttntanaaactgtaaagtaaatgtggtctctaggtttgtggtgtgtacctttgtgttaatgtgtagggaagagacagtgacttgatggttatggcgagtgtatcttgatgtgtgtataggggtaagtattgctaaattatttacagcttttattcagggtgagtcatgtgatgaatggcctaatcagaaaagtgaaggagcgaagatgcaagcttgccaaatgatgaaatgaacaagattttgtatctattttttatcaggtgttgtaaaatttgtgcatggctttttgttgttgttgcttagtaactggtagaggagaaaagatgaggaaagaaactcagctttcctcacagtcttttcaaaggtacacagttggggagtaaaatctgactggcctaatcgatggaaaagaccctgtccttttcaccccatcctgcaatcctccgtgcagaggaactacactgttgtattctagtaattcactgtgatttataacaaaccggtgatgtcattctattgtgcacttttgtcaaaccatttatgtgactttaataaacatagtaaacttgctgactgcaaa

SEQ ID NO: 72212 - DNA, 1310 bp, Homo Sapiens
tgcatgtcagcgagcgacactgtccctgcctcaggttggaggttttatcagccaaagtgtttttttcatgtatcgttcgttccattcatccactctgtgccttgtcagcctttgaaaggcttggttgctcccaggctgctgttctcagggaccttaaaagggacctggttagtcttggggcagagagtatctacttgggcactctcttccaagaaagaccttgtctccattttcattagacaatgcttcttgtgtgtgttctggaagatcttctaaatggaatgcttgttgcactgttcccaggcgagtggctgccatgagacctgaggaccacacttgggggaccaatcatgtccttcaccactgtgccttagaatcgcccctggacagagttcctgggcagaggggaaagcagctcccaggccttactcaggcctcaggtccatgggttgggcagccagtctgggcccttctcaggatcctcatctccatcctcatcctcttccttcacagcatttacttggagctctttgtgacacaccatgtcagtcatgatgaatcggccaacagccagcccttgccagctgacgtcacagtctaagatgggaaactgtggtacagatagacatgaagagagcttagcagtgattgaggtggtgactaaatatacagtcattgaataaataccatgtagcaagtgtactttgtggagtgttgagtaagtggaaaatggaaagccagttgcatttagagatgataggcctaaagggaactgtcttctgtcgagaagtaaaggaaacttcatgaaggatgtagaagcttagctgcctcagagaagagagaacctgaagatctgaggcaagctggacaggagaggtggatatttgttgatggaagaattcaagtttataatcaattcccacttagcacctactgtgtgctaggaacttgaatgtgtatgtttgacaagtcctgcttggcctgatgggtgggagaaggaacctgagcctggctgagatggctaggcggagggctttgaagtccaagcagctgaactggctgggtgggtttctacctttgaaactgcaagacttgtttggagctcttaattacaatatctgatatttttacagtctgatcttttgacttctacatatagtggaaatctgccaatactaattggtggagatgggaactgtaaaagatcaagtatgctaattttaagcaaatgtaaaaactcataaaacaggtaaacagtggggtgatttcatttgccataattcacataagacgaattttaatctaaaagt

SEQ ID NO: 72213 - DNA, 917 bp, Homo Sapiens
gggatggcaggcagggtggctgccttagctgccggaggttccgcactctctaaggccccgggtgaagccccacctctgctgcgcgcagcctgcggtgcgggtcatggcgcggctaccgaagctggcagtctttgatttggattacactctctggcctttctgggtcgacacgcacgtagaccctccgttccataagagcagtgatggaactgtacgagataggcggggccaagacgtccgactgtacccagaggtgcctgaggtcctaaaacgattgcagagccttggggtgcccggtgcggctgcttcaaggacaagtgagatagaaggggccaaccagctactggagctctttgacctcttcaggtactttgttcatcgggaaatctatccaggcagcaagatcacacactttgagaggttgcagcagaagactggaattcctttctcccagatgatcttctttgatgatgagaggcggaatattgtagacgtcagcaaactgggtgttacctgcattcacatccagaatggaatgaatcttcaaactctaagtcaagggttagagacatttgcgaaggcccaaactgggcctttgaggtccagccttgaggagagcccatttgaggcctaaactgaaaggaaatcaagaaggcattttcaggtgcatttgtaatttattaaagttcatctgtgtgtgacagaagagatttcaacacaccccacaaagaaacaactcgggccctaagccgggcgccaaaagggatggaaggcccggtcaacgggtccggcccgctctgtcaaggggaacggcggtcccaaggacgacaatcggaaccgacgagcacccacacacggcacacaccagcagacgccaccaacacccgcgaccgccgcggcagcgcagcaccccacca

SEQ ID NO: 72214 - DNA, 675 bp, Homo Sapiens
aggtagcgaggcctgggtggcgaattcggcacgaggcgggtcatggcgcggctaccgaagctggcagtctttgatttggattacactctctggcctttctgggtcgacacgcacgtagaccctccgttccataagagcagtgatggaactgtacgagataggcggggccaagacgtccgactgtacccagaggtgcctgaggtcctaaaacgattgcagagccttggggtgcccggtgcggctgcttcaaggacaagtgagatagaaggggccaaccagctactggagctctttgacctcttcaggtactttgttcatcgggaaatctatccaggcagcaagatcacacactttgagaggttgcagcagaagactggaattcctttctccccagatgatcttctttgatgatgagaggcggaatattgtagacgtcagcaaactgggtactgagtgatgaggaacagccatttggggtccctaggagggattaggtgttacctgcattcacatccagaatggaatgaatcttcaaactctaagtcaagggttagagacatttgcgaaggcccaaactgggccctttgaggtccagccttgagggagagcccatttggaggcctaaactgaaagggaaatcaagaaggcattttcaggtgcatttgtaatttatta

SEQ ID NO: 72215 - DNA, 1182 bp, Homo Sapiens
  misc_feature (215)..(261): n is a, c, g, or t
agcgttggagggaaggaggtggcatcgccgtccgcgccggcctcggccatgaacgggctgccctcggcagaggcgccgggcggggcgggctgcgctttggccgggctcccaccgctgccgcgcggcctcagcggcctccttaatgcgagcgggggctcgtggcgggagctggagcgcgtctacagccagcgcagccgcatccacgacgagctgannnnnnnnnnnnnnnnnnnnnnnnnnnnnnnnnnnnnnnnnnnnnnngccaacgcgggacccgcagccggcccgcgtcgtcctgtcaacctcgactcagcgctggccgcgctgcgcaaggagatgttgtctgcaggtggggctgcggcagttggacatgtccttgttgtgccagctgtggggcctgtacgagtcaatccaggactacaaacacctgtgccaagacctgagcttctgccaggacctgtcatcctccctccattcggacagctcctacccaccggatgcgggcctgtctgacgacgaggagcctcccgatgccagcctgcctcctgacccgccaccccttactgtgccccagacgcacaatgcccgtgaccagtggctgcaggatgccttccacatcagcctctgaagggctggggggcagggggcatgcacccatgcaaaaggctcagaaactccccctccggcaagccctcagacttcggagcctgcgccttcccccctaccgcctcacctcacaggagggccaggcatgtattcctcagaggcgaaactgccaaactctttctcctgtcttgggttggctggcactggggcgggcatctagggtacagcctctgctcatggcactgggcctccagttcttccacatgtgtgcacccccagcttggccaaccctcagccttgcggtggggcccgaagcatcttcccttccgcttggcgtctctgggattgggatgagtgcctggctcccatctcctcctcaccttttgttgctatcggcagctgctggctcaggggcatcccacctccgggctctgggttcctctgccctggaagggctccaggacccgtcccaataaccacccacggccaggagggccaaggccccgtgctggatatttaaatttaggggccggtctccagggcgcgtagataaataaatacactcagcgtcgttgt

SEQ ID NO: 72216 - DNA, 971 bp, Homo Sapiens
gctggaccggtccggaattccctgcatcgacaccagcttggtggccccatgtgggcagagcccatccatgacctggattttgtgggccgtgtcctggaggctgtgagcgctaaccccggccgcttccacacctcggagcggatccgaggggtcctgagcgtcatcactgaggagctcccggacgtgcctctgtactacaccctggaccagctgagcagcaccatccactgcaacacaccaagcctcctgcagttgcggtcggccctcctccacgctgacttccgggtctcactctcccacgcctgtaagaacgctgtgaagacggatgcccctgcctctgccctctgggacatcatgcgttgctgggagaaggaatgtccggtgaaacgggagcgactatcagagactagcccagcgttccgcattctcagtgtggagcccaggctgcaggccaacttcaccatccgggaaggaatgtccggtaaaccccagcgaccaacagagacgactcaagcgcttccaggctaacccggaggccaactggggtccccggcctcgtgcccggccagggtgagtggtggccagctcccgggggtggggactcagccagggaaagaaggggtaaagggccaaatggggtcccaccgactcctccccgcgcacagggggcaaggcggccgacgaagctatggaggagagacgcaggctgcttcagaacaagcggaaggagccgccggaagatgtggcccagcgggctgcccggctcaagacatttccttgcaagaggtttaaggagggcacctgtcaacgcggggaccagtgctgctactcccacagccccccgacacccagggtttctgctgatgctgcccctgactgtccagagacctccaaccagaccccccctggacctggggctgccgctgggccaggcatagactgaaccaataaagagatgtcacgtcaccttc

SEQ ID NO: 72217 - DNA, 1433 bp, Homo Sapiens
actgtgccaacatggcggcgccaggtcctaattcgggaaacgtgcaccttgactaattcggttttctgtggctacgagagcaggcttggcgggcggaggcgccagcggatgtctcatgcaaggatcgtctctgtggctaagcctcactttccgctccgcccgggtgctctctagagcccggtttttcgagtggcagtctccagggctgccgaatacagcagcgatggagaacggcaccgggccctacggagaagaacgtccacgtgaagtccaggagacgacagtcaccgagggggctgccaaaatcgcctttcccagtgccaacgaggtcttttataacccggtgcaggaattcaatcgggacctgacatgtgctgtgatcaccgagtttgctcgcattcagcttggggccaaaggaatccagatcaaggttccaggagagaaggacacgcaaaaagtggtcgtggacttgtcagagcaagaggaggaaaaggttgaactgaaagagagtgaaaacctggcctcaggagaccaacctcgcacagcggccgtgggggagatctgtgaggaaggcctgcatgtgctggaaggcctggcagcttcaggcctacgttccattcgatttgccctagaggtgcctgggctcagatctgtggttgcaaacgatgcctccacccgggctgtggatctcatacgccggaatgtccagctcaatgacgtggcccacctggtacagccgagccaagcagatgcccggatgctgatgtaccagcaccagagggtgtcggagaggtttgacgtcatcgatctggacccctatggcagcccagccaccttcctggatgcagctgtgcaggctgtgagtgaaggagggttgctgtgtgtgacctgcacagacatggcggtgttggcggggaacagcggggagacgtgctacagcaagtacggggccatggccctcaagagccgggcctgccacgagatggccctgagaatcgtcctgcaggccaacttcaccatccgggaagatgccaaccccagctcccgacagcgaggactcaagcgcttccaggctaacccggaggccaactggggtccccggcctcgtgcccggccagggggcaaggcggccgacgaagctatggaggagagacgcaggctgcttcagaacaagcggaaggagccgccggaagatgtggcccagcgggctgcccggctcaagacatttccttgcaagaggtttaaggagggcacctgtcaacgcggggaccagtgctgctactcccacagccccccgacacccagggtttctgctgatgctgcccctgactgtccagagacctccaaccagaccccccctggacctggggctgccgctgggccaggcatagactgaaccaataaagagatgtcacgtcaccttctcccgatta

SEQ ID NO: 72218 - DNA, 295 bp, Homo Sapiens
gcggccgcctactactactatacggctgcgagaagacgacagaaggggccgccggaagatgtggcccagcgggctgcccggctcaagacatttccttgcaagaggtttaaggagggcacctgtcaacgcggggaccagtgctgctactcccacagccccccgacacccagggtttctgctgatgctgcccctgactgtccagagacctccaaccagaccccccctggacctggggctgccgctgggccaggcatagactgaaccaataaagagatgtcacgtcaccttctcccgt

SEQ ID NO: 72219 - DNA, 971 bp, Homo Sapiens
  misc_feature (125)..(125): n is a, c, g, or t
  misc_feature (157)..(157): n is a, c, g, or t
  misc_feature (241)..(241): n is a, c, g, or t
  misc_feature (258)..(258): n is a, c, g, or t
  misc_feature (834)..(846): n is a, c, g, or t
atccgagccgacagagatgttctccaccgcactccatgggacactgtatttcggaggcgtgagccagagatccagagcacgtgactgtgctgccccgtccgcaagtatcacgcgcgtcatgcacntgtgttgctgtgtgtcatcgcgtggatgcccntcagcttactcatgccacgcaggatacaggcttcgaacccagatgacgcgctggagctgagttgtgcgcggagcacccccctcntatgtcagctcatcgcncagggcctcattccacccgtggaggactttcctgtctacagtgcgtcccaggcctctgtgctgcagaatcttcgcacagccatgcggagacagatgcgtcggcacgcctcccgccgggggccctcccgccgccgcatcggccgcctctggaaccggctctttcaccggccgcgggcgccccgaggccagatcccactgctgaccgcagcacgcccctcacagaccgtgctgggcgatggcttcctccagcctgctccaggggctgcccccgaccccccagcaccgctcatggacacaggcagcaccagggcggccggagacaggccccccagtgcccccggccgtgcaccggaggtgggaccttcagggccacccttgccctcgggcctgcgagacccagagtgcaggcccgtggacaaggacagaaaggtctgcagggagccactggtagacggcccagctcctgcagatgcacctcgggagccctgctcagcccaggacccgcacccccaggtctccactgccagcagcaccctgggcccccactcgccagagccactgggggtctgcaggaannnnnnnnnnnnntgctccccaatgctggaggccagcgatgatgaggccctgttggtctgttgaccgctgggctcgctggtgaccgccacagccccgctttgtaaccagggaatacacagtcatttctaccctgccaa

SEQ ID NO: 72220 - DNA, 489 bp, Homo Sapiens
gagaagtgagccctgcctgggctccacacccagagagtccatacaaattctgctccgggaagagtcggggggtctattcaagtttctctgcagacaaaacttcccttcctccaggttttccttctttcctcctcagcagagaaactggagaaaggacattaaactcagtgcagtcgatttgagtgctgaaatatttccagaatcaatggtggtgctaaactatctccatgtttctagcatttttaatagtggagttggtttgtttttaatctcatcacaaaaatgcagtgcccttggggaagggaccagccccttggcctgccactttccaggtgtcctttatcactttgacgggactctttggtctgcagaaaatgctctgtcttggcatgcttctagactgtaagatttgggttttgttttgtattttatgtttacatgcatcttatatttccctgaaaactaaataaagttttgggcctttttaaa

SEQ ID NO: 72221 - DNA, 472 bp, Homo Sapiens
tctctcaacacatggccctcaaaaaagatggtaatcttaattatttagcaatggggggagttctcttcccagagagctctgctttgagattctcaaagactaaatatctagatggatatacgccaagggagagacccgcacagggcacagtcccattccaggcacagagatctgtgtctgtgcagaaattcaccaaatagggggttgaagtagcaagcatacagtctggaggtggagggaacaagccacagggacgtccctgtcaccttgaggggcagagctctgaggctccaacccagaggaaacttcccattctgttgctttctctaccggtgctgaggaaggaggccagattggtacctgttgtgggaagttttgtctgcagagaaacttgaatagaccccccgactcttcccggagcagaatttgtatggactctctgggtgtggagcccatgcagggctcacttctc

SEQ ID NO: 72222 - DNA, 1165 bp, Homo Sapiens
gtacagttcggcccatcagttctcaatgaatggtcattgatttacttagcagagagaagtcaccagccgacaaaccaatctttgagtttgcaggccctgattccagaatatatgcatccagctcccgggttctcagctggttttgcccacttccctttgactgtccaatccaaagccagtctctcaagttgtatggctcaaagagcagtgaccacaaggggtcatacagtagggacccacctccacaaattagaaccagagttcagactccattgggcacatctgggaggaaggcaacctcctttgtcgtcttgttggtaccagtcattctcaagtatctctgacacctgtggtggttcagtttgctgagcctgccacctggtatgaattagactgggtgtgatgaacattcatccatggatataccctaccattttgcgttgccttataaccaaggcacactccccataagagtttactgcagagaaagaacagcaaaacagccaccctccttgaatttacaactcattatctgcaacaggttttctttaaatccaagacacaggatgggaaatgggtttccccaccaggtactcagaggtctgcaggaagtgactcccgggcaaggcagacttcagtaatccctgaagcgtgagcatgtggactgcatggctgggtggggactggtggatgtctctggagctccagaaccttggagaattcctcatggaattcccctcccagctcttagtgggctctgtggggtcaggaggagcccttcctccaggttttccttctttcctcctcagcagagaaactggagaaaggacattaaactcagtgcagtcgatttgagtgctgaaatatttccagaatcaatggtggtgctaaactatctccatgtttctagcatttttaatagtggagttggtttgtttttaatctcatcacaaaaatgcagtgcccttggggaagggaccagccccttggcctgccactttccaggtgtcctttatcactttgacgggactctttggtctgcagaaaatgctctgtcttggcatgcttctagactgtaagatttgggttttgttttgtattttatgtttacatgcatcttatatttccctgaaaactaaataaagttttgggccttttttaaccg

SEQ ID NO: 72223 - DNA, 680 bp, Homo Sapiens
gcaaaagtgcaaatatatgcaagttgtcctatcgcgtataaatgtagtgtttcattggatttattttatgctaggttatattaagttgaaatagtctgtgattaaatgtcctcatccatgcacagaatatgaatggcagcaaatctttgtgcaagaaatttgaaacttattgggaaaagcctcccagtagattaattgttcatatcaggagatttagggtaagtcatgggttgaggtgtcagatagtaatatctatttgttttgtacatgtatatatctaggaactttgtaacaacacatctttaataatgttaaaggttttttcatttttaatattttaaactaaaaactgtacttcaatctcagtttctaaaattaaaaataatttatactgatctataataattttttctttttgaaagatttcattaagactgatgggtaactttcaaatgagggtcatgtacaaatattgggatgcatgagatcccatgatcttgtgtattgagcttattgttgaaagggatttttgaaggacagaacaattactccatgatgaatcttcctttctctgccttctgagcaccgtctttaatttccatatcttcaagtcttgaagaagttgatgttaattgaagaattcacttgtctggttgaaataaagcctgtttctgttgtga

SEQ ID NO: 72224 - DNA, 466 bp, Homo Sapiens
actttgaataaaccatttctctgcacttaagttccttaccaacaaaacgagggaagtggcctacatgcctagatatcaacatttcatgtcacgtagagatctagcatcacaagaatccaagtcatcctctgttgcctttaagatttcagcatggtgaaggaaaagtagcagaagactgaatgcatactcagttttcaagctctggatttaatctttccatagctggaattgcctcctcctcaaaagccttatttgttcatttaattggggcaacatgaaataatgatgtatcattgacagagaacagggggcttaggttctcatcttggtcctagtgattactctatgcataacctcaacttctttatctgtacattgggaacaataattcttactccacttgttgtgttgaaactgaattatataattcataaattaaaacaccaaattctgataaatgctaaaa

SEQ ID NO: 72225 - DNA, 1626 bp, Homo Sapiens
  misc_feature (1121)..(1223): n is a, c, g, or t
  misc_feature (1356)..(1366): n is a, c, g, or t
  misc_feature (1467)..(1475): n is a, c, g, or t
gctgtgtgctgtctgataaaaggccacaggtacagctgtgcaggtagagctggtgaaggcacttttgagtggccccggggtcgcgtctacaggtcaggatagatgggctgctcctctttcccccgcctcccgtgagccccgtatgcttcctcctctctggtctgaggaacctccctccccccacccctccccgtggtcttcaggaactttgtctcctgcctgtgcaggttgaggaaggtagttgcaggccaggccagaaggccagcctcatcatcttttctgcagtagaaattggtgataagggctgcatccctcccttggttcaaagaggcttccacccccagccttttttttcttgggagttggtggcatttgaaggtgtttgcggacaaaactgggaggaacagggcctccaggcagtgaaagcactgcttggacatttgttacttttttcggagttagggagggattgaagactgaacctcccttggaagaataccagaggctagctagttgatcctccccaacagccttgtgggaggattttgagatacttattctttatttgagccagtcttgcaaggttaacttctcactgggcctagtgtggtgcccaggtttttgccttgcttcacttctgtctctacatttaaatagacgggttaggcatataaaccttggcttttcataagctctacctgcctatccccaggagttagggaggatctatttgtgatggcctagggtttaagagctgtggaggactgaaaactggataaaaagggggtccttttccttgcccctgtctctcactcagatgcgcttctttttcgccactgtttggcaaagttttctgttaagcccccctccccctgccccagttctccaggtgcgttactatttctgggatcatggggtcagttttaggacacttgaacacttcttttccccccttcccttcacagtaactggggcaggggcctacggggaggggcttgtactgaactatctagtgatcacgttaacacctaactctccttctttcttccaggggccgggctagagcgacatcatggtattccccttactaaaaaaagtgtgtattaggaggagagagaggnnnnnnnnnnnnnnnnnnnnnnnnnnnnnnnnnnnnnnnnnnnnnnnnnnnnnnnnnnnnnnnnnnnnnnnnnnnnnnnnnnnnnnnnnnnnnnnnnnnnnnncttgtggcccccgcctcgcccctagaaaatttttcaacactttttttggggcgcggggccccaatgggaaagagaacgtggtcatatgtgttccctaagataccgggcacaagactagcgcttgtattctccnnnnnnnnnnncccgggggggaaacagagcgttctgaaaatctccagagggatttggggggtcttcagtggatctctccaggggaccccgcgagctctctatataaatttgnnnnnnnnngtgacactcggtagggtagtgttgtttttcataaacttctccgcccacgggaaacccctcaaaaggggtattaagaacctaaatccccacgggatctcaaccaccgtgcccccttgggataaaatattccccccgggggaaaacggggggg

SEQ ID NO: 72226 - DNA, 1079 bp, Homo Sapiens
cagtcgacggtaccggacatatgcccgggaattcggccattacggccggggagttctcagacaaagagtcagtgaggacttccttggccttagatgagtccctatttagaggaaggcaaatcaaggtgatcccaaaacgaaccaacagaccaggcatcagcacaacagaccggggttttccacgagcccgctaccgcgcccggaccaccaactacaacagctcccgctctcgattctacagtggttttaacagcaggccccggggtcgcgtctacaggtcaggatagatgggctgctcctctttcccccgcctcccgggagccccgatgcgtcctctctctggctgagcaagctcccttcacccccacgccctcaccgctgtacagcagggaactcctgtcttcatgccgtgtgaccagcagcttgagtgcacggtcacgctctgcagcggccaagccagagaggtgcatgccctcatcatcttttctgcaggtagaaattggtgatacagggcctgctatcccctccccttggttcccacgaggcattccacccctccagccttttacgggctcaggccacgtgggtggccatttgaaccggtgttcgcggacaaaactgggaggaacagggatcgtccaggcagtgaaagcactgcttggacatagtcacctcctattcggagcttagcgacgggattgagggaatgaaacctggccttggaagaatacctagagggttagctagtttgatcctccaccaaacagacttgtgagaggatttgagataccatatgctttatgtggaggcgcagtcttgccaaggttaccttcgtcactgggcctaggtgtggtagccagggttgtgactagagtcagtcactgtctatacatctcaattaagacgggttaggcatataaccactgggttttcataaggtctactgactattgaccggaagtaacgggggacaatgagggaaagcctagggtaaccaggttgtgcactgaacgggttatcaggggcactgattgtcagggtacatggagagacattttgggaagtatacagtcctggac

SEQ ID NO: 72227 - DNA, 1011 bp, Homo Sapiens
  misc_feature (47)..(175): n is a, c, g, or t
  misc_feature (228)..(285): n is a, c, g, or t
ggtaccggtccggaattcagggatatcgtcgacccacgcgtccgttnnnnnnnnnnnnnnnnnnnnnnnnnnnnnnnnnnnnnnnnnnnnnnnnnnnnnnnnnnnnnnnnnnnnnnnnnnnnnnnnnnnnnnnnnnnnnnnnnnnnnnnnnnnnnnnnnnnnnnnnnnnnnnnnnactacgggaacggcctggagtctgaggaactggagcctgaggagctgctgctnnnnnnnnnnnnnnnnnnnnnnnnnnnnnnnnnnnnnnnnnnnnnnnnnnnnnnnnnnggagctccgggccctgggcctggttcgggagcccccggcagccaagaggaggaggaggagccgggactggtcgagggtgacccgggggacggcgccattgaggacccggagctggaagctatcaaagctcgagtcagggagatggaggaagaagctgagaagctaaaggagctacagaacgaggtagagaagcagatgaatatgagtccacctccaggcaatgctggcccggtgatcatgtccattgaggagaagatggaggctgatgcccgttccatctatgttggcaatgtggactatggtgcaacagcagaagagctggaagctcactttcatggctgtggttcagtcaaccgtgttaccatactgtgtgacaaatttagtggccatcccaaagggtttgcgtatatagagttctcagacaaagagtcagtgaggacttccttggccttagatgagtccctatttagaggaaggcaaatcaaggtgatcccaaaacgaaccaacagaccaggcatcagcacaacagaccggggttttccacgagcccgctaccgcgcccggaccaccaactacaacagctcccgctctcgattctacagtggttttaacagcaggccccggggtcgcgtctacaggggccgggctagagcgacatcatggtattccccttactaaaaaaagtgtgtattaggaggagagagaggaaaaaaagaggaaagaagg

SEQ ID NO: 72228 - DNA, 1151 bp, Homo Sapiens
  misc_feature (732)..(732): n is a, c, g, or t
gaggctggaccggtccggaattcctcgggatctcccggcctcctctgctctcgcgcctctaggggctcaagcactgctccgggagcgctgaattttgaggaagagggcagaacttcagtaaggagacctgtctgggcaacggtttcaggacacgcggtggggaaagcgactagcctccggcggggcagggcgggctgtccttacctgcagaaccaccggccacgatctgccgagaagcctcgcgcactaagctgacttcaggcttggcggacatcttcgccaggcgggaggacaagggagtgggctgagatgcgtcaacgagctcgcagcctgcacagcctactgatccagagagccccggctgggctggtcctcaagcgcgttggctccctgtggagcagcaatccggcgactgctggaaagcgagggttcgaggcgcagattcgtcgcgcgatctccggcgcgtcggaacctgttcgcagcgctctcgcagaggcgccctcggctccgaaaatgtctctggaaagaagacccgcggatgggtttgggttggctcaccgcagcggctcaggctttgtctcctagattggcgcccacgcccttctctatcaggagcctccggtagtttgtcaaactagacggttgcctctgataactcaagtgaagtgacccaggcctggagcgccaagtacaaagcggggacgacacttgcacctcctggcaagccagaancacagtgaggttcaaaagaagggacaagtgaataaattcctcagttagttgccttataattgtggcctgtagcaactaagtcaaagcaaatctaatttacacttaccttacaatagagctaaggtagtactttaccaaaaaatggttttgattttaggtaaaatcatacctcattcactttgagttttatttaccctaggaccaaaagaagaaaaggcctggttaccaaatattttcttctaaaccccaggtcaggggttccttaaaaggggggtttagtaaccccaggcattagcctaaatttgtgaaaaggggttaggaattccaaatttcgtggggtcccaacccccaaccttaaagggaattcgaaactcctgggggaaaaggggcccaaaaaagaagttccccggggggaatgg

SEQ ID NO: 72229 - DNA, 2408 bp, Homo Sapiens
  misc_feature (2285)..(2313): n is a, c, g, or t
aaaaagaagcaagatctaaatttagacagattgtgtctgcagttcaatactgccatcagaaacggatcgtacatcgagacctcaaggctgaaaatctattgttagatgccgatatgaacattaaaatagcagatttcggttttagcaatgaatttactgttggcggtaaactcgacacgttttgtggcagtcctccatacgcagcacctgagctcttccagggcaagaaatatgacgggccaaaagtggatgtgtggagtctgggggtcattttatacacactagtcagtggctcacttccctttgatgggcaaaacctaaaggaactgagagagagagtattaagagggaaatacagaattcccttctacatgtctacagactgtgaaaaccttctcaaacgtttcctggtgctaaatccaattaaacgcggcactctagagcaaatcatgaaggacaggtggatcaatgcagggcatgaagaagatgaactcaaaccatttgttgaaccagagctagacatctcagaccaaaaaagaatagatattatggtgggaatgggatattcacaagaagaaattcaagaatctcttagtaagatgaaatacgatgaaatcacagctacatatttgttattggggagaaaatcttcagagctggatgctagtgattccagttctagcagcaatctttcacttgctaaggttaggccgagcagtgatctcaacaacagtactggccagtctcctcaccacaaagtgcagagaagtgtttcttcaagccaaaagcaaagacgctacagtgaccatgctggaccagctattccttctgttgtggcgtatccgaaaaggagtcagaccagcactgcagatagtgacctcaaagaagatggaatttcctcccggaaatcaagtggcagtgctgttggaggaaagggaattgctccagccagtcccatgcttgggaatgcaagtaatcctaataaggcggatattcctgaacgcaagaaaagctccactgtccctagtagtaacacagcatctggtggaatgacacgacgaaatacttatgtttgcagtgagagaactacagctgatagacactcagtgattcagaatggcaaagaaaacagcactattcctgatcagagaactccagttgcttcaacacacagtatcagtagtgcagccaccccagatcgaatccgcttcccaagaggcactgccagtcgtagcactttccacggccagccccgggaacggcgaaccgcaacatataatggccctcctgcctctcccagcctgtcccatgaagccacaccattgtcccagactcgaagccgaggctccactaatctctttagtaaattaacttcaaaactcacaaggagaaacatgtcattcaggtttatcaaaaggcttccaactgaatatgagaggaacgggagatatgagggctcaagtcgcaatgtatctgctgagcaaaaagatgaaaacaaagaagcaaagcctcgatccctacgcttcacctggagcatgaaaaccactagttcaatggatcccggggacatgatgcgggaaatccgcaaagtgttggacgccaataactgcgactatgagcagagggagcgcttcttgctcttctgcgtccacggagatgggcacgcggagaacctcgtgcagtgggaaatggaagtgtgcaagctgccaagactgtctctgaacggggtccggtttaagcggatatcggggacatccatagccttcaaaaatattgcttccaaaattgccaatgagctaaagctgtaacccagtgattatgatgtaaattaagtagcaattaaagtgttttcctgaacactgatggaaatgtatagaataatatttaggcaataacgtctgcatcttctaaatcatgaaattaaagtctgaggacgagagcacgcctgggagcgaaagctggccttttttctacgaatgcactacattaaagatgtgcaacctatgcgccccctgccctacttccgttaccctgagagtcggcgtgtggccccatctccatgtgcctcccgtctgggtgggtgtgagagtggacggtatgtgtgtgaagtggtgtatatggaagcatctccctacactggcagccagtcattactagtacctctgcgggagatcatccggtgctaaaacattacagttgccaaggaggaaaatactgaatgactgctaagaattaaccttaagaccagttcatagttaatacaggtttacagttcatgcctgtgnnnnnnnnnnnnnnnnnnnnnnnnnnnnnagtgcaaaaggtttaaatttatagttgtgaacattgcttgtgtgtgtttttctaagtagattcacaagataattaaaaattcactttttctcagt

SEQ ID NO: 72230 - DNA, 486 bp, Homo Sapiens
  misc_feature (382)..(382): n is a, c, g, or t
agagcacgcctgggagcgaaagctggccttttttctacgaatgcaccacattaaggatgtgcaacttatgcgccccctgccatacttccgttaccttgagagtcggcgtgtggccccatctccatgtgcctcccgtctgggtgggtgtgaaaagtggacggtatgtgtgtgaaagtggtgtaatatggaagcatcctcccctacactggcagcccagtcattacctagtaccctctgcgggagatcatccggtgctaaaacattacagttgcccaaggaggaaaatactgaatgactgctaagaattaaccttaagaccagttcatagttaatacaggtttacagttcatgcctgtggttttgtgtttgttgttttgtgttnttttagtgcaaaaggtttaaatttatagttgtgaacattgcttgtgtgtgtttttctaagtagattcacaagataattaaaaattcactttttctcagtaaaaa

SEQ ID NO: 72231 - DNA, 3517 bp, Homo Sapiens
  misc_feature (86)..(120): n is a, c, g, or t
  misc_feature (3391)..(3415): n is a, c, g, or t
aagactgttaatcactatagggcgctaagctcttatatatgcgaatgaaccgatcgcagggagtagtgagccgaggaagcggccgnnnnnnnnnnnnnnnnnnnnnnnnnnnnnnnnnnncagtcgacggtaccggacatatgcccgggaattcggccattacggtccggggggtggtgcggcggcggcagcggcggccactcagggcggagggctgaggcagcaagctcgctagagagggagaagcagtcgggcgcaggcgcctcctccgcagcccgctccatggtcggcgcccacagcccgcggcggcctgtcttgcgctccacttccttcacatcctcctccgcctcctcgttttcaggcgccgccggcggcgctgtgtgggaggcccgcgagctgaaattcgcggtgcgacgggagggagtggagaaggaggtgagggggcccaggatcgcggggcgccctgaggcaaggggacgccggcgggccgaagcgcagcccgccgcccgcaggctcggctccgccactgccgccctcccggtctcctcgcctcggccgccgaggcagggagagaatgagccccgggacccgccgggggacggcccgggccaggcccgggatctagacggccgtagggggaagggagccgccctccccacggcgccttttcggaactgccgtggactcgaggacgctggtcgccggcctcctagggctgtgctgttttgttttgaccctcgcattgtgcagaattaaagtgcagtaaaatgtccactaggaccccattgccaacggtgaatgaacgagacactgaaaaccacacgtcacatggagatgggcgtcaagaagttacctctcgtaccagccgctcaggagctcggtgtagaaactctatagcctcctgtgcagatgaacaacctcacatcggaaactacagactgttgaaaacaatcggcaaggggaattttgcaaaagtaaaattggcaagacatatccttacaggcagagaggttgcaataaaaataattgacaaaactcagttgaatccaacaagtctacaaaagctcttcagagaagtaagaataatgaagattttaaatcatcccaatatagtgaagttattccaagtcattgaaactgaaaaaacactctacctaatcatggaatatgcaagtggaggtgaagtatttgactatttggttgcacatggcaggatgaaggaaaaagaagcaagatctaaatttagacagattgtgtctgcagttcaatactgccatcagaaacggatcgtacatcgagacctcaaggctgaaaatctattgttagatgccgatatgaacattaaaatagcagatttcggttttagcaatgaatttactgttggcggtaaactcgacacgttttgtggcagtcctccatacgcagcacctgagctcttccagggcaagaaatatgacgggccagaagtggatgtgtggagtctgggggtcattttatacacactagtcagtggctcacttccctttgatgggcaaaacctaaaggaactgagagagagagtattaagagggaaatacagaattcccttctacatgtctacagactgtgaaaaccttctcaaacgtttcctggtgctaaatccaattaaacgcggcactctagagcaaatcatgaaggacaggtggatcaatgcagggcatgaagaagatgaactcaaaccatttgttgaaccagagctagacatctcagaccaaaaaagaatagatattatggtgggaatgggatattcacaagaagaaattcaagaatctcttagtaagatgaaatacgatgaaatcacagctacatatttgttattggggagaaaatcttcagaggttaggccgagcagtgatctcaacaacagtactggccagtctcctcaccacaaagtgcagagaagtgtttcttcaagccaaaagcaaagacgctacagtgaccatgctggaccagctattccttctgttgtggcgtatccgaaaaggagtcagaacagcactgcagatagtgacctcaaagaagatggaatttcctcccggaaatcaagtggcagtgctggtggaagaaaaggaattgctccagccagtcccatgcttgggaatgcaagtaatcctaataaggcggatattcctgaacgcaagaaaagctccactgtccctagtagtaacacagcatctggtggaatgacacgatcgaaatacttatgtttgcagtgagagaactacagctgatagacactcagtgattcagaatggcaaagaaaacagcactattcctgatcagagaactccagttgcttcaacacacagtatcagtagtgcagccaccccagatcgaatccgcttcccaagaggcactgccagtcgtagcactttccacggccagccccgggaacggcgaaccgcaacatataatggccctcctgcctctcccagcctgtcccatgaagccacaccattgtcccagactcgaagccgaggctccactaatctctttagtaaattaacttcaaaactcacaaggagtcgcaatgtatctgctgagcaaaaagatgaaaacaaagaagcaaagcctcgatccctacgcttcacctggagcatgaaaaccactagttcaatggatcccggggacatgatgcgggaaatccgcaaagtgttggacgccaataactgcgactatgagcagagggagcgcttcttgctcttctgcgtccacggagatgggcacgcggagaacctcgtgcagtgggaaatggaagtgtgcaagctgccaagactgtctctgaacggggtccggtttaagcggatatcggggacatccatagccttcaaaaatattgcttccaaaattgccaatgagctaaagctgtaacccagtgattatgatgtaaattaagtagcaattaaagtgttttcctgaacactgatggaaatgtatagaataatatttaggcaataacgtctgcatcttctaaatcatgaaattaaagtctgaggacgagagcacgcctgggagcgaaagctggccttttttctacgaatgcactacattaaagatgtgcaacctatgcgccccctgccctacttccgttaccctgagagtcggcgtgtggccccatctccatgtgcctaccgtctgggtgggtgtgagagtgaacggtatgtgtctgaagtggtgtatatgtaagcatctccctacactggcagccagtcattgctagtacctttgcggtagatcatccggtgctaaaacatttcagttgccaaggagtcaaatactcaatgtctcctaagaattaaccttaagaccagttcatagttaatacaggtttacagttcatgcctgtggtcannnnnnnnnnnnnnnnnnnnnnnnnagcgcaaaaggcttaaatttatagttgtgaacactgcttgtgtgtgtttttctaagtagattcaccagataattaaaaactcactttttctcagtaaacaaa

SEQ ID NO: 72232 - DNA, 1279 bp, Homo Sapiens
  misc_feature (974)..(996): n is a, c, g, or t
  misc_feature (1049)..(1146): n is a, c, g, or t
  misc_feature (1156)..(1170): n is a, c, g, or t
ggtatggcgagtccgtactgtcattgttctcctctccagaccagcctgtttgagaagagtagattccgatcccgtagctcgctttctcatcaaactaccatagctgatacttgtgatgcatttgtgtggccccctagagggaagatggcatatatctactctgtgggtgcaatcgagtgaggaggtgtccggatgcatttagcatatgtttttcccttgcagcgcttgtgttactggcctgcccttcctcattacagtatgagggagccgtgacacgcagcatgtcatgcgttctgtcagcgactgtcagggcagctcttgccattccgtcagggccagcatgccagtacaggcagagcaggtgcctgactgagtgctgtatcgcaccgcccatccacaggaccctggaccagggcggtgcagggcgcagccccgaggaggcaggtggaggagctgcgggttttcacagggccgcgtcgccacggctcctctgatcctttagggttggcgagcatctctggaaatagcttttgcagaggagtggtgggaggaatagagggggacagtctgtcacctccctccccgccactttgtgtagatcctacctggagggaatggctttaggcacttttgtgccagagcttgtgagggtgacagaagagggtccaggctggaaacctgaactttctgggtgggagaaccaggtggtgcctgccgaggtctgggcgtgtttgggccggtgctggagcctgtccagctggcccgggccctggcctggttctcaagtgtttcctagacagagaggcacctgggtcagtattagtctatttatcagaggtgtaaataatctatgtatagtttttctccttttagattattttgtatttgtttaaaagaagttttgtcaaaatacaaaaatataaagaaatgactgaaagttgttgacagggtttttaagaaataattattctaannnnnnnnnnnnnnnnnnnnnnnccttgtaaactagcgccaaggaactgcagcaaataaactccaactctgcccannnnnnnnnnnnnnnnnnnnnnnnnnnnnnnnnnnnnnnnnnnnnnnnnnnnnnnnnnnnnnnnnnnnnnnnnnnnnnnnnnnnnnnnnnnnnnnnnncccttggcgnnnnnnnnnnnnnnnaaaaagtttttaaaaccttccgttgggcgcggggccccaaaaggaaaggaaacggggccatacttgttcccaaggaaaccggggccataaaaagggctgggttcccccc

SEQ ID NO: 72233 - DNA, 1128 bp, Homo Sapiens
  misc_feature (84)..(134): n is a, c, g, or t
gaatgtctgtaaagctcttcccatatttcacttttaaaaatgtttagggaaaaaaattagaagtatttgccattattctagtgnnnnnnnnnnnnnnnnnnnnnnnnnnnnnnnnnnnnnnnnnnnnnnnnnnnctaaaaccacattacacagatggatcatcatgctttcatctggtttaactatcacatctagtttaactgggatgcttttcaactttaaaaattgtgatacatgaagatgtaactttaatggataattttgaatttggatttaactttgttgactataacagagtatacttattacaatacagtgtagcacatctttctattagaaaaaaatttaagatcctttacccgtctccttaagttaaaggtgtgacatcataaagggtgtcaaatggctggatggttttacagtgcacacttatatattatgaagtatgtccttaacaaatctgatggtttctttacagaattcctttcttcaccttttcttcggcggattagctgttcgaggtggagtgacaggacgtccagaattcagtccaccatactggtatttagctttcttttcagatggtttcaatatctgaaatgaacacatcaaagtttcatccacactcatcattccaccagcattatcaaactcgccacagtaatttggggctgaaaataaggttaccaactgtcgtttagcaaaaaattcatatccatcttccaccacctgatgagctcgacaaatcaaatctaaatcatgacgattcagaaatttactgactacatcagctccaaaagtaaaggaaacaccacgatcattttctccccagccttgcacatccttatctggatcagaccatagcaaatcacagagcaaacctgtatcagggacatcagtaggtctcataattctccgaatctgctccatagattgcaggtctggtgacaatcctccatgacaacagaagatcttctcatccacaatggctgctataggcagacagttaaaacaatcagtgaaggtcttccacaatttaatattaaatcttcgtttgcattcatcatagaatccataacccggccgtaatggccgaattcccgggcatatgtccggtaccgtcgactg

SEQ ID NO: 72234 - DNA, 539 bp, Homo Sapiens
  misc_feature (73)..(81): n is a, c, g, or t
  misc_feature (271)..(313): n is a, c, g, or t
atatcagtatcagctgtaaagtatgccagtcaaactgtatgattaaaatcactggataggacaatgtgcgtannnnnnnnnaaaacaatcaatctctaaaattcctttttaatgtaatgaggcgaaagttttcttagtaagattaaacagatatctaagtagataaacaagggaaaataatagttggtgaatgtctgtaaagctcttcccatatttcacttttaaaaatgtttagggaaaaaaattagaagtatttgccattattctagtnnnnnnnnnnnnnnnnnnnnnnnnnnnnnnnnnnnnnnnnnnncaagcaacactaaaaccacattacacagatggatcatcatgctttcatctagtttaactatcacatctagtttaacggggatgcttttcaactttaaaaatggtgatacatgaagatgtaactttaatggataattttgaattgggatttaacttggtggactataacagagtatacttattacaatacagggtagcacatctttctattagaaaaaaatttaaga

SEQ ID NO: 72235 - DNA, 1228 bp, Homo Sapiens
aaagcaaacttgtcctttggttttgcagaacaggcctgctccctctcatctagcccaccatttcttggggcctgaaccccagtggtccaaagtattgcttgtgaaatttaaaaaatgtgaatatgatgtggggatgggcctcttctacattaccttggcccagggggatcagctggctgggaggattagtgagcacctctgtattttgaggtctgagtcttctggagctgtgtagttaatcttcggtttctgataacccctgggtccatctggccatcagcctcagcagtgagcaaagcaataccatactcatttctatgttcctgttccttcctctgctcctcctttggagaagcaataattcatgggggatgatacagtagcactttacaaatggctccatgtcattcatcccaggggccataatctcttgcaccacctattcttacttcctgttcagctcctttacagcttttatttccaactgcttcccaacttggtggggcctcctttaaggatgagccaatagtaagaatgtggctgtaatcagcagagacccctctgaggggtatctgttctgcagcccctagtgaaatcatgtgatgtgagacagaaacctaaacatggtacttgattctaaacctgtgccagtctatagcctctgcctccccaagcagagctcaagccaaacgcttctgtcctctttccttctgcattaaccctttgctgatcctcaggggccactcccccaacacccctgtacttgggtgagggatgttggacagagcctgttttcatgtactgcaggtgggggtgtgctgacatgtttgctcttggttgatggagaaggtacagaggccagggagtgaaaatggttgacagaagagggaagagttaggtgtctcatagtcactcatagtggggtggtcaggggtaatggcatctccccactttaggcttctcaaacagacttttgacacctctcaagttcagagctctgatgtggaaagacaggaggtgtggggaaggagggggatttcgtgtgtttgcatgagtgtgcgcttcaggccttgggagttggcaagagggagggaaggaaggagagcaaaatcttcggaaggtgtttcttgtacctgagggatcctgccctgaatctccatagtctccactgtgaactgaggaggggaggggtgtgctggggaataaatcttgtatgagaacaaaaaaa

SEQ ID NO: 72236 - DNA, 1005 bp, Homo Sapiens
  misc_feature (24)..(24): n is a, c, g, or t
  misc_feature (30)..(30): n is a, c, g, or t
  misc_feature (36)..(36): n is a, c, g, or t
  misc_feature (42)..(42): n is a, c, g, or t
  misc_feature (46)..(46): n is a, c, g, or t
  misc_feature (59)..(59): n is a, c, g, or t
  misc_feature (866)..(866): n is a, c, g, or t
aaaaaccctatacggcgctaaagngtagcngtaggnccctgngcgngttgtgttagaanattcggcacgaggaaatccgaagtgccgcggaaagtggaggtgagggccgcccgccctagaggtgcccgtccgagaggcagagctgacaaggaaggtttcgagcgttttgctggcaaagggatttcttacaacctccaggcatgcgtctttctgccctgctggccttggcatccaaggtcactctgcccccccattaccgctatgggatgagccccccaggctctgttgcagacaagaggaagaaccccccatggatcaggcggcgcccagtggttgtggaacccatctctgatgaagactggtatctgttctgtggggacacggtggagatcctagaaggcaaggatgccgggaagcagggcaaagtggttcaagttatccggcagcgaaactgggtggtcgtgggagggctgaacacacattaccgctacattggcaagaccatggattaccggggaaccatgatccctagtgaagcccccttgctccaccgccaggtcaaacttgtggatcctatggacaggaaacccactgagatcgagtggagatttactgaagcaggagagcgggtacgagtctccacacgatcagggagaattatccctaaacccgaatttcccagagctgatggcatcgtccctgaaacgtggattgatggccccaaagacacatcagtggaagatgcttaagaaagaacctatgtgccctgtctaaagacactgcaggaggaggtgatggaggccatggggatcaggagaccggaatacagagtctatggtatgagctggggcaagcagtcctcccantctgtccacctgaagctgaggcctttttcaatgcataagaccttttgagtccaaacaaacaaaaaaacccggcttttcgggggaaaagtaaggccggtcttctcccttttaaggaagcgccaaagggaatacggaaaaa

SEQ ID NO: 72237 - DNA, 1117 bp, Homo Sapiens
  misc_feature (903)..(903): n is a, c, g, or t
  misc_feature (905)..(906): n is a, c, g, or t
  misc_feature (909)..(910): n is a, c, g, or t
  misc_feature (931)..(933): n is a, c, g, or t
tccaaggtagcgaggcctgggtggcgaattcggcacgagggggaggggacgctgagggcccatgtgctgaaaatccgaagtgccgcggaaagtggagagctgacaaggaaggtttcgagcgttttgctggcaaagggatttcttacaacctccaggcatgcgtctttctgccctgctggccttggcatccaaggtcactctgcccccccattaccgctatgggatgagccccccaggctctgttgcagacaagaggaagaaccccccatggatcaggcggcgcccagtggttgtggaacccatctctgatgaagactggtatctgttctgtggggacacggtggagatcctagaaggcaaggatgccgggaagcagggcaaagtggttcaagttatccggcagcgaaactgggtggtcgtgggagggctgaacacacattaccgctacattggcaagaccatggattaccggggaaccatgatccctagtgaagcccccttgctccaccgccaggtcaaacttgtggatcctatggacaggaaacccactgagatcgagtggagatttactgaagcaggagagcgggtacgagtctccacacgatcagggagaattatccctaaacccgaatttcccagagctgatggcatcgtccctgaaacgtggattgatggccccaaagacacatcagtggaagatgctttagaaagaacctatgtgccctgtctaaagacactgcaaggaggaggtgatggaggccatggggatcaaggagacccggaaatacaagaaggtctattggtattgagcctggggcagagcagctcctccccaacttctgtcccagccttgaaggctgaggcacttctttttcagatgccaataaagagcacttttttggncnnggnnatcccacacaaataaaaaaannnccccttgtgcggcccgccctcgggccccttcaagaaaactttttccaaaacccaattccggtttggggcgccccgcgggcccccccaaaggggtaaggtggaaaccatgggggccaataagacttgggttttctcctataaggaaaaacacccctcgggggcccatgtgaacataaaggggggt

SEQ ID NO: 72238 - DNA, 751 bp, Homo Sapiens
  misc_feature (684)..(684): n is a, c, g, or t
ggggagggcccatgtgctgaaaatccgaagtgccgcggaaagtggaggtgagggccgcccgccctagaggtgcccgtccgagaggcagagctgacaaggaaggtttcgagcgttttgctggcaaagggatttcttacaacctccaggcatgcgtctttctgccctgctggccttggcatccaaggtcactctgcccccccattaccgctatgggatgagccccccaggctctgttgcagacaagaggaagaaccccccatggatcaggcggcgcccagtggttgtggaacccatctctgatgaagactggtatctgttctgtggggacacggtggagatcctagaaggcaaggatgccgggaagcagggcaaagtggttcaagttatccggcagcgaaactgggtggtcgtgggagggctgaacacacattaccgctacattggcaagaccatggattaccggggaaccatgatccctagtgaagcccccttgctccaccgccaggtcaaacttgtggatcctatggacaggaaacccactgagatcgagtggagatttactgaagcaggagagcgggtacgagtctccacacgatcagggagaattatccctaaacccgaatttcccagagctgatggcatcgtccctgaaacgtggattgatcggccccaaagacacatcangtgggaagatgcttttaaaaagaaccctatgtgcccctgttctaaaagacacctggcagggagggag

SEQ ID NO: 72239 - DNA, 452 bp, Homo Sapiens
  misc_feature (129)..(181): n is a, c, g, or t
gttattatcccttggggcctcccagggcaggggttaaggccctgaatcatgagcctgctggaagcccagcccctactgctgtgaaccctggggcctgactgctcagaacttgctgctgtcttgttgcgnnnnnnnnnnnnnnnnnnnnnnnnnnnnnnnnnnnnnnnnnnnnnnnnnnnnngcagtgccttgcatacccaaaccaggtgggagccttttgttgaacatgacagcctgcagcaggaatataagggggcctatttgtgtggacaaaaatatttacacttagggtttggagctattcaagaggaaatgtcacagaagcagctaaaccaaggactgagcaccctctggattctgaatctcaagatgggggcagggctgtgcttgaaggccctgctgagtcatctgttagggccttggttcaataaagcactgagcaagttgtgaaa

SEQ ID NO: 72240 - DNA, 1744 bp, Homo Sapiens
aaggtagcgaggcctgggtggcgaattcggcacgagggaatcctccctgtcgtctgaatcctccgaatcttctgatgcaggtctctgcatggattcccccagccctatggacccccacatggcggagcagacgtttgaacaggccatccaggcagccagccggatcattcgaaacgagcagtttgccatcagacgcttccagtctatgccggtgaggctgctgggccacagccccgtgcttcggaacatcaccaactcccaggcgcccgacggccggaggaagagcgaggcgggcagtggagctgccagcagctctggggaagacaaggagaatgatggatttgtcttcaagatgccatggaagcccacacatcccagctccacccatgctctggcagagtgggccagccgcagggaagcctttgcccagagacccagctcggcccccgacctgatgtgtctcagtcctgaccggaagatggaagtggaggagctcagccccctggccctaggtcgcttctctctgacccctgcagagggggatactgaggaagatgatggatttgtggacatcctagagagtgacttaaaggatgatgatgcagttcccccaggcatggagagtctcattagtgccccactggtcaagaccttggaaaaggaagaggaaaaggacctcgtcatgtacagcaagtgccagcggctcttccgctctccgtccatgccctgcagcgtgatccggcccatcctcaagaggctggagcggccccaggacagggacacgcccgtgcagaataagcggaggcggagcgtgacccctcctgaggagcagcaggaggctgaggaacctaaagcccgcgtcctccgctcaaaatcactgtgtcacgatgagatcgagaacctcctggacagtgaccaccgagagctgattggagattactctaaggccttcctcctacagacagtagacggaaagcaccaagacctcaagtacatctcaccagaaacgatggtggccctattgacgggcaagttcagcaacatcgtggataagtttgtgattgtagactgcagatacccctatgaatatgaaggcgggcacatcaagactgcggtgaacttgcccctggaacgcgacgccgagagcttcctactgaagagccccattgcgccctgtagcctggacaagagagtcatcctcattttccactgtgaattctcatctgagcgtgggccccgcatgtgccgtttcatcagggaacgagaccgtgctgtcaacgactaccccagcctctactaccctgagatgtatatcctgaaaggcggctacaaggagttcttccctcagcacccgaacttctgtgaaccccaggactaccggcccatgaaccacgaggccttcaaggatgagctaaagaccttccgcctcaagactcgcagctgggctggggagcggagccggcgggagctctgtagccggctgcaggaccagtgaggggcctgcgccagtcctgctacctcccttgcctttcgaggcctgaagccagctgccctatgggcctgccgggctgagggcctgctggaggcctcaggtgctgtccatgggaaagatggtgtgggtgtcctgcctgtctgccccagcccagattcccctgtgtcatcccatcattttccatatcctggtgccccccacccctggaagagcccagtctgttgagttagttaagttgggttaataccagct

SEQ ID NO: 72241 - DNA, 1693 bp, Homo Sapiens
aaggagcgaggcctgggtggcgaattcggcacgaggctcatctgagcgtgggccccgcatgtgccgtttcatcagggaacgagaccgtgctgtcaacgactaccccagcctctactaccctgagatgtatatcctgaaaggcggctacaaggagttcttccctcagcacccgaacttctgtgaaccccaggactaccggcccatgaaccacgaggccttcaaggatgagctaaagaccttccgcctcaagactcgcagctgggctggggagcggagccggcgggagctctgtagccggctgcaggaccagtgaggggcctgcgccagtcctgctacctcccttgcctttcgaggcctgaagccagctgccctatgggcctgccgggctgagggcctgctggaggcctcaggtgctgtccatgggaaagatggtgtgggtgtcctgcctgtctgccccagcccagattcccctgtgtcatcccatcattttccatatcctggtgccccccacccctggaagagcccagtctgttgagttagttaagttgggttaataccagcttaaaggcagtattttgtgtcctccaggagcttcttgtttccttgttagggttaacccttcatcttcctgtgtcctgaaacgctcctttgtgtgtgtgtcagctgaggctgggggagagccgtggtccctgaggatgggtcagagctaaactccttcctggcctgagagtcagctctctgccctgtgtacttcccgggccagggctgcccctaatctctgtaggaaccgtggtatgtctgccatgttgcccctttctcttttcccctttcctgtcccaccatacgagcacctccagcctgaacagaagctcttactctttcctatttcagtgttacctgtgtgcttggtctgtttgactttacgcccatctcaggacacttccgtagactgtttaggttcccctgtcaaatatcagttacccactcggtcccagttttgttgccccagaaagggatgttattatccttgggggctcccagggcaagggttaaggcctgaatcatgagcctgctggaagcccagcccctactgctgtgaaccctggggcctgactgctcagaacttgctgctgtcttgttgcggatggatggaaggttggatggatgggtggatggccgtggatggccgtggatgcgcagtgccttgcatacccaaaccaggtgggagcgttttgttgagcatgacagcctgcagcaggaatatatgtgtgcctatttgtgtggacaaaaatatttacacttagggtttggagctattcaagaggaaatgtcacagaagcagctaaaccaaggactgagcaccctctggattctgaatctcaagatgggggcagggctgtgcttgaaggccctgctgagtcatctgttagggccttggttcaataaagcactgagcaagttgatacaaacaatcaaacagacgcgagatatagtcatatatccccgggagccaatcgtgcggagggaccccggagatatattccacgagctaagaatattacgatgcttcgggcaccatggttacccccttgccaggttatccatgaaactctgtcggggaagctactgacacgggccatgctacttgcccaaaaggtgtggccccggaatgtcgtgaagcgggggtcaaatt

SEQ ID NO: 72242 - DNA, 1146 bp, Homo Sapiens
  misc_feature (65)..(126): n is a, c, g, or t
  misc_feature (128)..(144): n is a, c, g, or t
cggtctaggagcgagcctgggtggcgattccggcacgagctgagcccggcgtccctcgccccccnnnnnnnnnnnnnnnnnnnnnnnnnnnnnnnnnnnnnnnnnnnnnnnnnnnnnnnnnnnnnntnnnnnnnnnnnnnnnnntcgcccgctgcctccctcggcccagccagctgtgccggcgtttgttggctgccctgcgcccggccctccagccagccttctgccggccccgccgcgatggaggtgccccagccggagcccgcgccaggctcggctctcagtccagcaggcgtgtgcggtggcgcccagcgtccgggccacctcccgggcctcctgctgggatctcatggcctcctggggtccccggtgcgggcggccgcttcctcgccggtcaccaccctcacccagaccatgcacgacctcgccgggctcggcagcgaaaccccaaagagtcaggtagggaccctgctcttccgcagccgcagccgcctgacgcacctatccctgtctcgacgggcatccgaatcctcccctgtcgtctgaatcctccgaatcttctgatgcaggtctctgcatggattcccccagccctatggacccccacatggcggagcagacgtttgaacaggccatccaggcagccagccggatcattcgaaacgagcagtttgccatcagacgcttccagtctatgccggtgaggctgctgggccacagccccgtgcttcggaacatcaccaactcccaggcgcccgacggccggaggaagagcgaggcgggcagtggagctgccagcagctctggggaagacaaggagaatgatggatttgtcttcaagatgccatggaagcccacacatcccagctccacccatgctctggcagagtgggccagccgcagggaagcctttgcccagagacccagctcggcccccgacctgatgtgtctcagtcctgaccggaagatggaagtggaggagctcagcccctggccctaggtcgcttctctctgacccctgcagagggggatactgaggaagatgatggatttgtggacatcctagagagtgacttaaaggatgatgatgcagttcccccaggcatggagagtctcattagtgccccaaggtcttgaccagtgggg

SEQ ID NO: 72243 - DNA, 779 bp, Homo Sapiens
aagccgattgggcgtcctcctgttgcgctgaatgcccattgagtccttgaacacagttgtctataccacaaagagtaatgtctggtcttttgaagtcctctttgggaagatagtgagccttgaaggtacaccctactgtggcatgacctgtgccgagctctatgaaaagctgccccagggctaccgcatggagcagcctcgaaactgtgacgatgaagtgtacgagctgatgcgtcagtgctggcgggaccgtccctatgagcgacccccctttgcccagattgcgctacagctaggccgcatgctggaagccaggaaggcctatgtgaacatgtcgctgtttgagaacttcacttacgcgggcattgatgccacagctgaggaggcctgagctgccatccagccagaacgtggctctgctggccggagcaaactctgctgtctaacctgtgaccagtctgacccttacagcctctgacttaagctgcctcaaggaatttttttaacttaagggagaaaaaaagggatctggggatggggtgggcttaggggaactgggttcccatgctttgtaggtgtctcatagctatcctgggcatccttctttctagttcagctgccccacaggtgtgtttcccatcccactgctcccccaacacaaacccccactccagctccttcgcttaagccagcactcacaccactaacatgccctgttcagctactcccactcccggcctgtcattcagaaaaaaataaatgttctaataagctccatt

SEQ ID NO: 72244 - DNA, 595 bp, Homo Sapiens
agtagagtcagggcactatgttgcccagggtggtcttgaactcctgggctcaagcaatcctcccacctcaatcctcccacctcaaagcaatcctcccgcctcccaaagtgttaggattacaggtgtgagccactgcgcccgaccaaggaggcagatttaagaaatggttaagaagtagaatcattaaactcacgtaccccctgatggccctgggggagtaggtggaaaagcatacaaattggacagcacactatctgaaaccacgtaagggcatgggtccttttttgacaaattattttgaatgaaaaaacttttgttgaaataatgtccagcaagcaaattgtagctctttacatctgttaacaagggtttgattacagacattcttcaattttttaacaaaggaatgtatattgtgaatcaaaggtggattgaagacagaaatgcaatccaatcattctgtgagcactttccaatcagacctccccttgttgaagatgaagcagtcgtcatttatggactattccgaatgactaagtatttacctcttgctcagatagcttccctagaaacactcctttggtgtgagaacttg

SEQ ID NO: 72245 - DNA, 690 bp, Homo Sapiens
cagtcgacggtaccggacatatgcccgggaattcggccattacggccgggggtgaccggggcctgaagccggaagctacctatctggtagggagctcccccagcaccgaagactgcgatgacttctgcactgacccaggggctggagcgaatcccagaccagctcggctacctggtactgagtgaaggtgcagtgctggcgtcatctggggacctggagaatgatgagcaggcagccagtgccatctctgagctggtcagcacagcctgcggtttccggctgcaccgcggcatgaatgtgcccttcaagcgcctgtctgtggtctttggagaacacacactgctggtgacggtgtcaggacagagggtgtttgtggtgaagaggcagaaccgaggtcgggagcccattgatgtctgagcctgccggagggcgagggtcggagaagcggattgggtcctgggcctctgtgatgaggcaggcacacctgtcggtcttggcttgctgctagaactagggccttctgctcgcccacctcccacccctacctggacgggcccaggcttggggactctgagctgtgttaaggagaacaagggcaaggagacctccctttgtgctccctcactccctaataaacatgagtctgatgttctccaaaaataaacatatagcaccttaaaaaatattact

SEQ ID NO: 72246 - DNA, 1310 bp, Homo Sapiens
  misc_feature (1121)..(1234): n is a, c, g, or t
attcccgggatcgatagtgaagctctggaaagctttcactgtagttcagcccacgttcagaatcacctacatggcctaccattactttcgaagcaagggctgggtgcccaaagtgggactcaagtacgggacagatttactgctatatcggaaaggccctccatgttaccatgcaagttattctgtcatagatcgagcctagttggatgaccatgtttgaaggctctctccgcaggcctctcagttggaagtccctggctgccttgagcagagtcttccgttaatgtctctaaggaacattatgctgtgctatttgattaaaccctctactatgactgacaaggaaatggagtcaccagaatgtatgaaaaggattaaagttcaggaggtgattctgagtgcgatgggtttcttcacgagagaggagtgaccaagacgatctttaacaattcaacctcaaatttctaatttcaccaacaactatttattgagggctaggtaaaaagttctttttgttgtaatcgtccattaattcataagttttaaagggcatggtgctcccagcaccagaaaactatcagtgtttttaaagataaattacacaagggaggagaaagatccctgtgctaggactgcagattctatacttgcgttggcctctaactctccaatccagagcctcctgcctctggcgtcagtcttttccctcatccactcactggggagattggactagaggagtcctgagaggacacttccaacaagagacatttattctctgattttacctgaaaatggtagtagtttacatttatacagtacagtttatgaagcactttcatacgcaggcatctcttgttacctacatctaagctgttcccgaaagagtgttacagaacacaacagtattgtacaatattcgataagcatatcttcactgcacttgttataaaaatgagtggtgaaataatgtttggagacataatgaaagcgattaacatttggcaaaatataataaagcctttttgtaattggtgagaaagtcatgaagacttaagttgcctcagggcatctggtggcaagaggagggagatgggtggctgggcatggtggcccatacnnnnnnnnnnnnnnnnnnnnnnnnnnnnnnnnnnnnnnnnnnnnnnnnnnnnnnnnnnnnnnnnnnnnnnnnnnnnnnnnnnnnnnnnnnnnnnnnnnnnnnnnnnnnnnnnnnattatccaagcattgtggcacatgcctgtaattccagctgctcaggagactgaggtaggaggatcgcttgagccca

SEQ ID NO: 72247 - DNA, 1142 bp, Homo Sapiens
caaaatgtgaactttaataacaggtcagagtgggggttccccaggaacgagaatgacggaactggtgctggaggcctcagggtgcccacttccctgctccaagttctggaggcgaggaggcaatggaccctgttgaggcagggcagtgcccagctccatgtaagtccatctgtctgggtccctgagacccaagatgcagaagtgtgtggagcagggggccgccctgcctgacccgggaggtcctgcagggaatgcggcccaggctggtcgggtgagcaggccaaaggctgtggggtcagatccggaagctttcctcccggccatcgatgtggcggagccgcaggtagacgtccgtgccaatgccctgcagggactgcagctgcagagacccaccgaggtactccgcgtaggcccgtgacgtgggcaacccgaagccaaagctgggggtgggcagggggacaggacaggaggcttcagaggcttgagtctcctggggtcccccacccctccatcctggcctggcagggtctcacccgtgcatgggtcctgactgggcgccactatgcatgtccagatggccaaagagggggctgatccgggggtcctgtgtgctggcctcagcagtagtgaagtggtagtccatgacccggtccagatctttgtgagcgattcctccaccacggtctgagatcctgatgatcagatcgacatcattgttggcgatggtgatgaccacatctgggacattgtagggagtgtctaggtgactctccattgtggctctcatggcattcttgagcagctccggcaggatgtagtccagtggcatagggatgaaggggaaccgggcagccacatggccattgatgcggacacggggcgcattgccatacttgtgctcacacaggcgtctggcaaagtccacccacttctcaataatcttctttggtgagagacgagtacagatgatgccgacaaagtcaggcttgtcctcatgcagcgccaggtgatgtgtggccaacatgcggattccaagcctcgaagtcagcgtcttgtccaagaagtagcggacgagcttttcatcctctatgtgcttccggctctcacgtaggccctctgccaagagggtcaccacatctttg

SEQ ID NO: 72248 - DNA, 1836 bp, Homo Sapiens
aaatatacggctaggtacgaggctgggtgttaatcggcacgagggggcgcctggcgagtggactgttcgagcccttccgctgggacccgggccctggctccggccccgcgatgggagctgctctccgcgggctgagcctgtcagcatcctcgacgcaccctggtccctgaagtcggagaagagcccctacccacccacacccccttgccccattttgggtcgcctgggtcctcagtcctagcggatcctcagtcctagcggccaccgggtctgaaaggagcaagacgatgatcctggcgtcggtgctgaggagcggtcccgggggcgggcttccgctccggcccctcctgggacccgcactcgcgctccgggcccgctcgacgtcggccaccgacacacaccacgtggagatggctcgggagcgctccaagaccgtcacctccttttacaaccagtcggccatcgacgcggcagcggagaagccctcagtccgcctaacgcccaccatgatgctctacgctggccgctctcaggacggcagccaccttctgaaaagtgctcggtacctgcagcaagaacttccagtgaggattgctcaccgcatcaagggcttccgctgccttcctttcatcattggctgcaaccccaccatactgcacgtgcatgagctatatatccgtgccttccagaagctgacagacttccctccgatcaaggaccaggcggacgaggcccagtactgccagctggtgcgacagctgctggatgaccacaaggatgtggtgaccctcttggcagagggcctacgtgagagccggaagcacatagaggatgaaaagctcgtccgctacttcttggacaagacgctgacttcgaggcttggaatccgcatgttggccacgcatcacctggcgctgcatgaggacaagcctgactttgtcggcatcatctgtactcgtctctcaccaaagaagattattgagaagtgggtggactttgccagacgcctgtgtgagcacaagtatggcaatgcgccccgtgtccgcatcaatggccatgtggctgcccggttccccttcatccctatgccactggactacatcctgccggagctgctcaagaatgccattgagagccacaatggagagtcacctagacactccctacaatgtcccagatgtggtcatcaccatcgccaacaatgatgtcgatctgatcatcaggatctcagaccgtggtggaggaatcgctcacaaagatctggaccgggtcatggactaccacttcactactgctgaggccagcacacaggacccccggatcagccccctctttggccatctggacatgcatagtggcgcccagtcaggacccatgcacggctttggcttcgggttgcccacgtcacgggcctacgcggagtacctcggtgggtctctgcagctgcagtccctgcagggcattggcacggacgtctacctgcggctccgccacatcgatggccgggaggaaagcttccggatctgaccccacagcctttggcctgctcacccgaccagcctgggccgcattccctgcaggacctcccgggtcaggcagggcggccccctgctccacacactgctgcatcttgggtctcagggacccagacagatggacttacatggagctgggcactgccctgcctcaacagggtccattgcctcctcgcctccagaacttggagcagggaagtgggcaccctgaggcctccagcaccagttccgtcattctcgttcctggggaacccccactctgacctgttattaaagttcacattttgaatgccaaaaaaaa

SEQ ID NO: 72249 - DNA, 1137 bp, Homo Sapiens
  misc_feature (43)..(81): n is a, c, g, or t
  misc_feature (85)..(119): n is a, c, g, or t
  misc_feature (1137)..(1137): n is a, c, g, or t
atagaattatcgactcactatagggcgctagcgtcgtcatagnnnnnnnnnnnnnnnnnnnnnnnnnnnnnnnnnnnnnnnccgnnnnnnnnnnnnnnnnnnnnnnnnnnnnnnnnnnncagtcgacggtaccggacatatgcccgggaattcggccattacggccggggggctaaaagtaagggtgtcgtgctgatggccctgtgcgcactgacccgcgctctgcgctctctgaacctggcgcccccgaccgtcgccgcccctgccccgagtctgttccccgccgcccagatgatgaacaatggcctcctccaacagccctctgccttgatgttgctcccctgccgcccagttcttacttctgtggcccttaatgccaactttgtgtcctggaagagtcgtaccaagtacaccattacaccagtgaagatgaggaagtctgggggccgagaccacacaggccgaatccgggtgcatggtattggcgggggccacaagcaacgttatcgaatgattgactttctgcgtttccggcctgaggagaccaagtcaggaccctttgaggagaaggttatccaagtccgctatgatccctgtaggtcagcagacatagctctggttgctgggggcagccggaaacgctggatcatcgccacagaaaacatgcaggctggagatacaatcttgaactctaaccacataggccgaatggcagttgctgctcgggaaggggatgcgcatcctcttggggctctgcctgtggggaccctcatcaacaacgtggaaagtgagccaggccggggtgcccaatatatccgagctgcagggacgtgtggtgtgctactgcggaaggtgaatggcacagccattatccagctgccctctaagaggcagatgcaggtgctggaaacgtgcgtagcaacagtaggccgagtatccaacgttgatcataacaaacgggtcattggcaaggcaggtcgcaaccgctggctgggcaagaggcctaacagtgggcggtggcaccgcaaggggggctgggctggccgaaagattcggccactaccccccatgaagagttacgtgaagctgccttctgcttctgcccaaagctgatatccctgtactctaataaaatgn

SEQ ID NO: 72250 - DNA, 436 bp, Homo Sapiens
gggagcaccgagcagcttggctaaaagtaagggtgtcgtgctgatggccctgtgcgcactgacccgcgctctgcgctctctgaacctggcgcccccgaccgtcgccgcccctgccccgagtctgttccccgccgcccagatgatgaacaatggcctcctccaacagccctctgccttgatgttgctcccctgccgcccagttcttacttctgtggcccttaatgccaactttgtgtcctggaagagtcgtaccaagtacaccattacaccagtgaagatgaggaagtctgggggccgagaccacacaggtgggaacaaggacagggggatttaagcagtcaaaaggaaaaacatgttaagaccctagacttgtatattgacacacttgtaccttgtaaggcagaggaatgtaattaaaaagcacttatttggcaaa

SEQ ID NO: 72251 - DNA, 736 bp, Homo Sapiens
  misc_feature (15)..(15): n is a, c, g, or t
  misc_feature (93)..(109): n is a, c, g, or t
tacattagtacttantagtcacatgttgtatatattaaatagcccagttttattcagacttgtaaatagaactatttcaatgtagttaatctnnnnnnnnnnnnnnnnnccccagtcacgatttgcatgttctctgtaagcttcatccatgctggttattgcactgaatgatatattattagggcatgttaacagtataccagtaacagcactttatctcatttatatgaacacctttgaggtgctacttaagtccaagctctgatgtattattcatttgtaaagataaggtacaggaatgaaccttggtttaaaggtatttttatatgaaaatggtgtgttattggaagatgttaaaatgctaatttgagagaagtaggagtgtatctgttttatatgttgggatgtgaaatttattttctaaaattgaggagaaggaagttatatatttgcagaatgttttaaagtgaattgttgtaatgaagttcctgtgaacatcattatggttttgtacaaataggaacctctgatgtcattcttcaacgtttgttcctgtgtgtacaattgtactttgtatgaacagctttatcatttttataggctttccatgagttttgctgtaactactatggcttatttattttctttaatatttgtgaaagtcttactcctttgttagttttgtttctgcacaactactgtacttttccatatggaataaagactattaatagaa

SEQ ID NO: 72252 - DNA, 1008 bp, Homo Sapiens
  misc_feature (53)..(53): n is a, c, g, or t
  misc_feature (129)..(655): n is a, c, g, or t
  misc_feature (686)..(694): n is a, c, g, or t
gccacaccagctgacgacgctacacgactggatctacaggtagttgagaagcncacctcccgaggagaagcgacagttccgtagcgcaggtcgaacagagacgcacgaggactccagggggaacgcgtnnnnnnnnnnnnnnnnnnnnnnnnnnnnnnnnnnnnnnnnnnnnnnnnnnnnnnnnnnnnnnnnnnnnnnnnnnnnnnnnnnnnnnnnnnnnnnnnnnnnnnnnnnnnnnnnnnnnnnnnnnnnnnnnnnnnnnnnnnnnnnnnnnnnnnnnnnnnnnnnnnnnnnnnnnnnnnnnnnnnnnnnnnnnnnnnnnnnnnnnnnnnnnnnnnnnnnnnnnnnnnnnnnnnnnnnnnnnnnnnnnnnnnnnnnnnnnnnnnnnnnnnnnnnnnnnnnnnnnnnnnnnnnnnnnnnnnnnnnnnnnnnnnnnnnnnnnnnnnnnnnnnnnnnnnnnnnnnnnnnnnnnnnnnnnnnnnnnnnnnnnnnnnnnnnnnnnnnnnnnnnnnnnnnnnnnnnnnnnnnnnnnnnnnnnnnnnnnnnnnnnnnnnnnnnnnnnnnnnnnnnnnnnnnnnnnnnnnnnnnnnnnnnnnnnnnnnnnnnnnnnnnnnnnnnnnnnnnnnnnnnnnnnnnnnnnnnnnnnnnnnnnnnnaagaattcggcacgaggcgcggctgtaggcnnnnnnnnnctaaaattgaggagaaggaagttatatatttgcagaatgttttaaagtgaattgttgtaatgaagttcctgtgaacatcattatggttttgtacaaataggaacctctgatgtcattcttcaacgtttgttcctgtgtgtacaattgtactttgtatgaacagctttatcatttttataggctttccatgagttttgctgtaactactatggcttatttattttctttaatatttgtgaaagtcttactcctttgttagttttgtttctgcacaactactgtacttttccatatggaataaagactattaatag

SEQ ID NO: 72253 - DNA, 1013 bp, Homo Sapiens
  misc_feature (137)..(137): n is a, c, g, or t
  misc_feature (150)..(252): n is a, c, g, or t
  misc_feature (256)..(659): n is a, c, g, or t
  misc_feature (702)..(719): n is a, c, g, or t
taccagcccgttgaggacgactacacgattggtactacaggtagttgagaagcccacctcccgaggagaaggcgacagttccgtagcgcaggtcgaacagagacgcacgaggacttccagggggaacgcttgtatcntttagtccttccnnnnnnnnnnnnnnnnnnnnnnnnnnnnnnnnnnnnnnnnnnnnnnnnnnnnnnnnnnnnnnnnnnnnnnnnnnnnnnnnnnnnnnnnnnnnnnnnnnnnnnncccnnnnnnnnnnnnnnnnnnnnnnnnnnnnnnnnnnnnnnnnnnnnnnnnnnnnnnnnnnnnnnnnnnnnnnnnnnnnnnnnnnnnnnnnnnnnnnnnnnnnnnnnnnnnnnnnnnnnnnnnnnnnnnnnnnnnnnnnnnnnnnnnnnnnnnnnnnnnnnnnnnnnnnnnnnnnnnnnnnnnnnnnnnnnnnnnnnnnnnnnnnnnnnnnnnnnnnnnnnnnnnnnnnnnnnnnnnnnnnnnnnnnnnnnnnnnnnnnnnnnnnnnnnnnnnnnnnnnnnnnnnnnnnnnnnnnnnnnnnnnnnnnnnnnnnnnnnnnnnnnnnnnnnnnnnnnnnnnnnnnnnnnnnnnnnnnnnnnnnnnnnnnnnnnnnnnnnnnnnnnnnnnnnnnnnnnnnnnnnnnnnnnaagaattcggcaagaggtgttggagcggccgcggctgtaggcnnnnnnnnnnnnnnnnnnaagacaactctgtttttctccctcctccctactagtggaaatttaccttgcaaaacaggactgtgcatggtgagagctgcttgcaatgtccacactcaggactctatggaaagagttcgcagctggtggtgaggctttgaggtggggctgcccttatttcactagctcctgaggggcagagctcactcagctttttaccaaatcaaaggaaggaagctttaggtccttcgaagttcagaaccagggtggtttgttttgcttccttttggaatggaataaaatgctcatttaatt

SEQ ID NO: 72254 - DNA, 676 bp, Homo Sapiens
acacttacatgtaaggacctgatacagagaaagagattaaggaagtaaatacgaatggtttagtagagataatgttcctgaaaccttagtgggaatttttttacttaaatggtgtgattgatacaatgagaggttacagggatctaaggaagtctaggcagtaatctgtcgaagctgctggagaggatgacgaaatggggcgaggaggcaagatgcgggggcctttccatggcaagaaaatactgaatgcactgccataatgtaaatatgagagttacacagacaaagcaaggcaaataccaaagagaatcaggaaagaatgccctgaagatctgcattaaaactgttctctgaaattaagctggtctggtgaggattcactgaaaatgagagtcaaccactaaggagatttgtatgaaaagaacccagcgaattagagaaaagatagatgctggcagctaagacaggagagggacatgtgagttgggccagggtacagaaaatgcagtgtggcaaagggcagagtgggaaaggtgggagggagctgccaggtctcaaccacctggggcagaccatgacaaagtaagagacacttatgaggtatttccagaaagcttcgtcagaataataattaaagaaaagggtatgtcactagggcaaaagtttaggaaagtag

SEQ ID NO: 72255 - DNA, 1862 bp, Homo Sapiens
  misc_feature (1796)..(1810): n is a, c, g, or t
ggaccggtccggaattcccgggatatcgtcgacccacgcgtccgccgcccgagtcatgttccgcgatcttctcaggctctcctagcagcatccatcgccgccaccctatcttcactggcttcattcaccttctccttctctcttcgttgctgagcgacaagcttcctagcgctatgactgtcgtctccgtcccgcagcgggagccgctcgtcctgggtggccgccttgcgccgcttggcttttcctcccgaggttactttggggccctcccgatggtgaccacggctccgcctcctttaccccggatcccggacccccgggcactgcccccgaccctcttcctccctcatttcctagggggagatggcccgtgtctgaccccccagcctcgcgctccagcagctctgcccaaccgcagcctcgccgtggcgggaggcactcctcgggcagcgccgaagaagcggcgaaagaagaaggtgcgggccagccccgcagggcagctgcccagccgcttccaccagtaccagcagcaccggccgagtctggagggcggccggagccccgcgaccggcccgagcggagcgcaggaggtcccgggcccggccgccgccttgggcccgagtcctgcagccgcagccggcacggagggagccagccccgaccttgccccgctgcggcccgcggctcccggccaaacccccctcaggaaagaggttttaaaatcaaagatgggaaaatcggagaaaattgcccttccccatggccagcttgttcatggtatacacttgtatgagcaaccaaagataaacagacagaaaagcaaatataacttgccactaaccaagatcacctctgcaaaaagaaatgaaaacaacttttggcaggattctgtttcatctgacagaattcagaagcaggaaaaaaagccttttaaaaataccgagaacattaaaaattcgcatttgaagaaatcagcatttctaactgaagtgagccaaaaggaaaattatgctggggcaaagtttagtgatccaccttctcctagtgttcttccaaagcctcctagtcactggatgggaagcactgttgaaaattccaaccaaaacagggagctgatggcagtacacttaaaaacgctcctcaaagttcaaacttagatttcagatttcagtatgtgtgtaaaacataatttttcccatatccctggactcttgagaaaattggtacagaaatggaaatttgccttgttgcaacatacaattgcaaaagatgagtttaaaaaattacatacaaacagcttgtattatattttatattttgtaaatactgtataccatgtattatgtgtatattgttcatacttgagaggtatattatagttttgttatgaaagtatgtattttgccctgcccacattgcaggtgttttgtatatatacaatggataaattttaagtgtgtgctaaggcacatggaagaccgattttatttgcacaaggtactgagatttttttcaagaaacagctgtcaaatctcaaggtgaagatctaaatgtgaacagtttactaatgcactactgaagtttaaatctgtggcacaatcaatgtaagcatggggtttgtttctctaaattgatttgtaatctgaaattactgaacaactcctattcccatttttgctaaactcaatttctggttttggtatatatccattccagcttaatgcctctaattttaatgccaacaaaattggttgtaatcaaattttaaaataataataatttggcccccccttttnnnnnnnnnnnnnnngggcggcgtacgcgtggtcgacgatatcccgggaattccggaccagtaccag

SEQ ID NO: 72256 - DNA, 780 bp, Homo Sapiens
gcggccgctgctcatcggcgtggtggccatcctggtgttcctgaccaagtgcctcaagcattactgctcaccactcagctaccgccaggaggcctactgggcgcagtaccgcgccaatgaggaccagctgttccagcgcacggccgaggtgcactctcgggtgctcgctgccaacaatgtgcgccgcttctttggctttgtggcgctcaacaaggatgatgaggaactgattgccaacttcccagtggaaggcacgcagccacggccacagtggaatgccatcaccggcgtctacttgtaccgtgagaaccagggcctcccactctacagccgcctgcacaagtgggcccagggtctggcaggcaacggcgcggcccctgacaacgtggagatggccctgctcccctcctaaggaggtgcttcccatgctctttgtaaatggcactacttggtcccaaactgaaccccactgcttgctcacatccatatcagaaggggatttttaaaaaactgttatcttcttggccaggggaaaggaccacaaggcaatctggggtgtggacagacccagtagacaatggaagccccagccagcagggccaggtgacagtgaagctcaccagtgggctcctttatggtactctatgcagttaacatgtatctagctgcatagggacacccagcgcagcagtgcaccactgggaagtggcctccagtgcagcctctggccttattttatatatttaaatttttgataaagtttttcttactaaaaggaaa

SEQ ID NO: 72257 - DNA, 1394 bp, Homo Sapiens
gggcaacgctgaggattcagactaaggagcctctccccacgctgcctctgggacgctcagctgatgtccggcaaggggagtttgttgttgccatgggaagtccctttgcactgcagaacacgatcacatccggcattgttagctctgctcagcgtccagccagagacctgggactcccccaaaccaatgtggaatacattcaaactgatgcagctattgattttggaaactctggaggtcccctggttaacctggatggggaggtgattggagtgaacaccatgaaggtcacagctggaatctcctttgccatcccttctgatcgtcttcgagagtttctgcatcgtggggaaaagaagaattcctcctccggaatcagtgggtcccagcggcgctacattggggtgatgatgctgaccctgagtcccagcatccttgctgaactacagcttcgagaaccaagctttcccgatgttcagcatggtgtactcatccataaagtcatcctgggctcccctgcacaccgggctggtctgcggcctggtgatgtgattttggccattggggagcagatggtacaaaatgctgaagatgtttatgaagctgttcgaacccaatcccagttggcagtgcagatccggcggggacgagaaacactgaccttatatgtgacccctgaggtcacagaatgaatagatcaccaagagtatgaggctcctgctctgatttcctccttgcctttctggctgaggttctgagggcaccgagacagagggttaaatgaaccagtgggggcaggtccctccaaccaccagcactgactcctgggctctgaagaatcacagaaacactttttatataaaataaaattatacctagcaacatattatagtaaaaaatgaggtgggagggctggatcttttcccccaccaaaaggctagaggtaaagctgtatccccctaaacttaggggagatactggagctgaccatcctgacctcctattaaagaaaatgagctgctgccatcttttgtgggcagttagtcaggtgctgctctttgtggtgtggtgggctctggtctgttctgctcggtgctgggcctgggagcaaagattcccatgcttggctacagatactgacagctggcctctgaaggagggtgaaaacttctgcttgacagttccacatccataatgcatggtctgatgagtgcggttgctgacatgggtttcttggtaagctcctgaggtaatggcagcctcagacccctgccattaggggccagtggtggtttgcagagggcagtggcacttaaataatctggttgctggtctggccagggtaacgttcaaacctcctgttggcctcttcactgaaaggatcaccaatgtgg

SEQ ID NO: 72258 - DNA, 1524 bp, Homo Sapiens
  misc_feature (1201)..(1201): n is a, c, g, or t
  misc_feature (1266)..(1266): n is a, c, g, or t
  misc_feature (1279)..(1279): n is a, c, g, or t
gctggaccggtccggattcccggcatcgaggaggcagccaaggcggagctgatggctgcgccgagggcggggcggggtgcaggctggagccttcgggcatggcgggctttggggggcattcgctgggggaggagaccccgtttgacccctgacctccgggccctgctgacgtcaggaacttctgacccccgggcccgagtgacttatgggacccccagtctctgggcccggttgtctgttggggtcactgaaccccgagcatgcctgacgtctgggaccccgggtccccgggcacaactgactgcggtgaccccagataccaggacccgggaggcctcagagaactctggaacccgttcgcgcgcgtggctggcggtggcgctgggcgctgggggggcagtgctgttgttgttgtggggcgggggtcggggtcctccggccgtcctcgccgccgtccctagcccgccgcccgcttctccccggagtcagtacaacttcatcgcagatgtggtggagaagacagcacctgccgtggtctatatcgagatcctggaccggcaccctttcttgggccgcgaggtccctatctcgaacggctcaggattcgtggtggctgccgatgggctcattgtcaccaacgcccatgtggtggctgatcggcgcagagtccgtgtgagactgctaagcggcgacacgtatgaggccgtggtcacagctgtggatcccgtggcagacatcgcaacgctgaggattcagactaaggagcctctccccacgctgcctctgggacgctcagctgatgtccggcaaggggagtttggtgttgccatgggaagtccctttgcactgcagaacacgatcacatccggcattgttagctctgctcagcgtccagccatgagacctgggaataccccaaaacaatgtggaatacattcaaactgatgcagctattgattttggaaactctggaggtcccctggttaacctggatggggaggtgattggagtgaacaccatgaaggtcacagctggaatctcctttgccatcccttctgatcgtcttcgagagtttctgcatcgtggggaaaagaagaattcctcctccggaatcagtgggtcccagcggcgctacatttggggtgatgatgctgaccctgagtcccagcatccttgctgaactacagcttcgagaaccagnctttcccgatgttcagcatggtgtactcatccataaagtcatcctgggctcccctgcacaccggngctggtctgcggncctgggtgatgtgatttttggccattgggggagcagatggtacaaaatgctggagatgttttatgaaggctgtttcgaccccattcccagttggggagtgcaaatccggccgggggaccgaaaaacactggacctatatgtggaccccctgaaggtcccgaaaggaatagatcccccagaagtatggagggtccctggtccgaatttcccccttggcctttttggggtttagggttctgaagggc

SEQ ID NO: 72259 - DNA, 673 bp, Homo Sapiens
  misc_feature (90)..(90): n is a, c, g, or t
  misc_feature (128)..(128): n is a, c, g, or t
ctgcgccgggcatgcgcggggcgctcggtccctcccggccggcgggaccctcagctcccgggcgccgcccaccagcccgacccggcggcntagaaatccccattttgctcccgcctcgccccggccgnccagcgcagggcccctcaggcccgcaatctccaggctcaaacggcgaacaggtccccgcatccgcctgcctttgcacttgggggtgggagagccaccttgtgacgccccttctgcctctcaccagcttccccctttctccccgttctgtacggttccccctggagccagaaggaagcccggtgccagccagccttcctgaaagaccaagcccgcgccatccggcttcctccagtggacgcctgcaggacccaggtgagacacggaaccggttggggacgcgagccagggatcctgaccggttgggggcggcgagcaagggatcctgacttgggggcgttgcctcccggaatccaagcggccttttgcccgggtctcccgagatgcatcgaaattgagctcgtccacacagccccctgactgcgtgatgcccttttctgacttaaaacattccttgtacctttatttacacgatccaagttgcagtgtgcctagattttcctccaaggacaaaaatgtgaataaagcaatattttagccaaaaaaa

SEQ ID NO: 72260 - DNA, 510 bp, Homo Sapiens
  misc_feature (493)..(493): n is a, c, g, or t
tctttaaggtgacaaaaagtgtgggaaagattccacacctccctccccacgcccgccaatggtcctttacctgtccatgtttcagattaaataattagctcaagagatttgcacagaaagcgaattagcccttttctagtcagactgttaagctctcaggcgggcaactcggaaccccgtttcctcaccgaaggctcaggaggccagcccagtgagggatggaggtggctttagagggcgacagttgtgcagcactcatgagcaacagtgcccaggacttttgaagtcacgaagggctcctgaaaccgacagctcaggtcccgcccctggggcgacaaaggagtcttgggggcgtgccgccggggtggaattgtggtagcagatttttgggggaggagggcgcaaagcagctagaaacgcacatcctcattctggaactatcccaaggcccccatgcttctcagcaggcctcgggctcagattgggcggttgngagccttccaccccacc

SEQ ID NO: 72261 - DNA, 2854 bp, Homo Sapiens
  misc_feature (257)..(257): n is a, c, g, or t
  misc_feature (1939)..(1950): n is a, c, g, or t
ccgattgcatcacaaccatcaaacactggatcaccatcatccgagctcgcttcgaggaggtcctgacatgggctaagcagcaccagcagcgtcttgaaacggccttgtcagaactggtggctaatgctgagctcctggaagaacttctggcatggatccagtgggctgagaccaccctcattcagcgggatcaggagccaatcccgcagaacattgaccgagttaaagcccttatcgctgagcatcagacatttatnggaggagatgactcgcaaacagcctgacgtggaccgggtcaccaagacatacaaaaggaaaaacatagagcctactcacgcgcctttcatagagaaatcccgcagcggaggcaggaaatccctaagtcagccaacccctcctcccatgccaatcctttcacagtctgaagcaaaaaacccacggatcaaccagctttctgcccgctggcagcaggtgtggctgttagcactggagcggcaaaggaaactgaatgatgcctgggatcggctggaggagttgaaagaatttgccaactttgactttgatgtctggaggaaaaagtatatgcgttggatgaatcacaaaaagtctcgagtgatggatttcttccggcgcattgataaggaccaggatgggaagataacacgtcaggagtttatcgatggcattttagcatccaagttccccaccaccaagttagagatgactgctgtggctgacattttcgaccgagatggggatggttacattgattattatgaatttgtggctgctcttcatcccaacaaggatgcgtatcgaccaacaaccgatgcagataaaatcgaagatgaggttacaagacaagtggctcagtgcaaatgtgcaaaaaggtttcaggtggagcagatcggagagaataaataccggttcttcctcggcaatcagtttggggattctcagcagttgcggctggtccgtattctgcgcaacaccgtgatggttcgcgttggtggaggatggatggccttggatgaatttttagtgaaaaatgatccctgccgagcacgaggtagaactaacattgaacttagagagaaattcatcctaccagagggagcatcccagggaatgacccccttccgctcacggggtcgaaggtccaaaccatcttcccgggcagcttcccctactcgttccagctccagtgctagtcagagtaaccacagctgtacatccatgccatcttctccagccaccccagccagtggaaccaaggttatcccatcatcaggtagcaagttgaaacgaccaacaccaacttttcattctagtcggacatcccttgctggtgataccagcaatagttcttccccggcctccacaggtgccaaaactaatcgggcagaccctaaaaagtctgccagtcgccctgggagtcgggctgggagtcgagccgggagtcgagccagcagccggcgaggaagtgacgcttctgactttgacctcttagagacgcagtctgcttgttccgacacttcagaaagcagcgctgcagggggccaaggcaactccaggagagggctaaacaaaccttccaaaatcccaaccatgtctaagaagaccaccactgcctcccccaggactccaggtcccaagcgataacactgtctaagcacccccaagccactatccactttgaatcctgctccatacattgggtgtatatttattctgaacgggagaagttatattgttaaaagtgtaaaagaataattgtgttatgaagctgccttatttttttactttatgtaagttactattttcatgtgaatatttatgtagataaaatttgcctcctggtaaccctgtaatggatggggcccagaaatgaaatatttgagaaaaacaagtgaaaaggtcaagatacaaatgtgtattnnnnnnnnnnnngcctattaatagggtttctgcgcggtgcagggttgtaaacctgctttatcttttaggattattcctaaatgcatcttctttataaacttgacttgctatctcagcaagataaattatattaaaaaaataagaatcctgcagtgtttaaggaactctttttttgtaaatcacggacacctcaattagcaagaactgaggggagggctttttccattgtttaatgttttgtgatttttagctaaagagagggaacctcatctaagtaacatttgcacatgatacagcaaaaggagttcattgcaatactgtctttggatattgtttcagtactgggtgtttaaaggacaaatagctgctagaattcaggggtaaatgtaagtgttcagaaaacgtcagaacatttggggttttaaactgatttgttgctccctatccagcctagacaccagtaactcttgtgttcaccaggacccagacccttggcaagggataggctcgttggtgacattgtgaatttcagatttgttttatccactttttttgctatttatttaaatggtcgatcaacttcccacaaactgaggaatgaattccacgagcctgttctgaaaatgtggacgtaagacaaacacgtgctcgtcctttaatggagttcaccagcacacttgttaaccagtcctgtttgctttcgtctttttttgtgcgtaataaagtcaactgaccaagtgaccatgaaaaggggctgtctggggctcctgttttttagctgctgttcttcagctccgaccatgttgctgtgtgattatctcaattggttttaattgaggcagaaactgaagctctaccaatgaactgtttagaaacaagacacacttttgtattaaaattgcttgcagtaacaaaa

SEQ ID NO: 72262 - DNA, 947 bp, Homo Sapiens
ctggtaccggtccggaattcccgggatatcgtcgacccacgcgtccgggatgggaagataacacgtcaggagtttatcgatggcattttagcatccaagttccccaccaccaagttagagatgactgctgtggctgacattttcgaccgagatggggatggttacattgattattatgaatttgtggcagctctgcatcccaacaaggatgcgtatcgaccaacaaccgatgcagataaaatcgaagatgaggttacaagacaagtggctcagtgcaaatgtgcaaaaaggtttcaggtggagcagatcggagagaataaataccggttaggggattctcagcagatgcggctggtccgtattctgcgcagcaccgtgatggttcgcgttggtggaggatggatggccttggatgaatttttagtgaaaaatgatccctgccgagcacgaggtagaactaacattgaacttagagagaaattcatcctaccagagggagcatcccagggaatgacccccttccgctcacggggtcgaaggtccaaaccatcttcccgggcagcttcccctactcgttcccagctccagtgctagtcagaataaccacagctgtacatccatgccatcttctccagccaccccagccagtggaaccaagacttcacttcagttctctcgctgttatgacaaaccctggttggtaaacagtaaagctggcaccccctatcagggacagccattctcctgacccccagctgcccacccccgaggttatcccatcatcagggagcaagttgaaaccaccaacaaccaacttttcattctaagtgggacctcccttgctgggggataccaagcaataggttctttcccccggccctccacaagggtgcccaaaaacctaattcggggccagaccccctaaaaaaagttctgcgccagatgcc

SEQ ID NO: 72263 - DNA, 1125 bp, Homo Sapiens
  misc_feature (19)..(19): n is a, c, g, or t
cacgatgcgagccaaaggnattcttggctccaagcctggtcctggctgttagtttggaactcatgcacccagatgctaactcgccctcagaatgcagaggggatgaaacactgaccggacaattcaatctgtatatgggagataaactggaggggaagacgaatggcaggagggtgaagaggaaactgaattactgtgcaaacacccggccactcaaatccgggtggttactgcagagtgaataacgataggtactatttcgtgtaaggcaaaagtcctttgaaagggctcctagagcgtcaaggcctccacctgatgaatgaatgagtcaggcagggcccaagctccacttcacggatgggaaaactgaggtacgaggcctcgctgaaaagatgcgaggcagagcggagaaccagaagcaccacttctctcaggctgatgctctaatctcggctccccccgcccctacaatggcgtagacggcctccgccgcccgactcacacacaccctcccccgggaacggcaagtctcctcgggttccaaggacagggtcaaaagacagggtcaaaagacaagaggcccgaggcgctcccgccgtgatttgcagccagataccgttgggagcgcagccagagagcgttgggagcgtgtgtacctccagcccaacatggcggcggcagcggccgcccccgaccccaagccctccctcagggcccgaggcttctcctcagggccttccggtgggcgggaagacagcgcaaccccgccaggcctttctcgtcgctgcgcctgctcgctgaaggagtcacctacccgacgagactaacggctgcggcgcggaagccccacagcccgccgagaaccaggaatacgagagccaggcggcgcggcggcgggacctgtactgagcaagaaagaagatttcaaagtaatttattgttatgagatccgtgcttttatcttgtctcagactcccaatgataggcacatactctcctctgtacatttaatgaaactactaaaatatttcgatttaaatcttccacctatttgttttctgtgtatcctacctgttcccgaccttgacattttcaaagaatacaggttacttattttgaaaaaaa

SEQ ID NO: 72264 - DNA, 901 bp, Homo Sapiens
cagtcgacggtaccggacatatgcccgggaattcggccattacggccggggggtgtcatggccggctcctaccctgaaggtgcacctgcaatcctcgccgataagaggcagcagttcggaagcctggttcctgagagatccggcgcgcgtcttccaccacaatgcctgggacaatgtggagtggtcggaagagcaagccgcgtgcgcgaagaagaaaagtccaggagaacagtatccagcgggtgtgccaggagaaacaagttgattatgagatcaatgcccacaaatactggaatgacttctacaaaatccacgaaacatgggttattcaaggatagacattggctttttaccgaattccctgagctggcacctagccaaaatcaaaatcatttgaaggattggttacttggagaacaagagtgaagtatgtgcaatgtagaaacaatgaggatggacctggtttaataatggaagaacagacaagtgttcttcgaagagccttgagcataaaaaacagaacactcctgtggaggagaatgtacctcagaaaaattagtgacctggaaacttcgtgccgatgagtatcctggatcctcagccactaccgaatactgcaggttggctgtggtgtgggaaacacagtcttgccaatttataccaaacggaacaaggacccagggactctagtaacatagcttgtgaatttcatacaccacaagctaatgacggtggtccagaacaaattcagcaactatgattcttcatcggatgatatagccctttggttcacaggacctgtgctgaatgaagacgaacgcgtaaacccagatgccaagggacaggcctgaaataatcatgctcaaattgggacttctcagacacatggcccagacaaaga

SEQ ID NO: 72265 - DNA, 1003 bp, Homo Sapiens
gctagtacgaggctggggtgtgtaatcggcacgagggagagatcggcgcgcgtttccaccacaatgcctggtaatcactctgccccttcgcccggcctgtcgctgaccctctgtcccgccgcctcggagcactccgaaaagcccctgaccgccggccaccgagtcaagctgccctacccgaggcactctccaaggggagagaaactcctaggccagcgactcaccctgcccgcagccaggacgtgaagcccctaagctgcccgtttgattttctcagggacaatgtggagtggtcggaagagcaagccgcggcggcggagagaaaagtccaggagaacagtatccagcgggtgtgccaggagaaacaagttgattatgagatcaatgcccacaaatactggaatgacttctacaaaatccacgaaaatgggtttttcaaggatagacattggctttttaccgaattccctgagctggcacctagccaaaatcaaaatcatttgaaggactggttcttggagaacaagagtgaagtacctgaatgtagaaacaatgaggatggacctggtttaataatggaagaacagcacaagtgttcttcgaagagccttgaacataaaacacagacacctcctgtggaggagaatgtaactcagaaaattagtgacctggaaattgtgctgatgagtttcctggatcctcagccacctaccgaatactggaggtcggctgtggtgtgggaaaccacagtctttccaacttttacaaacgaacaatgacccaggactcttgtttaatggtgtgatttccttccacaggtatagaactggtcagaccaattccgaatatgatcttctcgggggttgcctgtcacgaccggtgtgatgcacaagaagctccatgccaggcgcctgaattacccccaatgggcttcgcatggcccaagtgcccgctcccggcggcggctgacggggaggtctgaaatagcgttagccgtaaagcc

SEQ ID NO: 72266 - DNA, 1672 bp, Homo Sapiens
  misc_feature (1110)..(1118): n is a, c, g, or t
  misc_feature (1136)..(1185): n is a, c, g, or t
gggtccggtgtcatggccggctcctaccctgaaggtgcacctgcaatcctcgccgataagaggcagcagttcggaagccggttcctgagcgatccggcgcgcgtcttccaccacaatgcctgttgattatgagatcaatgcccacaaatactggaatgacttctacaaaatccacgaaaatgggtttttcaaggatagacattggctttttaccgaattccctgagctggcacctagccaaaatcaaaatcatttgaaggattggttcttggagaacaagagtgaagtatgtgaatgtagaaacaatgaggatggacctggtttaataatggaagaacagcacaagtgttcttcgaagagccttgaacataaaacacagacacctcctgtggaggagaatgtaactcagaaaattagtgacctggaaatttgtgctgatgagtttcctggatcctcagccacctaccgaatactggaggttggctgtggtgtgggaaacacagtctttccaattttacaaacgaacaatgacccaggactctttgtttattgctgtgatttttcttccacagctatagaactggtccagacaaattcagaatatgatccttctcggtgttttgcctttgttcacgacctgtgtgatgaagagaagagttacccagtgcccaagggcagtcttgatattatcattctcatatttgttctttcagcaattgttccagacaagatgcagaaggctatcaacaggctgagcaggcttctgaaacctggcgggatgatgcttctgcgagattacggccgctatgacatggctcagcttcggtttaaaaaaggtcagtgtctatctggaaatttctacgtgagaggtgatggaaccagagtttacttcttcacacaagaggaactggacacgcttttcaccactgctggactggaaaaagttcagaacctggtggatcgccgactgcaggtgaaccgaggaaagcaactgacaatgtaccgggtttggattcagtgcaaatactgcaagccccttctgtccagcaccagctgagaggcacctgctgccaacacgatgcaagcccattgtgtttccgggcttttttnnnnnnnnntttgtagcaccgggcatnnnnnnnnnnnnnnnnnnnnnnnnnnnnnnnnnnnnnnnnnnnnnnnnnncattgagcccaggagtccagcctgggcaaaatagcgagagaccctgaatctgaaagtaatgataaaataaaaagaatataaatgaggtctcgttgatgctggacaattcaagaattcagacttgaaccttaaacctaggaaaagttactttgtatcaggattctaacaattatgcttcatatttgtgaagtcctttaaaacataattttctcaagttctttctttgagacctcaatctgtcttagcattttgtaactaataactgaaattttattcaaaggaattgtaaaccttaaaccaccaatttatttccatgtgaaaaagtgttatatatgacaagtgttttttgattgtaattgcgttaaatcttttgagagtgtaaatgccgggctaggcaattgcagttaatacatacaggggttagtgaagggcttattaagttgtaggggaagcaagctgggaagaatcagatcagatattttcctga

SEQ ID NO: 72267 - DNA, 991 bp, Homo Sapiens
  misc_feature (81)..(143): n is a, c, g, or t
  misc_feature (148)..(148): n is a, c, g, or t
  misc_feature (216)..(216): n is a, c, g, or t
  misc_feature (250)..(250): n is a, c, g, or t
  misc_feature (284)..(284): n is a, c, g, or t
gcacgcaataatgtgagttgctcactcataggcaccccagctttacacttatgctcccgctcgtatgtgttggaatttgannnnnnnnnnnnnnnnnnnnnnnnnnnnnnnnnnnnnnnnnnnnnnnnnnnnnnnnnnnnnnnttggnccctcgagccaaagggcaggcttgttgaaaggacccagaggggcccagctgacctgtctcactgctcntggcagcccagccccatcgcaggtggcccctgcntggggttattcggaacggttcagccagggcctcncaggaagagtgctgtggagccacggtgactgtcctggacagcaaggagcatgctaccccagtgagcacttctttttgagggacttgatggggaggtggggtaggcagaagggacgtggcagaagcgggaagactttggtcaccatggctctgcaggccttctgcaaatcagtgctggcctgggctggaaacagctctgtgtgtgaaggtgaggactcttggaagcaggccatcctggccagacaccctagcaggaaggggctcacctgtcacccttaggcagcctgagggctggtggggacttttgagtcttgaggggatagcggaaaaagctgagctcataggtgcccagccagcctcccagctaaaggtgctcagagccccactgccccctctctctgtgcaggtggccagtgcccctccctgctctgggagcattgctagccttctaccccatccctggatccacaggggctatcgaggagacccagtgagaatgtagcattttgttcatccccagggtagctgccctggggtctgggcactctgcctctgggagagaggaagaagaaaggggccccattttttaaaaatctgtacagagcctttggctttatgtgtttatgttcttcacatgcatatgtgtgtatgtgtgtatatctttccccccatcaattggtacaatttttaataaaatcatttaagagc

SEQ ID NO: 72268 - DNA, 1437 bp, Homo Sapiens
gaatatgaacagtgggttcaaaaaagcaggctggtacggtcggaatcccgggatatcgtcgacccacgcgtcgggcgtaggttggctctttagggcttcaccccgaagctccaccttcgctcccgtctttctggaaacaccgctttgatctcggcggtgcgggacaggtacctcccggctgctgcgggtgccctggatccagtcggctgcaccaggcgagcgagacccttccctggtggaggctcagagttccggcagggtgcatccggcctgtgtgtggcgcgaggcagggaagccggtacccgggtcctggccccagcgctgacgttttctctcccctttcttctctcttcgcggttgcggcgtcgcagacgctagtgtgagcccccatggcagatacgaccccgaacggcccccaaggggcgggcgctgtgcaattcatgatgaccaataaactggacacggcaatgtggctttctcgcttgttcacagtttactgctctgctctgtttgttctgcctcttcttgggttgcatgaagcagcaagcttttaccaacgtgctttgctggcaaatgctcttaccagtgctctgaggctgcatcaaagattaccacacttccagttaagcagagcattcctggcccaggctttgttagaggacagctgccactacctgttgtattcactcatctttgtaaattcctatccagttacaatgagtatcttcccagtcttgttattctctttgcttcatgctgccacatatacgaaaaaggtccttgacgcaaggggctcaaatagtttacctctgctgagatctgtcttggacaaattaagtgctaatcaacaaaatattctgaaattcattgcttgcaatgaaatattcctgatgcctgcgacagtttttatgctttttagtggtcaaggaagtttgctccaaccttttatatactatagatttcttacccttcgatattcgtctcgaagaaacccatattgtcggaccttatttaatgaactgaggattgttgttgaacacataataatgaaacctgcttgcccactgtttgtgagaagactttgtctccagagcattgcctttataagcagattggcaccaacagttccatagtttaacatctagttaagctacaaatatagtataagcattattagcagctggtacttctgctaggggttgtaaattccaggtgttacactgacctcaatccaatttacataatttacataaatgcatctcggtggaaaaataatcattttcttggcatgttaaatcaagcttaaaaagttttgagaaaattttactgcgctgtgttgctaatggttaaagaagtctgtatctagtgataaatataccagtttttttaaaaagatgctgttgtgcctatatcatgaagtacattaatttctcatgt

SEQ ID NO: 72269 - DNA, 664 bp, Homo Sapiens
cactcaacaatccttactattatctcaagaatgaagcactgaaaagcgaagaaggctgcattccgaatatcgccccagacatctgcatagcatacaaactgcacctagagtgtagcaggctcatcaacctcgtggactggtcagaggcttttgcaacagttgtgacagctgctgaaaaaatggatgcaaattctgcaacctcagaagaaatgaatgaaattatccatgctcggtttattagagctgtttctgaactagaacttttaggatttataaaacctaccaaacagaagactgaccatgtggcaagactaacatggggaggctgctagaaagcaaataagcaaagccagaactatcacatttagcttaagagaaaaaggtgaccagtcatatttacatatattagaggagcctgttttgttgagaagataaatgtgtaacccccattgatgtttaaccagaaaagtacattgctaaccccaaacaggcatgtatcaaaacacctgtggagtactttagactccaacaaataataatgtaactaaaactgctcacacattttactgtactttccaaagtcattactaaattgtgagtaaatcattcttgaacttagagtatgtaaatgtaataaattccgttatccaggagtataaaaaaa

SEQ ID NO: 72270 - DNA, 594 bp, Homo Sapiens
agacagagcagcacctgaacaacctgatggcccagctggaccccctttttgagcggtgaggagagcaatgattctgtgaatttttggggaatttgtggcaggagcgaggaatggggacataggttgcgagccactgagtggacatttcttcagtgtgactactctggctggagcccagcaggagcttctgaacatgaagctatggaccatccacgagctgctgcaagatagcaagccggacaaggatatggaggcttcagaaccaggtgaaggctcgggaggcgagtctgctggaggtggagacaaagtctctgaaactggaacattcctgatctctccccacacagaggccagcagacctcttcctgaggacttctgtttaaaggaggacgaggaggaggttggtgacagtcaggcctgggaggagcccacaaactggagcacagagacatggaacctagctacttcctgggaggtggggcggggactacggagaaggtgcagccaggctgtggcaaagggccccagtcacagccttggctgggaaggagggacgacagctgaaggtcgactaaaacaaagtctgttttaatg

SEQ ID NO: 72271 - DNA, 893 bp, Homo Sapiens
  misc_feature (13)..(13): n is a, c, g, or t
  misc_feature (832)..(848): n is a, c, g, or t
cggttctccacgnaggaggcaagcaagcagcagccactgcagtcagagcaacagctggcccagttgacacaacagctggcccagacagagcagcacctgaacaacctgatggcccagctggaccccctttttgagcgtgtgactactctggctggagcccagcaggagcttctgaacatgaagctatggaccatccacgagctgctgcaagatagcaagccggacaaggatatggaggcttcagaaccaggtgaaggctcgggaggcgagtctgctggaggtggagacaaagtctctgaaactggaacattcctgatctctccccacacagaggccagcagacctcttcctgaggacttctgtttaaaggaggacgaggaggaggttggtgacagtcaggcctgggaggagcccacaaactggagcacagagacatggaacctagctacttcctgggaggtggggcggggactacggagaaggtgcagccaggctgtggcaaagggccccagtcacagccttggctgggaaggagggacgacagctgaaggtcgactaaaacaaagtctgttttcatgatggagtgctcctgtgtgttttttcgatcctagttggttgtacacacccatactaggtgcctaaggacaactgggccttcttgaagagctgtccttattaggacaaaaagaggctgccttccagtgtgacagcagagaagatagagggagctccagctcttttcctcgtattcctgaggccaccagcatgcccgcgttcagggcccaaaaatcccttttctcatagcaaaactgagacagaagggtctttcccnnnnnnnnnnnnnnnnnctttactcaaatccagtggaaaaataaatgatagaaactatacac

SEQ ID NO: 72272 - DNA, 1100 bp, Homo Sapiens
  misc_feature (19)..(19): n is a, c, g, or t
  misc_feature (159)..(159): n is a, c, g, or t
  misc_feature (856)..(895): n is a, c, g, or t
ggtctaagagcgagcctgngtggcgaattttccacgaggatgccggaccgcttcggctccgcccgcccgatccctccacccgtgggccggcaatggcgggcgcagtttcgctcttgggtgtggtggggctgctgcttgtgtctgcgctgtccggggtcnctaggagaccgcgccaatcccgacctccgggcacacccagggaacgcagcccaccccggctctggagccacggaaccccggcggcgaccaccgctcaaggatcaacgcgagcggacccgggccgggtcgctgcctctgggggcgctgtacaccgcggccgtcgcggcttttgtgctgtacaagtgtttgcaggggaaagatgaaactgcggttctccacgaggaggcaagcaagcagcagccactgcagtcagagcaacagctggcccagttgacacaacagctggcccagacagagcagcacctgaacaacctgatggcccagctggaccccctttttgagcgtgtgactactctggctggagcccagcaggagcttctgaacatgaagctatggaccatccacgagctgctgcaagatagcaagccggacaaggatatggaggcttcagaaccagaggccagcagacctcttcctgaggacttctgtttaaaggaggacgaggaggagattggtgacagtcaggcctgggaggagcccacaaactggagcacagagacatggaacctagctacttcctgggaggtggggcggggactacggagaaggtgcagccaggctgtggcaaagggccccagtcacagccttggctgggaaggagggacgacagctgaaggtcgactaaaacaaagtctgnnnnnnnnnnnnnnnnnnnnnnnnnnnnnnnnnnnnnnnnagtctccggcaggacagggacccagagaacacttcacagacccaaacagcaggagcccacacggagccgcaaagcgcccacacatgccacacaggacaacagccacccgccacaggaaaacccgggacacaaaccatccgacggagaacacaacaccacacaaacaagccccggagccacaaccaacatcttgaacaacactgag

SEQ ID NO: 72273 - DNA, 671 bp, Homo Sapiens
caaacaccccttcatcatccatcttaatttgcataaggacatatctactttaatgtactaccacagtttacagttaatgtgggaaagaccagcttcagttcctcttcagctaggattgccctaacttttaactttcacagtttcctgattcatatttgcccaggctctgatgccttgaattggttttggctctcttttttggttctgtttttgttgttaaacatcataatgcagtctctcattaatttttaccatcatttaccctgataatctgcctcttctccatttctccttcccttactacctttctttgaattactgtaactgattggtcccaccaaaattttaaagtacatgaagtatcttcattggttcatcctcttgccccctccagatgtcaaaaaactttatcctgccccctagctgaccacccaggttcctttatttcagtggcccatgtgagtctaccttcccctaaggagtgccctaatccagccctttttttgtttcttatgacccatatctttaggctcttcccatttctaggtgggagataggtaagtttcaaatctatgccagtcttatgaatattacattagggtaatgtgctataatgaagaaataaaaaatacagtgcttaaaagaaaataaaattctatttctgtctaaaa

SEQ ID NO: 72274 - DNA, 506 bp, Homo Sapiens
gcaaggccctggaggagccagccaatgatatcaaggaggatgccattgctccccggaccctgccctggcccaagagctcagacactcctgacccttagtactctgcccccacctctctttactgtgggaaaaccatctcagtaagacctaagtgtccaggagacagaaggagaagaggaagtggatctggaattgggaggagcctccacccacccctgactcctccttatgaagccagctgctgaaattagctactcaccaagagtgaggggcagagacttccagtcactgagtctcccaggcccccttgatctgtaccccacccctatctaacaccacccttggctcccactccagctccctgtattgatataacctgtcaggctggcttggttaggttttactggggcagaggatagggaatctcttattaaaactaacatgaaatatgtgttgttttcatttgcaaatttaaataaagatacataatgtttgtatgagataag

SEQ ID NO: 72275 - DNA, 1593 bp, Homo Sapiens
ctgcacttgcccgccaaccggttgcaggcggtggagggaggggaagtggtgcttccagcgtggtacaccttgcacggggaggtgtcttcatcccagccatgggaggtgccctttgtgatgtggttcttcaaacagaaagaaaaggaggatcaggtgttgtcctacatcaatggggtcacaacaagcaaacctggagtatccttggtctactccatgccctcccggaacctgtccctgcggctggagggtctccaggagaaagactctggcccctacagctgctccgtgaatgtgcaagacaaacaaggcaaatctaggggccacagcatcaaaaccttagaactcaatgtactggttcctccagctcctccatcctgccgtctccagggtgtgccccatgtgggggcaaacgtgaccctgagctgccagtctccaaggagtaagcccgctgtccaataccagtgggatcggcagcttccatccttccagactttctttgcaccagcattagatgtcatccgtgggtctttaagcctcaccaacctttcgtcttccatggctggagtctatgtctgcaaggcccacaatgaggtgggcactgcccaatgtaatgtgacgctggaagtgaacacagggcctggagctgcagtggttgctggagctgttgtgggtaccctggttggactggggttgctggctgggctggtcctcttgtaccaccgccggggcaaggccctggaggagccagccaatgatatcaaggaggatgccattgctccccggaccctgccctggcccaagagctcagacacaatctccaagaatgggaccctttcctctgtcacctccgcacgagccctccggccaccccatggccctcccaggcctggtgcattgacccccacgcccagtctctccagccaggccctgccctcaccaagactgcccacgacagatggggcccaccctcaaccaatatcccccatccctggtggggtttcttcctctggcttgagccgcatgggtgctgtgcctgtgatggtgcctgcccagagtcaagctggctctctggtatgatgaccccaccactcattggctaaaggatttggggtctctccttcctataagggtcacctctagcacagaggcctgagtcatgggaaagagtcacactcctgacccttagtactctgcccccacctctctttactgtgggaaaaccatctcagtaagacctaagtgtccaggagacagaaggagaagaggaagtggatctggaattgggaggagcctccacccacccctgactcctccttatgaagccagctgctgaaattagctactcaccaagagtgaggggcagagacttccagtcactgagtctcccaggcccccttgatctgtaccccacccctatctaacaccacccttggctcccactccagctccctgtattgatataacctgtcaggctggcttggttaggttttactggggcagaggatagggaatctcttattaaaactaacatgaaatatgtgttgttttcatttgcaaatttaaataaagatacataatgtttgtatgagaaaa

SEQ ID NO: 72276 - DNA, 1026 bp, Homo Sapiens
ggctggaccggtccggaattcccgggatgagccgccctgggtgtcagcggctcggctcccgcgcacgctccggccgtcgcgcagcctcggcacctgcaggtccgtgcgtcccgcggctggcgcccctgactccgtcccggccaggagggccatgatttccctcccggggcccctggtgaccaacttgctgcggtttttgttcctggggctgagtgccctcgcgcccccctcgcgggcccagctgcaactgcacttgcccgccaaccggttgcaggcggtggagggaggggaagtggtgcttccagcgtggtacaccttgcacggggaggtgtcttcatcccagccatgggaggtgccctttgtgatgtggttcttcaaacagaaagaaaaggaggatcaggtgttgtcctacatcaatggggtcacaacaagcaaacctggagtatccttggtctactccatgccctcccggaacctgtccctgcggctggagggtctccaggagaaagactctggcccctacagctgctccgtgaatgtgcaagacaaacaaggcaaatctaggggccacagcatcaaaaccttagaactcaatgtactggttcctccagctcctccatcctgccgtctccagggtgtgccccatgtgggggcaaacgtgaccctgagctgccagtctccaaggagtaagcccgctgtccaataccagtgggatcggcagcttccatccttccagactttctttgcaccagcattagatgtcatccgtgggtctttaagcctcaccaacctttcgtcttccatggctggagtctatgtctgcaaggcccacaatgaggtgggcactgcccaatgtaatgtgacgcttggaagtgagcacaaggcctaggaaactgccagtggtttgctggaacctgtttgtggctacccctgagtttgggactcggggttggctggcgttggggcatgtttcctcaatggaaccccccgccccagtggccaaaaggtccccgggaagaaacttcc

SEQ ID NO: 72277 - DNA, 308 bp, Homo Sapiens
gcaggcagactgtagatagagcaccccccaccgactgatgcgcttggcgggccgccaggagaaagactcaggcccctacagctgctacgcgaaggtgcaagacaaacaaggcaaatctaggggccacagcatcaaaaccttagaactcaatgtactgggtcctccagctcctccatcctgccgactccagggtgtgccccatgtggcggcaaacgtgaccctgagctgacagtctccaaggagtaagcccgctggccaacaccagtgggatcggcagctgccatccttccagactttctttgcaccag

SEQ ID NO: 72278 - DNA, 767 bp, Homo Sapiens
gggttcaagatcttttattttcagagcttccaacagttggttagtaatgctagctaagctggtataatctgaaggccatcccacctttctctttaggcagtcaaccaacagaatctctttcttacaaacaatatcattaaccagttggaatctgtctcaatgcgcgtgtaggaagaagtcctctcccccacatttttcccaacaagattgttttatagccaaatgtaactcaaacccgtaacacagcaactagccatctccagtatcactgattcccaccccaagaagttgaggtaagaggggagagactgtctcctgtttaagaaaaacccacctacacctcagtgaagccgtgatggtaaggaggctggcaccagagggcagggatgagtaggcactgaaacaggtctctctagaatcaatgaagtctgccccagctccttggatgaggtgttcttttgaaattcccacttttatggagttagataaggggacaaccggtgatgattcatcactccctgtctctaaaattaaaacatgataaacccagaaagttttaccttcaaaatccaccaagctccctcctgagaaaattctatccagtcatgtccatgccagcacccactcccttctcctaatgcccatgttccagcccctctcctcacccttgggtggtccatccaacactgatttgatactctttgactcataatatgaccattttttaaaaattagaaaataaaagctatcaatatcacagcaacaaa

SEQ ID NO: 72279 - DNA, 1760 bp, Homo Sapiens
ctcaagtatcaattcatcctccatacatttgaattcaagttgttttttgtcaaatttacagttgtcaattgatcttcaagctgcagggtgcctagaaatgggccgttgtctgtagccctggcatgtgcacacggacatttgccaccactgcaagcaaaagtctggagaagttcaccaacgacaagaacgattagggaaaatatgctgctgtgggttaacaactcagaaagtccctgatccacatttggctgtttactaaagcttgtgattaactttttggcagtgtgtactatgctctattgctatatatgctatctataaatgtagatgttaaggataagtaattctaaatttattattctatagttttgaagtttggttaagtttcctttcactcaattgatttattttgttgttaatcaaatttatgttaattggatcctttaaattttttttggcattttccaacaaaaatggctttattcataagaaaggaaaaaaatcaatggaatttgatatctaaagaagttagaaagggagcaaaataaaaaacataaaggagatagatgaattagtaagcaaatcagtagtcgagtttttcaaactggcaaaattaattaattgacttttagcccaaatttacattgttaattaaatcaagaaggaagaagatctaagagctcccattgataggcaagcctagagagaactagctaaatttatcatgctaggatattgaaacacagaaagtttacatacatttatgaagggtcaatttagtttggacagtgaggtatttgtcttagtggaaaaaaggagaattagtctgatcaaatcgtgaagtaatacagtgaacttgcaggtgcacaaaataagagggccacatctatatggtgcagtctggaattctgtgtaagtttgtaggtacctcttggacttctgaattgatccagttgtcatccaccacagacatctcacatcagatacagacagttccaagattgacaacagagaacaacctgctggaaagacctgggcagaaatggagagccctgcgggaaccatgctacattttcatctaaagagagaatgcacatctgatgagactgaaagttctttgttgttttagattgtagaatggtattgaattggtctgtggaaaattgcattgcttttatttctttgtgtaatcaagtttaagtaataggggatatataatcataagcattttagggtgggagggactattaagtaattttaagtgggtggggttatttagaatgttagaataatattatgtattagatatcgctataagtggacatgcgtacttacttgtaaccctttaccctataattgctatccttaaagatttcaaataaactcggagggaactgcagggagaccaacttatttagagcgaattggacatggataaaaaccccagtgggagaaagttcaaaggtgattagattaataatttaatagaggatgagtgacctctgataaattactgctagaatgaacttgtcaatgatggatggtaaattttcatggaagttataaaagtgataaataaaaacccttgcttttacccctgtcagtagccctcctcctaccactgaaccccattgcccctacccctccttctaactttattgctgtattctcttcactctatatttctctctatttgctaatattgcattgctgttacaataaaaattcaataaagatttagtggttaagtgcaaaaaaaa

SEQ ID NO: 72280 - DNA, 1509 bp, Homo Sapiens
cagctgtcgccgcgcaggcccggactcggacgcgtggtagcctagagtcctggggagcttctgtccacctgtcctgcagaggagtcgtttccagcccggctgccccaggatgggtgagttcaacgagaagaagacaacatgtggcaccgtttgcctcaagtacctgctgtttacctacaattgctgcttctggctggctggcctggctgtcatggcagtgggcatctggacgctggccctcaagagtgactacatcagcctgctggcctcaggcacctacctggccacagcctacatcctggtggtggcgggcactgtcgtcatggtgactggggtcttgggctgctgcgccaccttcaaggagcgtcggaacctgctgcgcctgtacttcatcctgctcctcatcatctttctgctggagatcatcgctggtatcctcgcctacgcctactaccagcagctgaacacggagctcaaggagaacctgaaggacaccatgaccaagcgctaccaccagccgggccatgaggctgtgaccagcgctgtggaccagctgcagcaggagttccactgctgtggcagcaacaactcacaggactggcgagacagtgagtggatccgctcacaggaggccggtggccgtgtggtcccagacagctgctgcaagacggtggtggctctttgtggacagcgagaccatgcctccaacatctacaaggtggagggcggctgcatcaccaagttggagaccttcatccaggagcacctgagggtcattggggctgtggggatcggcattgcctgtgtgcaggtctttggcatgatcttcacgtgctgcctgtacaggagtctcaagctggagcactactgaccctgccttgggccttgctgctgctgcacccaactactgagctgagaccactgagtaccaggggctgggctccctgatgacacccaccctgtgccatcaccataacctctggggaccccaacctcagaggcagcttcaagtgccttttgctgcgcaccaatgcccagcaggggaggtgaggggggctggcggggcgaagtttggggggtgttttgtggggctccccggacatactctctgcctggtggtcagatgcaggttggaaggggccttgctgagtggcgcaaggccgagcgttcccagcagggggagaaacccttcacaccccaggcccttcaggaactggggctttgccttgcagccacatggccccatcccagttggggaagccaggtgagctctgacccttgggcctgggcctttgcccctcccaacccagccgtcgtttccctcgacagcgcccctgctgttttccccaccgcagtcaccaccacccgaaatgccacgtggtcactgtgcactgccctgttcatgtgcctctgcggggcagggccttcctggttttgtacactgctgtacccagatgcctacaaccatccctgccacatacaggtgctcaataaacacttgtggggcag

SEQ ID NO: 72281 - DNA, 1539 bp, Homo Sapiens
cagtcgacggtaccggacatatgcccgggaattcggccattacggccgggggagccgccgcccccgcagctgccgccgccgccagggcccggactcggacgcgtggtagccccaggatgggtgagttcaacgagaagaagacaacatgtggcaccgtttgcctcaagtacctgctgtttacctacaattgctgcttctggctggctggcctggctgtcatggcagtgggcatctggacgctggccctcaagagtgactacatcagcctgctggcctcaggcacctacctggccacagcctacatcctggtggtggcgggcactgtcgtcatggtgactggggtcttgggctgctgcgccaccttcaaggagcgtcggaacctgctgcgcctgtacttcatcctgctcctcatcatctttctgctggagatcatcgctggtatcctcgcctacgcctactaccagcagctgaacacggagctcaaggagaacctgaaggacaccatgaccaagcgctaccaccagccgggccatgaggctgtgaccagcgctgtggaccagctgcagcaggagttccactgctgtggcagcaacaactcacaggactggcgagacagtgagtggatccgctcacaggaggccggtggccgtgtggtcccagacagctgctgcaagacggtggtggctctttgtggacagcgagaccatgcctccaacatctacaaggtggagggcggctgcatcaccaagttggagaccttcatccaggagcacctgagggtcattggggctgtggggatcggcattgcctgtgtgcaggtctttggcatgatcttcacgtgctgcctgtacaggagtctcaagctggagcactactgaccctgccttgggccttgctgctgctgcacccaactactgagctgagaccactgagtaccaggggctgggctccctgatgacacccaccctgtgccatcaccataacctctggggaccccaacctcagaggcagcttcaagtgccttttgctgcgcaccaatgcccagcaggggaggtgaggggggctggcggggcgaagtttggggggtgttttgtggggctccccggacatactctctgcctggtggtcagatgcaggttggaaggggccttgctgagtggcgcaaggccgagcgttcccagcagggggagaaacccttcacaccccaggcccttcaggaactggggctttgccttgcagccacatggccccatcccagttggggaagccaggtgagctctgacccttgggcctgggcctctgcccctcccaacccagccgtcgtctccctcgacagcgcccctgctgtcttccccaccgcagtcaccaccacccgaaatgccacgtggtcactgtgcactgccctgttcatgtgcctctgcggggcagggccttcctggttttgtacactgctgtacccagatgcctacaaccatccctgccacatacaggtgctcaataaacacttgtagagcagatggacgagctcgctgtgctggt

SEQ ID NO: 72282 - DNA, 487 bp, Homo Sapiens
cccaccctgtgccatcaccataacctctggggaccccaacctcagaggcagcttcaagtgccttttgctgcgcaccaatgcccagcaggggagatgcaggttggaaggggccttgctgagtggcgcaaggccgagcgttcccagcagggggagaaacccttcacaccccaggcccttcaggaactggggccttgccttgcagccacatggccccatcccagttggggaagccaggtgagctctgacccttgggcctgggcctctgcccctcccaacccagccctcgtctccctcgacagcgcccctgctgtcttccccaccgcagtcaccaccacccgaaatgccacgtggtcactgtgcactgccctgtccatgtgcctctgcggggcagggccttcctggttttgttcactgctgtacccagatgcctacaaccatccctgccacatacaggtgctcaataaacacttgtagagcagatggacga

SEQ ID NO: 72283 - DNA, 895 bp, Homo Sapiens
tggaactcctgcttgcagctggtccacagcgctggtcacaggcctcatggcccggctggtggtagcgcttggtcataggtgtccttcaggttctccttgagctccgtgttcaactgctggtagtaggcgtaggcgaggataccagcgatgatctccagcagataagatgatgaggagcaggatgaagtacttgggggggccagcatcaagggcacccttggttctgaggcctagtgctctagacctagtgcacctcagagcagagtcccacacaccaggactccccaggctccaggtggggtctgaggggcggccaccctccctgaagctttcttgcggagctggtgtcttccctcagctggtccagcaggaacgtggggacccacaggactaggcaggtgtggaaggaccgtgaccgcccccccaggtgagcacagcaaggcacaggttcaaagcctgcagcgacaacctccttgggcccatcttgcaccacccccaccccgtggccctgcgccctcctgaccaggcgcagcaggttccgacgctccttgaaggtggcgcagcagcccaagaccccagtcaccatgacgacagtgcccgccaccaccaggatgtaggctgtggccaggtaggtgcctgaggccagcaggctgatgtagtcactcttgagggccagcgtccagatgcccactgccatgacagccaggccagccagccagaagcagcaattgtaggtaaacagcaggtacttgaggcaaacggtgccacatgttgtcttcttctcgttgaactcacccatcctggggcagccgggctggaaacgactcctactgcaggacaagtggacagaagctccccagactgtaggctaccacgcgtccgagtccgggcctgc

SEQ ID NO: 72284 - DNA, 1068 bp, Homo Sapiens
  misc_feature (1014)..(1023): n is a, c, g, or t
gcattctcagcgctgggagccgccgcccccgcagctgccgccgccgccagggcccggactcggacgcgtggtagcctagagtcctggggagcttctgtccacctgtcctgcagaggagtcgtttccagcccggctgccccaggatgggtgagttcaacgagaagaagacaacatgtggcaccgtttgcctcaagtacctgctgtttacctacaattgctgcttctggctggctggcctggctgtcatggcagtgggcatctggacgctggccctcaagagtgactacatcagcctgctggcctcaggcacctacctggccacagcctacatcctggtggtggcgggcactgtcgtcatggtgactggggtcttgggctgctgcgccaccttcaaggagcgtcggaacctgctgcgcctgtacttcatcctgctcctcatcatctttctgctggagatcatcgctggtatcctcgcctacgcctactaccagcagctgaacacggagctcaaggagaacctgaaggacaccatgaccaagcgctaccaccagccgggccatgaggctgtgaccagcgctgtggaccagctgcagcaggagttccactgctgtggcagcaacaactcacaggactggcgagacagtgagtggatccgctcacaggaggccggtggccgtgtggtcccagacagctgctgcaagacggtggtggctctttgtggacagcgagaccatgcctccaacatctacaagggtggagggcggctgcatcaccaagttgggagaccttcatccaagagcacctgagggtcattgggggctggtggggatcggccattgcctgtgtgcaagtcctttggcatgatcctcacgcgctgcccttgtacaggcagtctccaacctggaacactactgaaacctgcccttggggccttgcttgcttgctggcacccaattactgagcttgagacacctggagattacccgggggcttgggggtttccctgaatgaaannnnnnnnnngtgtggccattcacccataaaacctctgggggaaccccccaaccc

SEQ ID NO: 72285 - DNA, 919 bp, Homo Sapiens
ccgcagctgccgccgccgccagggcccggactcggacgcgtggtagcctagagtcctggggagcttctgtccacctgtcctgcagaggagtcgtttccagcccggctgccccaggatgggtgagttcaacgagaagaagacaacatgtggcaccgtttgcctcaagtacctgctgtttacctacaattgctgcttctggctggctggcctggctgtcatggcagtgggcatctggacgctggccctcaagagtgactacatcagcctgctggcctcaggcacctacctggccacagcctacatcctggtggtggcgggcactgtcgtcatggtgactggggtcttgggctgctgcgccaccttcaaggagcgtcggaacctgctgcgcctgtacttcatcctgctcctcatcatctttctgctggagatcatcgctggtatcctcgcctacgcctactaccagcagctgaacacggagctcaaggagaacctgaaggacaccatgaccaagcgctaccaccagccgggccatgaggctgtgaccagcgctgtggaccagctgcagcaggagttccactgctgtggcagcaacaactcacaggactggcgagacagtgagtggatccgctcacaggaggccggtggccgtgtggtcccagacagctgctgcaaagacggtggtgggctcttttgtggacagcgagaccatgcctccaacatctaacagggtggaagggccggctgcatcaccaagttggaagaccttcatccaggaagcaccttgagggtcattgggggctggtgggggatcgggcattgccctgtggcgcagggtcctttgggcattgaatcttcacgtggctgcccctggtaccaggaattcttcaagggctgggaagcacttacctgaaaccccttg

SEQ ID NO: 72286 - DNA, 1066 bp, Homo Sapiens
  misc_feature (368)..(486): n is a, c, g, or t
aagagatggtaatatgcaaataacataactgaataatctttttgaatggaagttcttgatctcgatactaagcagattttccttagcatgtctacaggaatttagtgtcaggtcagagttatggtttcaaaaaattaggatttctgtaaacaaaggcctgcacttaaaccttaaaatttattgactgacatgagtggtataactagtgtatatatcaagagttaacatttttaaattggtgtgcaagaagcctgattcaaagtagctcacatggtaacatttattgtaatactttgagatatttagtaataaatattacaaatgtataagtcttctaagacccaaaatgtataccttaagaaacattnnnnnnnnnnnnnnnnnnnnnnnnnnnnnnnnnnnnnnnnnnnnnnnnnnnnnnnnnnnnnnnnnnnnnnnnnnnnnnnnnnnnnnnnnnnnnnnnnnnnnnnnnnnnnnnnnnnnnnnttagggacttttttgaacagcagaaatcatatctccatttttaattgtggtacttttatggaagcttctccaacttcttttgatatgtctactccaagaggaattttggttcatagcggatgccttctatgtcatgtaaaatgcccaagccagcacgtagtctttcaataccattccatgcaatcataatgccattatcagtgcatagtctgggaggaggacacaacaaagtgcactgtgttgcgtttgttaaaatttccagagctctgcggatatagaagttacttgcgacaccaccagacgcaaccagtactgcattattttgaggtaacaagtctctctgcttacaaaacagaatagcccgatgtgttcttttcacaagatgacatgccattgtgtgctgtactgtggcagcaatgtctgctgctgaagacaggatttgccccttctcaataccttcctctttttcctttttcattattattttatcagtaacgtgttgaagtccagtaaaagaaaaatcacaatttttagcatgatgaaaggaaatagatttcattctagatgttggagcggccgc

SEQ ID NO: 72287 - DNA, 902 bp, Homo Sapiens
  misc_feature (54)..(84): n is a, c, g, or t
gagatggagtctcactctgtcaccggggctggagtgcagagggagattatctcnnnnnnnnnnnnnnnnnnnnnnnnnnnnnnnctgctctctcattataaagtcaggttcttgtttcagtaggagttaaaaaatagcttctcctatcctgatttgaggaagtgggggaaagtcctaggcctgtatgatacagggccagaattcagcaaaattactgtgcttctttcaaagcttcctttctacctgccagcatcaatacattcctttctcaaaagatgttttattttggtttttaataattaaaagaaaaaaactatcttcccttgtaagacttttaacacattatagtatctcagaagagcaggtaaaacatcaaatataaaagaaaaataaaatcttgatgaataattaatattatatatcttctacaatttgatacacaaaacaataaagacttaattttaaccttaatactacctttagggacttttttgaacagcagaaatcatatctccatttttaattgtggtacttttatggaagcttcccaaacttcttttgatatgtctactccagaggacatctacctcataagcagaccaatcggtattatttatttgctcatgatgcatcactagtttctgcagactatttgctaggaatccggatgggattaatatcaaatatttaaattcatcatatggtggtggtggattcctaaattacttacaaatattaccgggacctccagtccaggattaatggaagctcagtccccttaatgaggaaattccaaatttttggggatatttttgggaaggaaccggttttggcggggtccccaataacgggaaatgtaggtttaaagacctaagttgggagttttgctgagtcgtgggcgg

SEQ ID NO: 72288 - DNA, 583 bp, Homo Sapiens
ccagtcaggtgctcctgggctccggtctcaccatcctgtcccagccgctcatgtacgtgaaagtgctcatccaggtgggatatgagcctcttcctccaacaataggacgaaatatttttgggcggcaagtgtgtcagcttcctggtctctttagttatgctcagcacattgccagtatcgatgggaggcgcgggttgttcacaggcttaactccaagactgtgttcgggagtccttgaaactgtggtccatggtaaagttttacagcattaccaggagagtgacaagggtgaggagttaggacctggaaatgtacagaaagaagtctcatcttcctttgaccacgttatcaaggagacaactcgagagaatgcaggggtctcttccctcccctggggtttaggaagctcatgaggagctcggcttaaaatgtctttgatgtctcttcctttgtctcaaaaagtaatgtcaattttatatactatttcaatattactatctgcatttgttttaatataaaaatgtttgctccctacctttttctcccaaaaaatctttaagtaaagatgatctgggaaaatgtg

SEQ ID NO: 72289 - DNA, 937 bp, Homo Sapiens
gggccgtccgcccgcgggtgccatcatggcggacgcggccagtcaggtgctcctgggctccggtctcaccatcctgtcccagccgctcatgtacgtgaaagtgctcatccaggtgggatatgagcctcttcctccaacaataggacgaaatatttttgggcggcaagtgtgtcagcttcctggtctctttagttatgctcagcacattgccagtatcgatgggaggcgcgggttgttcacaggcttaactccaagactgtgttcgggagtccttggaactgtggtccatggtaaagttttacagcattaccaggagagtgacaagggtgaggagttaggacctggaaatgtacagaaagaagtctcatcttcctttgaccacgttatcaaggagacaactcgagagatgatcgctcgttctgctgctaccctcatcacacatcccttccatgtgatcactctgagatctatggtacagttcattggcagagaatccaagtactgtggactttgtgattccataataaccatctatcgggaagagggcattctaggatttttcgcgggtcttggtcctcgccttctaggtgacatcctttctttgtggctgtgtaactcactggcctacctcgtcaatacctatgcactggacagtggggtttctaccatgaatgaaatgaagagttattccccagctgtcacaggatatttttgcgagtatgttgacctattccctttgggcttgtctccaatcttatggctgtcaaaaactgtgggccttgctgggtggaatcccctcccttactcccccatatattactccttgggataactggtggtgcaagcctaccaaaaagagggggaatttgaaccccagaaaatagctttatttttcccgaaaggtcccccttttgggaaaaacttaatgtgtgtggac

SEQ ID NO: 72290 - DNA, 2542 bp, Homo Sapiens
  misc_feature (1145)..(1145): n is a, c, g, or t
  misc_feature (1898)..(1942): n is a, c, g, or t
ggggcgggccagtgaaaccggcggccctggcacgtgacctaggaccggctcaccgggtcgcttggtggctccgtctgtctgtccgtccgcccgcgggtgccatcatggcggacgcggccagtcaggtgctcctgggctccggtctcaccatcctgtcccagccgctcatgtacgtgaaagtgctcatccaggtgggatatgagcctcttcctccaacaataggacgaaatatttttgggcggcaagtgtgtcagcttcctggtctctttagttatgctcagcacattgccagtatcgatgggaggcgcgggttgttcacaggcttaactccaagactgtgttcgggagtccttggaactgtggtccatggtaaagttttacagcattaccaggagagtgacaagggtgaggagttaggacctggaaatgtacagaaagaagtctcatcttcctttgaccacgttatcaaggagacaactcgagagatgatcgctcgttctgctgctaccctcatcacacatcccttccatgtgatcactctgagatctatggtacagttcattggcagagaatccaagtactgtggactttgtgattccataataaccatctatcgggaagagggcattctaggatttttcgcgggtcttgttcctcgccttctaggtgacatcctttctttgtggctgtgtaactcactggcctacctcgtcaatacctatgcactggacagtggggtttctaccatgaatgaaatgaagagttattctcaagctgtcacaggattttttgcgagtatgttgacctatccctttgtgcttgtctccaatcttatggctgtcaacaactgtggtcttgctggtggatgccctccttactccccaatatatacgtcttggatagactgttggtgcatgctacaaaaagaggggaatatgagccgaggaaatagcttatttttccggaaggtcccctttgggaagacttattgttgtgacctgaaaatgttaatttgaagatgtggggcagggacagtgacatttctgtagtcccagatgcacagaattatgggagagaatgttgatttctatacagtgtggcgcgcttttttaataatcatttaatcttgggaaaattcaggtgtnttgtgtctgcctttttgttcttttttccagcacaacataacttaccactgatactccccctttagttattctgaattaggatatttttgctccaaattcttattttacttaaccagaagggaaaaaaagttgtattttcctgaagctacaggcactttgtcatgtgatttttgagtctcaatttaaggctttgtaaaatgaagagtagaattccaagaaaaatgagaaataattttgtaaaacttaacaaaatcactaaattaaactatatgggaggttatgaattactttttcttgggtagaccctaaaatgtcagtagcatgcaccagaatctgactcccattatgcttctaagcacatttcattgaccttgtctctcatacttcaagaaaaggacagtacattgctacattaccctagaaagtctgtgtgaggatctgccccttcagtctgttattgcaaagtaataaaatgtcacctacagggagcctctgagcctactctagttcaagaggctacctgaaaaaaaataaataagataaagggtcagcaacaacaaagaaaaagacaattacagaaaataagcaagatttggaaaggaagtataatggcactttttttcctcaaaggaagttcttgttttcacataaaaatatgaaaagcagatcctgcaggagtaacccccttctttaagagccaagtatttgccagtgcttaaattacaccatacgcgttctaattatatataatcnnnnnnnnnnnnnnnnnnnnnnnnnnnnnnnnnnnnnnnnnnnnnccgaaggtgagtagttttgcatttctgatgacagccttggaaagtatatttgtaactccatgtctggtaatgccaacccaagtcgacatgggtcttaggacactgaccacctcacatgccataccctcagttaagcatgttaacatttataggaggaaaaaaatcactttgggagaaaataaaattcaactcaagcataaagcttctgtttactcaggccttctaaaaagcaggttaaaatgctctaaaatgagaaagcctgtggtttcacttatttatataactcactgggacattgccaaatgagtaagcacttaattcgctgcttctgagacttctctgtcaaaacagccccactgataatattagacagaacgagaatgcaggggtctcttccctcccctggggtttaggaagctcatgaggagctcggcttaaaatgtctttgatgtctcttcctttgtctcaaaaagtaatgtcaattttatatactatttcaatattactatctgcatttgttttaatataaaaatgtttgctgcctacctttttctcccaaaaaatctttaagtaaagatgatctgggaaaatgtgccatgt

SEQ ID NO: 72291 - DNA, 788 bp, Homo Sapiens
  misc_feature (706)..(706): n is a, c, g, or t
  misc_feature (723)..(723): n is a, c, g, or t
  misc_feature (735)..(737): n is a, c, g, or t
gggagtgaaaccggcggccctggcacgtgacctaggaccggctcaccgggtcgcttggtggctccgtctgtctgtccgtccgcccgcgggtgccatcatggcggacgcggccagtcaggtgctcctgggctccggtctcaccatcctgtcccagccgctcatgtacgtgaaagtgctcatccaggtgggatatgagcctcttcctccaacaataggacgaaatatttttgggcggcaagtgtgtcagcttcctggtctctttagttatgctcagcacattgccagtatcgatgggaggcgcgggttgttcacaggcttaactccaagactgtgttcgggagtccttggaactgtggtccatggtaaagttttacaggagttaggacctggaaatgtacagaaagaagtctcatcttcctttgaccacgttatcaaggagacaactcgagagatgatcgctcgttctgctgctaccctcatcacacatcccttccatgtgatcactctgagatctatggtacagttcattggcagagaatccaagtactgtggactttgtgattccataataaccatctatcgggaagaaggcattctaagatttttcgcgggtcttgttcctcgccttctaggtgacatccttttctttgtggctgtgtaactcactggcctacctcgtcaatacctatgcactggaaacagtggnggttttctaccatgaantggaaatgaagnnnagtattctcaagctgtccacagggattttttttggcgagtatggttgacct

SEQ ID NO: 72292 - DNA, 684 bp, Homo Sapiens
  misc_feature (137)..(137): n is a, c, g, or t
tttaggaaataaacctctccaggacaaaaatgaacatgaatggagtgcatttgttccaagtcagaggtgggcacctataataaatgactagggttcactttctgggactgatgtttaattgtaacacagatacaacnagggtggccgtgttgtatataatacggtattatacctgcatgtgctctagcaaggataccaaggcaagcatacatgtagctggcttgagtttgtaccaaaacagtccttcaactttgcactgtgccttaagtaattactaacaaaaggtactaggattagctgcaatctctactttcgatgaggaaatcccagtaagctttctgattcaagtacaatgctgccattttttaaagggccacaactatagaattaccactgttggaatttggtacaaaatatgttttgtctattgaaaacatacacggtaaatggtgttgttaggtaggttctgtccagttcttagggacttttttcacattatagcatttttaccctaaacatgatgttgagattattatatactgtattttcttctaaattaaccctaatgtttaaaaactcactttccccctttaattgaaggcattgttttgttagatgcagtaatgatgtttaccagagattattgtttcctatgcaaaataaattttcatattttgaattcta

SEQ ID NO: 72293 - DNA, 887 bp, Homo Sapiens
  misc_feature (334)..(351): n is a, c, g, or t
  misc_feature (423)..(509): n is a, c, g, or t
  misc_feature (649)..(738): n is a, c, g, or t
  misc_feature (789)..(827): n is a, c, g, or t
gcctactactactatacggctgcgagaagacgacagaagggcaaaaaacagagttttgatgataatgatagcgaagaattggaagataaagattcaaaatcaaaaaagactgcaaaaccgaaagtggaaatgtactctgggagtgatgatgatgatgattttaacaaacttcctaaaaaagctaaagggaaagctcaaaaatcaaataagaagtgggatgggtcagaggaggatgaggataacagtaaaaaaattaaagagcgttcaagaataaattcttctggtgaaagtggtgatgaatcagatgaatttttgcaatctagaaaaggacagnnnnnnnnnnnnnnnnnncaagccaggtcctaacatagaaagtgggaatgaagatgatgacgcctccttcaaaattaagacagtggcccnnnnnnnnnnnnnnnnnnnnnnnnnnnnnnnnnnnnnnnnnnnnnnnnnnnnnnnnnnnnnnnnnnnnnnnnnnnnnnnnnnnnnnntagaaacaggtaaaaaggatcagagtaaacaaaaggaatctcaaaggaaatttgaagaagaaactgtaaaatccaaagtgactgttgatactggagtaattcctgcctctgaagagaaagcagagactcccacagctgcnnnnnnnnnnnnnnnnnnnnnnnnnnnnnnnnnnnnnnnnnnnnnnnnnnnnnnnnnnnnnnnnnnnnnnnnnnnnnnnnnnnnnnnnnnacctagcaaagccactgttaaagctatgcaagaagctctggctaagcttannnnnnnnnnnnnnnnnnnnnnnnnnnnnnnnnnnnnnngtataaaacggcttgaagaattagaagccaagcgtaaagaagaggaacgattggaacaag

SEQ ID NO: 72294 - DNA, 799 bp, Homo Sapiens
  misc_feature (309)..(402): n is a, c, g, or t
caccatcttgtacatgtgtgtgacggagcttatctagaatttttgtcttccctgtgtccacatgcccaagtacgcagataataggggctcttagcttttcggtgtttacatttttactatgttcaagtcgccgtttctcaatcctccgttttgctttgtcataagccctttcttctttagtccgatcatcatcagagtcatattcagaatctgagctcatttctttacttggctttttatctaatgtcttccctgaatccttctcatctgacaccttttcatcttcctcatcaccttcactgccttcannnnnnnnnnnnnnnnnnnnnnnnnnnnnnnnnnnnnnnnnnnnnnnnnnnnnnnnnnnnnnnnnnnnnnnnnnnnnnnnnnnnnnnnnnnnnnctatatgaactgtgtttccttctactttttctgtctcctcatcactggccatagcttcccaatcatccaatccagcatcctcagtatcttcttcttcttctggttcaacaggaggtggtgtctcttccttttctggtactccttgttccataacttctacagcagcacataattccattgattcagacacttctttactttctagctgctgtggtatttttttcctctttttatcttcataaattggcctcttctttggcaaagagtcttttgatggcacttcaacaccctgagcttgtagcagtttaagagtagcttcggctctggctctggcttctctctgggatttagttaaaagtttccctctttttcaagcgttctttcttctttctcgtgg

SEQ ID NO: 72295 - DNA, 611 bp, Homo Sapiens
  misc_feature (104)..(120): n is a, c, g, or t
  misc_feature (221)..(274): n is a, c, g, or t
  misc_feature (440)..(506): n is a, c, g, or t
gatgatggataacagtaaaaaaattaaagagcgttcaagaataaattcttctggtgaaagtggtgatgaatcagatgaatttttgcaatctagaaaaggacagnnnnnnnnnnnnnnnnncaagccaggtcctaacatagaaagtgggaatgaagatgatgacgcctccttcaaaattaagacagtagcccaaaagaaggcagaaaagaaggagcgcgagnnnnnnnnnnnnnnnnnnnnnnnnnnnnnnnnnnnnnnnnnnnnnnnnnnnnnngagttagaaacaggtaaaaaggatcagagtaaacaaaaggaatctcaaaggaaatttgaagaagaaactgtaaaatccaaagtgactgttgatactggagtaattcctgcctctgaagagaaagcagagactcccacagctgcagaagatgacaatgaaggagacnnnnnnnnnnnnnnnnnnnnnnnnnnnnnnnnnnnnnnnnnnnnnnnnnnnnnnnnnnnnnnnnnnngacctagcaaagccactgttaaagctatgcaagaagctctggctaagcttaaacggcttgaagaattagaagccaagcgtaaagaagaggaacgattggaacaag

SEQ ID NO: 72296 - DNA, 720 bp, Homo Sapiens
  misc_feature (135)..(163): n is a, c, g, or t
  misc_feature (235)..(319): n is a, c, g, or t
  misc_feature (483)..(549): n is a, c, g, or t
  misc_feature (601)..(638): n is a, c, g, or t
ggaaagctcaaaaatcaaataagaagtgggatgggtcagaggaggatgaggataacagtaaaaaaattaaagagcgttcaagaataaattcttctggtgaaagtggtgatgaatcagatgaatttttgcaatctnnnnnnnnnnnnnnnnnnnnnnnnnnnnncaagccaggtcctaacatagaaagtgggaatgaagatgatgacgcctccttcaaaattaagacagtggcccnnnnnnnnnnnnnnnnnnnnnnnnnnnnnnnnnnnnnnnnnnnnnnnnnnnnnnnnnnnnnnnnnnnnnnnnnnnnnnnnnnnnngttagaaacaggtaaaaaggatcagagtaaacaaaaggaatctcaaaggaaatttgaagaagaaactgtaaaatccaaagtgactgttgatactggagtaattcctgcctctgaagagaaagcagagactcccacagctgcagaagatgacaatgaaggagacnnnnnnnnnnnnnnnnnnnnnnnnnnnnnnnnnnnnnnnnnnnnnnnnnnnnnnnnnnnnnnnnnnngacctagcaaagccactgttaaagctatgcaagaagctctggctaagcttannnnnnnnnnnnnnnnnnnnnnnnnnnnnnnnnnnnnncgtataaaacggcttgaagaattagaagccaagcgtaaagaagaggaacgattggaacaagaaaaaagagaaaggaaaaagc

SEQ ID NO: 72297 - DNA, 457 bp, Homo Sapiens
  misc_feature (282)..(318): n is a, c, g, or t
gggacaccatatgtgtcctgttccagtgcgcgggtctgtggagagccgggtgcgagcggcggcagcacgaggggaaaagagctgagcggagaccaaagtcagccgggagacagtgggtctgtgagagaccgaatagaggggctggggccacgagcgccattgacaagcaatggggaagaaacagaaaaacaagagcgaagacagcaccaaggatgacattgatcttgatgccttggctgcagaaatagaaggagctggtgctgccaaagaacaggagcctcnnnnnnnnnnnnnnnnnnnnnnnnnnnnnnnnnnnnngcaggactttgatgaagatgatatcctgaaagaactggaagaattgtctttggaagctcaaggcatcaaagctgacagagaaactgttgcagtgaagccaacagaaaacaatgaagaggaattcacctcaaaagataaa

SEQ ID NO: 72298 - DNA, 1713 bp, Homo Sapiens
aactagctagtacgaggctgggttctaatcggcacgaggcggacctgagagctggaggggcgtgcgcgcgccctcgctctgttgcgcgcgcggtgtcaccttgggcgcgagcggggccgcgcgcgcacgggacccggagccgagggccattgagtggcgatggcggcgacggcgagtgccggggccggcgggatagacgggaagccccgtacctcccctaagtccgtcaagttcctgtttgggggcctggccgggatgggagctacagtttttgtccagcccctggacctggtgaagaaccggatgcagttgagcggggaaggggccaagactcgagagtacaaaaccagcttccatgccctcaccagtatcctgaaggcagaaggcctgaggggcatttacactgggctgtcggctggcctgctgcgtcaggccacctacaccactacccgccttggcatctataccgtgctgtttgagcgcctgactggggctgatggtactccccctggctttctgctgaaggctgtgattggcatgaccgcaggtgccactggtgcctttgtgggaacaccagccgaagtggctcttatccgcatgactgccgatggccggcttccagctgaccagcgccgtggctacaaaaatgtgtttaacgccctgattcgaatcacccgggaagagggtgtcctcacactgtggcggggctgcatccctaccatggctcgggccgtcgtcgtcaatgctgcccagctcgcctcctactcccaatccaagcagttcttactggactcaggctacttctctgacaacatcttgtgccacttctgtgccagcatgatcagcggtcttgtcaccactgctgcctccatgcctgtggacattgccaagacccgaatccagaacatgcggatgattgatgggaagccggaatacaagaacgggctggacgtgctgttcaaagttgtccgctacgagggcttcttcagcctgtggaagggcttcacgccgtactatgcccgcctgggcccccacaccgtcctcaccttcatcttcttggagcagatgaacaaggcctacaagcgtctcttcctcagtggctgaagcggccgggggctcccactcgcctgctgcgcctatagccactgcgccctgggggcctgggctctgctgccctggacccctctatttatttcccttccacagtgtggtttcttcctctgcggtaaaggacttggtctgttctaccccctgctccagcttgccctgctcgtcctgatcctgtgatttctctgtccttggctattcttgcagggagctggaaaacttcctgaggatttctggcctccccctgggttttagtttcagggcacacaggacagcagaagatcccctttgtcagtggggaaaccaaggcagagctgaggggacagggaggagcagaagccatcaagatggtcaaagggcctgcagagggagatgtggcccttcctccccctcattgaggacttaataaattggattgatgacaccagccccaaatctggagagtctggggggtggctaggagaggggaggagactggacaaagaagctggagaataggaactggagtttttaagaaaaattgttaaagaaaaagcagccgctggttttttgcaaatgctgtataaatctgtcatgccacagcagctgacagggccagaaaaactc

SEQ ID NO: 72299 - DNA, 913 bp, Homo Sapiens
tagtgagtcttgcgttattggacgaggcggagcgagggcttattgagtggcgatggcggcgacggcgagtgccggggccggcgggatagacgggaagccccgtacctcccctaagtccgtcaagttcctgtttgggggcctggccgggatgggagctacagtttttgtccagcccctggacctggtgaagaaccggatgcagttgagcggggaaggggccaagactcgagagtacaaaaccagcttccatgccctcaccagtatcctgaaggcagaaggcctgaggggcatttacactgggctgtcggctggcctgctgcgtcaggccacctacaccactacccgccttggcatctataccgtgctgtttgagcgcctgactggggctgatggtactccccctggctttctgctgaaggctgtgattggcatgaccgcaggtgccactggtgcctttgtgggaacaccagccgaagtggctcttatccgcatgactgccgatggccggcttccagctgaccagcgccgtggctacaaaaatgtgtttaacgccctgattcgaatcacccgggaagagggtgtcctcacactgtggcggggctgcatccctaccatggctcgggccgtcgtcgtcaatgctgcccagctcgcctcctactcccaatccaagcagttcttactggactcaggctacttctctgacaacatcttgtgccacttctgtgccagcatgatcagcggtcttgtcaccactgctgcctccatgcctgtggacattgccaagacccgaatccagaacatgcggatgattgatgggaagcccggatacaagaacgggctggacgtgctgttcaaagttgtccgcctacgagggccttcttccaccctggggaaagggccttcccgcccgtat

SEQ ID NO: 72300 - DNA, 645 bp, Homo Sapiens
tccttgcaaaaaccctcagctcacccgagggccaatggaaatttattaattttttttgtccttttccatctttccccaagtggcttttccttgcaaaatgcctgacatgacaccagaggggaacctgggagcggggggcaccccaagggggcagcccagggacttaaatacaagctggagggcagggcacaggtgggacaggcaagagacagcacgagggacatggcttctcagggagaccaaagacttgctttcttgcaggaagcagctgtgccagagggcaggggactaggatcctgggtgcagagtgggtgagcagagaggcccccaatcctggatggaacccacattccccagagaagtagcggcaggggatgagggccttccctggtgggctccagagacggagtggggagtgagccagatgtgctaccttggggaaagggaggaggtgctagcagagtgagggttaaggctggtgcccagcctctggcacggtgggccttccgcctccgcctgacatggggacaaaggggcacggtgggcaggcagcgcatgggtctgtctctggcagggcagagggcggcaggagcagactccctccaggctcaagacacaggcccagcactgctacccacaaccatt

SEQ ID NO: 72301 - DNA, 766 bp, Homo Sapiens
gtagagagaactgctcaacaaactaagtgttctgctcatttgtcgccttgaatgggagcaactgaacattaaccttaagatgggagtggagtgtgactagctgtgccgaggttgtctcccatgaaaaaaccatgtaccccaacttgacagatgtcagggaggtggtgacagaccagttcctatgcagtgggacccaggaggatgagagtccctgcaagggagaatctgggggagcagttttccttgagcggagattcaggttttttcaggtgggtctggtgagctggggtctttacaacccctgccttggctctgctgacaaaaactcccgcaaaagggcccctcgtagcaaggtcccgccgccacgagactttcacatcaatctcttccgcatgcagccctggctgaggcagcacctgggggatgtcctgaattttttacccctctagccatggccactgagccctctgctgccctgccagaatctgccgcccctccatcttctacctctgaatggccacccttagaccctgtgatccatcctctctcctagctgagtaaatccgggtctctaggatgccagaggcagcgcacacaagctgggaaatcctcagggctcctaccagcaggactgcctcgctgccccacctcccgctccttggcctgtccccagattccttccctggttgacttgactcatgcttgtttcactttcacatggaatttcccagttatgaaattaataaaaatcaatggttccacaaaa

SEQ ID NO: 72302 - DNA, 745 bp, Homo Sapiens
ttaaggaccgttcgacacttggagagaaattgggaggcaacctagtagtttcacttgaaggaaaaccattataaaatgacagtcaagcactacaatgtatgtgatcgtcaatgtgaatagcttagaatactgcaaaggataagctaattgaatgccttgaaagtattatccactggtcagatggtcaacttttttcagtattatttatagttggcacttgattgcagttctgtgaggcttgagcattcatacacctcacctgccttggcaagcctattttagtgatatggcagcacggatataacactatgcattaaaagcactttttgtaataagtttaatatcctaaaaggaatgccaattaagttttgttaactgtgtcatcaacttatcctagtacctcagtgttcattcctgttacctgcatatcttcttaaaagaaatagctgttattaatgcctttttgttttccattgagtgtacactactgaataagtgtaggagttttatgtttaccatgtgagtcctgcaacactaaagatattttgaatatcagtcatgatggcaatttctgtataaaagagccttaaatggaacattgttttgagatcaaactccccaccctcacaaaaatggccacgttgcaataaaaattgtggcatattacagaacgttgccttgttttccttggaaattttgcaaaatgttatgtgaaacaacttctagggtaaaaacagctattact

SEQ ID NO: 72303 - DNA, 1432 bp, Homo Sapiens
gctgggtggcgaattcggcacgaggcagagccgaagcccgagctgccgccgcagccacagccgagggcactatggcttctggagttacagtgaatgatgaagtcatcaaagtttttaatgatatgaaagtaaggaaatcttctacacaagaggagatcaaaaagagaaagaaagcagttctcttctgtttaagcgatgacaaaagacaaataattgtagaggaagcaaagcagatcttggtgggtgacattggtgatactgtagaggacccctacacatcttttgtgaagttgctacctctgaatgattgccgatatgctttgtacgatgccacatacgaaacaaaagagtctaagaaagaagacctagtatttatattctgggctcctgaaagtgcacctttaaaaagcaagatgatttatgctagctctaaagatgccattaaaaagaaatttacaggtattaaacatgagtggcaagtaaatggcttggatgatattaaggaccgttcgacacttggagagaaattgggaggcaatgtagtagtttcacttgaaggaaaaccattataaaatgacagtcaagtgccatctggatcttaaggagcttccatttctccagctcagtccattggaatagtatatagggttttgggttttttgttgtatttccccctttccactgggcccttccaacacaatgaatgaaggaaatatcatttatttaagcagcctatcagggattgccattagactgttgaatactgttacttgtatatagaacccaaggaatgccttcctgtcatattttagccaaaacaactggtagtatgcctcccttgcagcaagcactacaatgtatgtgatcgtcaatgtgaatagcttagaatactgcaaaggataagctaattgaatgccttgaaagtattatccactggtcagatggtcaacttttttcagtattatttatagttggcacttgattgcagttctgtgaggcttgagcattcatacacctcacctgccttggcaagcctattttagtgatatggcagcacggatataacactatgcattaaaagcactttttgtaataagtttaatatcctaaaaggaatgccaattaagttttgttaactgtgtcatcaacttatcctagtacctcagtgttcattccctgttacctgcatatcttcttaaaagaaatagctgttattaatgcctttttgttttccattgagtgtacactactgaataagtgtaggagttttatgtttaccatgtgagtcctgcaacactaaagatattttgaatatcagtcatgatggcaatttctgtataaaagagccttaaatggaacattgttttgagatcaaactccccaccctcacaaaaatggccacgttgcaataaaaattgtggcatattacaaa

SEQ ID NO: 72304 - DNA, 1816 bp, Homo Sapiens
  misc_feature (1009)..(1052): n is a, c, g, or t
  misc_feature (1574)..(1765): n is a, c, g, or t
ttttaaacagacaaaattcctaagagccgggcatgagctactcaagatttgttttgttgggttaaggtttctgacaaaagattctggtttaggcagatgcccctgacagttcaagtagcctcacggtggtagccagagcgctgtctacggcgaccgagaacacatggactggaagacagcctgccctagatcacccgtggcagtacatcttcaagctgccacattcaacatatgaccacagacatctttatagttccatcactggctgccatctagtatagcaggaatgcgtgggcgaaggaatacaaatttgctgggagaggaagagaatagtatctctgctagctgcctggaaagttggccccttaatcacaatgacaactaggacatttcacttggacagtgcattaaatttatagattttttaaaaagtacaaagactaagcagtaagttctgtcactgacgcaaactaggatgtcaaagaaaaatagattaactatttttacctaaagtagtgcaaagaaatctggcaaaaaatgaaagtgaactcaatatctgcacatcagtaatggggcagaattttatttaaaaggctagtggttcaaatactattgcttgaatagctctggtagatataaaatgtagtaacatctgaggtttgtacacatgagcaaaggagctgagggccagctcacaaagggatatttgatcctcagtcaagagagaagctaaaagcgcatgctgcaggagtaacctaatggatttatttggaccatactcccaccttctgacaaacagaaaaagacgtggatagaaaactgtctttccacacacaaaaatctggcttaattcttcttgctatacaactatacctcagctaagaaaaaaatctcttgtgaaaaactcaacctgggctactaaaaataaaaaggaaatttttaatgtcgtaaacaagtttagtaaacaccatgtggattttctgttgttaatgaagacatgatacattcnnnnnnnnnnnnnnnnnnnnnnnnnnnnnnnnnnnnnnnnnnnnctagaaagagacttcacaagaaaaaaatggagcccaagggtcatccctcaatcagaaatcggtccttagcaacgcatcagtaagccctcctgccaacataacaaaagcatctgaaatttgccttttcaaggacgttgactgaagttgaaacataaagcggaatcactgcagagcatattttgatgggttactgtcaatacccacctggtccagttcaaaatatctatagatccagtttgtacatattgccacaggtatactgataaaatcatctgatgatcccattttgttttaatggcagttcttatatagctcgaacattaagatcaacaaattctcagatgaagtacattaataagacacctcagaagtgaaacaaacctagtttttactaaaatgatgggataaaggtagtgtctatgctgaagagcagcttcacttgtttccccacagaaaaaggcccaaaatttttggaggataatttaaaaactaagccaataaggccaggcacggtggctcatnnnnnnnnnnnnnnnnnnnnnnnnnnnnnnnnnnnnnnnnnnnnnnnnnnnnnnnnnnnnnnnnnnnnnnnnnnnnnnnnnnnnnnnnnnnnnnnnnnnnnnnnnnnnnnnnnnnnnnnnnnnnnnnnnnnnnnnnnnnnnnnnnnnnnnnnnnnnnnnnnnnnnnnnnnnnnnnnnnnnnnnnnnnnnnnngcccggccgtaatggccgaattcccgggcatatgtccggtaccgtcgactg

SEQ ID NO: 72305 - DNA, 682 bp, Homo Sapiens
cacgactggcagaacatgagcgggtggcagcaagtactcagccacttggtcgcatccgggccttgttccctgctccactggcccaaatcagtaccccaatgttcgtgccttctgcccaagtttcatatcctggaaggtcttcacatgctccagccacctgtaagctatgtctaatgtgccagaaactcgtccagcccagtgagctgcatccaatggcgtgtacccatgtattgcacaaggagtgtatcaaattctgggcccagaccaacacaaatgacacttgtcccctttgtccaactcttaaatgacggacctgactggggaggaagaagaagagaaactgatgtgaacaggaagcgcgggttcaagatttctaaaactctatatttatacagtgacatatactcatgccatgtacatttttattatataggtaatgtgtgtatagaaagtctgtattccaatgttcgtaaatgaaactatgtatattatgcagaaacagtctgttccccctcatcttgcaattcctttgggggatgcagattgtagggaagatgatgtttagtttggccttgaaattatgatatccctgcccagggctgttttcaaatacaatataaaaaccacctaggaacctgctgttgctctaaggccattctgctttggtttggctcagcctcta

SEQ ID NO: 72306 - DNA, 1049 bp, Homo Sapiens
  misc_feature (60)..(84): n is a, c, g, or t
  misc_feature (161)..(161): n is a, c, g, or t
  misc_feature (845)..(854): n is a, c, g, or t
ctcctgtgtcggtcagaacaacttgctacttatcatttttgtataaaaaggaaattagtnnnnnnnnnnnnnnnnnnnnnnnnngaaaaatattgctaaaagtgcatttaaggagattgggagacaattagcagaatggagaaagtaagtctttttgtttnccaaattattaattgtcctgtgtctatgtacctctagctgttcttttttgtacttttctggttccaaaccagtttattctgtggttctataataagttttgatataatcttggcttcttaaaaactgtgtatcattaaaatatatgttctgcaagaattaaaactgagtccatgaaaataccataggaagacataaaactttaaaaggcaactcaaagatgatggaaacgcacttacaagtggtgaccaaaatttttaggtgaagtcgagcactctaattagagaactggaggaaccacatataacacttaacttcccctaccctgcccctccccaaaagaaaccatgacaaacctagcttttaaaaaatattttaagaaagagaatgaactgtggaatttattggcagccaaggaatgtgtccaagacacatgctgaggttttgaataaaaagtgaacttttgtaatttgaattgggtcccgcttagttcttgaattgttatgaaaatcctatatctgtttgtatatttgcaaaccctttgtattataattgttgatattttccctttttaaaaaataccattgaaatcagcatgacaaaaataacactgttggcacttataggtaacgtgattgattcagtatcttagagtttacagtttgtgttttaaaaaaactgaaggnnnnnnnnnnaagtgcaacatttctgtatactgtaaaagttataataactgaactgtttggtcgagtctttgtgtgttatattccaaggaaaattgaaagtattcagaaattaaaatattatttgatatctgaaacctggctgtccccactcactgtctttacatctagaagagcccctgtgagctctcgcttagctggccgggc

SEQ ID NO: 72307 - DNA, 700 bp, Homo Sapiens
  misc_feature (559)..(575): n is a, c, g, or t
gaaacccggcaccgtgtacttcgtgcaagtgcgctgcaacccctgtggcatctatggctccaagaaagccgggatctggagtgagtggagccaccccacagccgcctccactccccgcagtgagcgcccgggcccgggcggcggggcgtgcgaaccgcggggcggagagccgagctcggggccggtgcggcgcgagctcaagcagttcctgggctggctcaagaagcacgcgtactgctccaacctcagcttccgcctctacgaccagtggcgagcctggatgcagaagtcgcacaagacccgcaaccaggacgaggggatcctgccctcgggcagacggggcacggcgagaggtcctgccagataagctgtaggggctcaggccaccctccctgccacgtggagacgcagaggccgaacccaaactggggccacctctgtaccctcacttcagggcacctgagccaccctcagcaggagctggggtggcccctgagctccaacggccataacagctctgactcccacgtgaggccacctttgggtgcaccccagtggnnnnnnnnnnnnnnnnnagggttggttgagttgcctagaacccctgccagggctgggggtgagaaggggagtcattactccccattacctagggcccctccaaaagagtccttttaaataaatgagctatttaggtgcaaaa

SEQ ID NO: 72308 - DNA, 1741 bp, Homo Sapiens
  misc_feature (107)..(107): n is a, c, g, or t
  misc_feature (128)..(128): n is a, c, g, or t
  misc_feature (144)..(144): n is a, c, g, or t
  misc_feature (214)..(646): n is a, c, g, or t
  misc_feature (677)..(694): n is a, c, g, or t
  misc_feature (792)..(804): n is a, c, g, or t
  misc_feature (1390)..(1399): n is a, c, g, or t
gccgacgcctcacccgattggaaccaacggtagtttggaagcccccgctcccgaggagaaagcgacagttcggtagcgcaggtcgaacaggagacgcacgaggactnccaggggaacgcttgtatttnatatcctgtcggttcngccacctctgacttaggtcgatttgtgtgctcgtaagggggcgagctatgaaaaacgccagcacgcgccnnnnnnnnnnnnnnnnnnnnnnnnnnnnnnnnnnnnnnnnnnnnnnnnnnnnnnnnnnnnnnnnnnnnnnnnnnnnnnnnnnnnnnnnnnnnnnnnnnnnnnnnnnnnnnnnnnnnnnnnnnnnnnnnnnnnnnnnnnnnnnnnnnnnnnnnnnnnnnnnnnnnnnnnnnnnnnnnnnnnnnnnnnnnnnnnnnnnnnnnnnnnnnnnnnnnnnnnnnnnnnnnnnnnnnnnnnnnnnnnnnnnnnnnnnnnnnnnnnnnnnnnnnnnnnnnnnnnnnnnnnnnnnnnnnnnnnnnnnnnnnnnnnnnnnnnnnnnnnnnnnnnnnnnnnnnnnnnnnnnnnnnnnnnnnnnnnnnnnnnnnnnnnnnnnnnnnnnnnnnnnnnnnnnnnnnnnnnnnnnnnnnnnnnnnnnnnnnnnnnnnnnnnnnnnnnnaagaattcggaacgaggcgcggctgtaggcnnnnnnnnnnnnnnnnnngagaggaggatcacttgagcccaggagtttgaggctgcggtgagctgtgatcacaccaccacactccaacctgtgtaacagagtgaggcctcatctcnnnnnnnnnnnnnggccacaaaactcaacaataaaaacaaacagtccaattagaaaatgggcaaaagacatgaatagatgtttcactgaagaggatctatagatggcaagtaagcatatgaaaagctgttaaactccataagtcatcagggaatgcaaattgaaaccacagcgaggctatgacttacttatctcaatggctaaagaaaaaatagtgaaaataccaaatactgatgaggatacaaactggatattttatacattgctgacaggaatgtaaaatggtacagccactctgggaaagagtttatgaatttcttatcaagttaaacataattttttaatcaagttaaacataagacccagcagttgtgctcctggacattcattccagagaaatgaaaacctatattgtacttgtactcaaatattcataggagctttatttgtaatagccccaaactggaaacaacccagatgtcctacaacaggtacatggttaaacaaaccatccataacttggaatactgctctggaatgaaaaggaactaactgttgatacaagaacttggttgtacctcaggggtattatggtgaacnnnnnnnnnnccagtctcaaatggtcacatactgtatgatcgcatttatataacattcttgaggtgacaaaattattgaaatgaagaacagattaatggttgccagggatagggactggagggggtgtggggtatgtatgactataaagggatgacgcaaggagttcctttgtgctgatggaacagttctatatgattatgatgattacgatgttgattataacatttgattatgaggttaagcacatgaatctttacctgtgctgaagttgtatggacctacatacacacaaatgaatgcatgtaaaatctggtgatactgaataaagtctgtagtctagatagcaaaaaa

SEQ ID NO: 72309 - DNA, 1829 bp, Homo Sapiens
  misc_feature (1294)..(1307): n is a, c, g, or t
agccggtcagacaagcactggacgtggcggccattttgttttggacaccgagcaggagctggcggccgctgcagacgaaaggcaggaaagggcaggccgggtgagcagacggatcggccgactagacagccaaccagcaacaacgaactgagctcgcatactaccgcttacgcatctaaccaaccgcccatctagctaacccgagcccctccaccgtcaactcaggttcggccggtccccggcccgcctgccggagccgtggtggcagccccgggaggagcactggcgtctgtttccttcgattctcgggattcgaagatggctgcacagtcagcgccgaaagttgtgctaaaaagcaccaccaagatgtctctaaatgagcgctttactaatatgctgaagaacaaacagccgacgccagtgaatattcgggcttcgatgcagcaacaacagcagctagccagtgccagaaacagaagactggcccagcagatggagaatagaccctctgtccaggcagcattaaaacttaagcagagcttaaagcagcgcctgggtaagagtaacatccaggcacggttaggccgacccataggggccctggccaggggagcaatcggaggacgaggcctacccataatccagagaggcttgcccagaggaggactacgtgggggacgtgccaccagaaccctacttaggggcgggatgtcactccgaggtcaaaacctgctccgaggtggacgagccgtagctccccgaatgggcttaagaagaggtggtgttcgaggtcgtggaggtcctgggagagggggcctagggcgtggagctatgggtcgtggcggaatcggtggtagaggtcggggtatgataggtcggggaagagggggctttggaggccgaggccgaggccgtggacgagggagaggtgcccttgctcgccctgtattgaccaaggagcagctggacaaccaattggatgcatatatgtcgaaaacaaaaggacacctggatgctgagttggatgcctacatggcgcagacagatcccgaaaccaatgattgaagcctgcccatcctcccatgagagactcttgttagtcaacacatctgtaaataaccttgagataacagatgagaagaaatctgattgatgctggatggacctatcacaataggctgtggacttacttgccaccagcttgtgcatttagtgtgttccttttactttttgatactgtgttgtatgaaacccttttgtcctttgatttggttttctagtttagttttattannnnnnnnnnnnnntttcccctcctttgcccagacttctctttgaacacaaatgcattagccttgtggctagaacaccctcttcctacctctgtctcccctcacttgtcatatgctctgacatgctaacatttctttttgttcatccctgttgccccacagaaaacatcccagaaaaaaccggtcagtggttccttcctccctgatcctttagggttccttgaaatcagggttctggtacatcctcttcggaaaagccggttacaaacgtccagaaaggtctgtagctcaaaaattcgtccttccccatgataattagctaacctgggaaccttgaccgtcactacagggcagcgtacgaggtggcttaccatgtgtgcacgacgcctcggtggattcagtgcttccaggtctttgacgccatattttccaacacacggggtggggtgaaatgcccttcacacctgtgagagtacagagaccttggggtgtatcaacaaacgctacacggggtgaacgcaacggacgacccgttgg

SEQ ID NO: 72310 - DNA, 732 bp, Homo Sapiens
  misc_feature (341)..(353): n is a, c, g, or t
gtgtttatcgaagccaccaaggtggcatccgaaggtgtctctggtcttccagcgaggtgggagaggcctcatccagggcccagcggtccctgcagaagccagaaggtgcaggggccaggggtgggagcatcggagggagtcccagagccctggaccttgggcctagaccgcgtgataaaactgggttgagggatgctggaaccagttacgactgaagtcagtgtagacctgagctgggagggaacctgttagtctccccacctcttccctgaagagacaggcacccctcccagccgtggtcaacggagggagtggcacttctgccttgagtccccaggggnnnnnnnnnnnnngatatttatgaaataaatggtaatttgtgtaaataagctttaaggttcccagaatatgcaaattggtattaatttattcaaaggtgtacattgctgtgtacatatatttagagattaactcatacatttaaagtttttttcattttacgtgagcatctatattgtacagggctgggggggcccttggctgcgggagaaggcccagagccctggaggagccaccaccccgccggcccctcgacccctcggcccctcggcccctccgcccgggtttggctcgcctggcccgcgggctccacctcaggttttcacttttcgctccggagcgagaacgaaacgacaaaaacgcgagaaaacaataaaacgctagaaagcgaaa

SEQ ID NO: 72311 - DNA, 1318 bp, Homo Sapiens
  misc_feature (1253)..(1269): n is a, c, g, or t
tgatggcaggccttgcatggtagcctgaagcgatctcacccttctaactgggtgtggccacaggcacactggctcatgctgacctgtgctgcctgtggttatagttatgcgaactgtggttttacatccctaaaacagaagggcacggtgtccaggggatagcacccagcccaacttcagaaagacttcaggcaagatgtctaaccctcgtcttgttctgtttcttccagggaattccaagtgcccactttcggaggcctcttcccctacccctacacctacatggcagcagcagccgcagccgcctcggctttgcccgccactagtgctgcagctgccgccgccgcagccgccggctccctctcccggagtcccttcctgggcagtgcccggccccgactgcgtttcagcccctatcagatcccggtcaccatcccgcctagcactagcctcctcaccaccgggctggcctctgagggctccaaggccgctggtggaaacagccgggagcctagccccctgcccgagctggctctccgcaaagtaggggccccatcccgcggtgccctgtcgcccagtggctcggccaaggaggcggccaatgaactgcagagcatccagagactggtgagtgggctggagagccagcgagccctctccccaggccgggagtcgcccaagtgaggggctgcccagctgctcccctgccacgcaggccacccgggctgcctgcccctgctgcttgggacgtgtacagcacagaatgagtatttatttaaataaaggagaaaagtgggctgcagcagccggaatagagcctcgtctggcaagtcggggcctgggacacttccctgggcctcaacaaggatcaggctgctggaaacacagtcacttgggagctgctgggctaggtccagatccgctccagcgtcaaggtggcatccgaaggtgtctctggtcttccagcgaggtgggagaggcctcatccagggcccagcggtccctgcagaagccagaaggtgcaggggccaggggtgggagcatcggagggagtcccagagccctggaccttgggcctagaccgcgtgataaaactgggttgagggatgctggaaccagttacgactgaagtcagtgtagacctgagctgggagggaacctgttagtctccccacctcttccctgaagagacaggcacccctcccagccgtggtcaacggagggagtggcacttctgccttgagtccccaggnnnnnnnnnnnnnnnnngatatttatgaaataaatggtaatttgtgtaaataagctttaaggttcc

SEQ ID NO: 72312 - DNA, 496 bp, Homo Sapiens
  misc_feature (431)..(447): n is a, c, g, or t
tctggcaagtcggggcctgggacacttccctgggcctcaacaaggatcaggctgctggaaacacagtcacttgggagctgctgggctaggtccagatccgctccagcgtcaaggtggcatccgaaggtgtctctggtcttccagcgaggtgggagaggcctcatccagggcccagcggtccctgcagaagccagaaggtgcaggggccaggggtgggagcatcggagggagtcccagagccctggaccttgggcctagaccgcgtgataaaactgggttgagggatgctggaaccagttacgactgaagtcagtgtagacctgagctgggagggaacctgttagtctccccaccttttccctgaagagacaggcacccctcccagccgtggtcaacggagggagtggcacttttgccttgagtccccaggnnnnnnnnnnnnnnnnngatatttatgaaataaatggtaatttgtgtaaataagctataaggttcc

SEQ ID NO: 72313 - DNA, 1228 bp, Homo Sapiens
ggtccggaattcccgggatcgcggagacctcggctatcctggccttccgaggcccacgaggaggcgcggcccaacgccggggcctggagcattgaggccggaccctcgcgagacagcagagcctggcctgacgctggaaaccacaccctggcccagactgccagccctgacgggacagagccagggcactcaccaggctgcaagaacagtgctggggtggaggaggtgggccaccgaggaggctcctcgccccccaggctgccacctggtgtaccagtgatcagcctgggccacagcaggcccccaggggtagccatgcccaccacagagctgggcactctgcggcccccgctgctgcaactctccaccctgggaactgccccgcccactttggccctgcactaccaccctcaccccttcctcaacagtgtctacattgggccagcaggaccttttagcatcttccctagcagccggttgaagcggagaccaagccactgtgagctggacctggctgaggggcaccagccccagaaggtggcccggcgcgtgttcaccaacagccgggagcgctggcggcagcagaacgttaacggcgccttcgccgagctgaggaagctgctgccgacgcacccgcccgaccggaagctgagcaagaacgaggtgctccgcctagccatgaagtacatcggcttcctggtgcggctgctgcgcgaccaagccgcagctctggccgcaggccccacccctcccgggcctcgcaaacggccggtgcaccgggtcccagacgacggcgcccgccggggatccggacgcagggccgaggcggcagcgcgctcgcagcccgcgcccccggccgaccccgacggcagccccggtggagcggcccggcccatcaagatggagcaaaccgctttgagcccagaggtgcggtgaccgcacgcggcagcacctctgagccggagggcaccagggactcggcccagggccgtcaaggaaagggcagtggacgtgctgcgcatgttcgggagcgaactcccccgaagaaggaccagtgaagacgtcaggggcaaggtctcgggggtccggaagggtgatcatcgacccccaagggacccgcagacccttaaaaaaatcacccacaaccctctggaagtggccttgcccggtccccttcccaggggcgaggtcggcaaagcaacatggcagagcagtcataggacccaaa

SEQ ID NO: 72314 - DNA, 1006 bp, Homo Sapiens
gctggaccggtccggaattcccgggatatcgtcgaccccgcgtccggtgaatcgtgggtgggatggccgcgggccgcctctttctaagtcggcttcgagcacccttcagttccatggccaagagcccactcgagggcgtttcctcctccagaggcctgcacgcggggcgcgggccccgaaggctctccatcgaaggcaacattggcctgcactgcccaaagtcttggaaacttgctggatatgatgtaccgggagccagcacgatggtcctacacattccagacattttcctttttgagccgcctgaaagtacagctggagcccttccctgagaaactcttacaggccaggaagccagtacagatctttgagaggtctgtgtacagtgacaggtatatctttgcaaagaatctttttgaaaatggttccctcagtgacatcgagtggcatatctatcaggactggcattcttttctcctgtgggagtttgccagccggatcacattacatggcttcatctacctccaggcttctccccaggtttgtttgaagagactgtaccagagggccagggaggaggagaaaggaattgagctggcctatctagagcagctgcatggccaacacgaagcctggcttattcacaagacaacgaagctccactttgaggctctgatgaacattccagtgctggtgttggatgtcaatgatgatttttctgaggaagtaaccaaacaagaagacctcatgagagaggtaaacacctttgtaaagaatctgtaaccaataccatgaagttcaggctgtgatctgggctccctgactttctgaagctagaaaaatgttgtgtctcccaaccacctttccatccccagcccctctcatccctggagcactctgccgctcaagagctggtttgttaattattgttagactttgccattgttttcttttgtacctgaagcattttgaaaataaagtttacttaagttatgcttgtttttct

SEQ ID NO: 72315 - DNA, 742 bp, Homo Sapiens
ggtccggaattcccgggatatcgtcgacccacgcgtccggcggaagtgatcgctgtgtgaatcgtgggtgggatggccgcgggccgcctctttctaagtcggcttcgagcacccttcagttccatggccaagagcccactcgagggcgtttcctcctccagaggcctgcacgcggggcgcgggccccgaaggctctccatcgaaggcaacattggcctgcactgcccaaagtcttggaaacttgctggatatgatgtaccgggagccagcacgatggtcctacacattccagacattttcctttttgagccgcctgaaagtacagctggagcccttccctgagaaactcttacaggccaggaagccagtacagatctttgagaggtctgtgtacagtgacaggctccactttgaggctctgatgaacattccagtgctggtgttggatgtcaatgatgatttttctgaggaagtaaccaaacaagaagacctcatgagagaggtaaacacctttgtaaagaatctgtaaccaataccatgatgttcaggctgtgatctgggctccctgactttctgaagctagaaaaatgttgtgtctcccaaccacctttccatccccagcccctctcatccctggagcactctgccgctcaagagctgggtttgttaattattggtagactttgccattggtttcttttgtacctgaagcattttgaaaataaaggttacttaagttatg

SEQ ID NO: 72316 - DNA, 1025 bp, Homo Sapiens
aaggcttagtacgaggctgggttgtgaattcggcacgagggtgcgctggagcgagtgagcagcgatacctagggcggaagtgctctcggcggaagtgatcgctgtgtgaatcgtgggtgggatggccgcgggccgcctctttctaagtcggcttcgagcacccttcagttccatggccaagagcccactcgagggcgtttcctcctccagaggcctgcacgcggggcgcgggccccgaaggctctccatcgaaggcaacattggcctgcactgcccaaagtcttggaaacttgctggatatgatgtaccgggagccagcacgatggtcctacacattccagacattttcctttttgagccgcctgaaagtacagctggagcccttccctgagaaactcttacaggccaggaagccagtacagatctttgagaggtctgtgtacagtgacaggtatatctttgcaaagaatctttttgaaaatggttccctcagtgacatcgagtggcatatctatcaggactggcattcttttctcctgtgggagtttgccagccggatcacattacatggcttcatctacctccaggcttctccccaggtttgtttgaagagactgtaccagagggccaggaggaggagaaaggaattgagctggcctatctagagcagctgcatggccaacacgaagcctggcttattcacaagacaacgaagctccactttgaggctctgatgaacattccagtgctggtgtcggatgtcaatgatgattttttctgaggaagtaaccaaacaagaagacctcatgagagaggtaacacctttgtaaagaatctgtaaccaataccatgatgttcaggctgtgatctggctccctgactttctggagctagaaatgttgggttcccaacaactttcatccaggccttatcctggagctcttgcgtcaaaaccgtggatttggtacttggctgtccttgctccccttgaaaagctctctaaaaaaacccggttttgggggaag

SEQ ID NO: 72317 - DNA, 486 bp, Homo Sapiens
gccgcgtgccgcctctttctaagtcggcttcgagcacccttcagttccatggccaagagcccactcgagggcgtttcctcctccagaggcctgcacgtcgggcgcgggccccgaaggctctccatcgaaggcaacattggctccactttgaggctctgatgaacattccagtgctggtgttggatgtcaatgatgatttttctgaggaagtaaccaaacaagaagacctcatgagagaggtaaacacctttgtaaagaatctgtaaccaataccatgaagttcaggctgtgatctgggctccctgactttctgaagctagaaaaatgttgtgtctcccaaccacctttccatccccagcccctctcatccctggagcactctgccgctcaagagctggtttgttaattattgttagactttgccattgttttcttttgtacctgaagcattttgaaaataaagtttacttaggtcgcaatacccac

SEQ ID NO: 72318 - DNA, 812 bp, Homo Sapiens
tcatcattgacatccaacaccagcactggaatgttcatcagaccctcaaagtggagcttcgttgtcttggaaataaaccaggcttcgtgttggccatccagctgctctagataggccagctcaattcctttctcctcctcccctggccctctggtacagtctcttcaaaacaaacctggggagaagcctggaggtagatgaagccatgtaatgtgatccggctggcaaactcccacaggagaaaagaatgccagtcctgatagatatgccactcgatgtcactgagggaaccattttcaaaaagattctttgcaaagatatacctgtcaatgtacacagacctctcaaagatctgtactggcttcctggcctgtaagagtttctcagggaagggctccagctgtactttcaggcggctcaaaaaggaaaatgtctggaatgtgtaggaccatcgtgctggctcccggtacatcatatccagcaagtttccaagactttgggcagtgcaggctttttgggtgccagcagcctggatattctgccatgttgctacaggttctgtagctacgtgccattctgggtaagttttcgtgagtaacttcacaaacgtggactttcccacagcaatgttgccttcgatggagagccttcggggcccgcgccccgcgtgcaggcctctggaggaggaaacgccctcgagtgggctcttggccatggaactgaagggtgctcgaagccgacttagaaagaggcggcccgcggccatcccacccacgattcacacagcgatcacttccgccgagagcactccc

SEQ ID NO: 72319 - DNA, 1617 bp, Homo Sapiens
  misc_feature (277)..(293): n is a, c, g, or t
  misc_feature (295)..(535): n is a, c, g, or t
  misc_feature (581)..(619): n is a, c, g, or t
aggacagactaattctgaaaataccgaaggaaaagtagctctatgttctcaccccggttttcctgcgtgtgtgcccttgggtgcgatgcctcccccagcgctctgtggtcgccggtgccagggccccctctggtttggcagggcctggctgcctttgctccctgcagtgagtcttttggtgttttcatgcacggcttgtgcttctggatctgaggcctctcgtgttcacgcggacacttccttccttaagaagacgcctaaaagaggaagttggaannnnnnnnnnnnnnnnngnnnnnnnnnnnnnnnnnnnnnnnnnnnnnnnnnnnnnnnnnnnnnnnnnnnnnnnnnnnnnnnnnnnnnnnnnnnnnnnnnnnnnnnnnnnnnnnnnnnnnnnnnnnnnnnnnnnnnnnnnnnnnnnnnnnnnnnnnnnnnnnnnnnnnnnnnnnnnnnnnnnnnnnnnnnnnnnnnnnnnnnnnnnnnnnnnnnnnnnnnnnnnnnnnnnnnnnnnnnnnnnnnnnnnnnnnnnnnnnnnagtgctggaattataggcgtgaaccaccgcccccggctgcagttgnnnnnnnnnnnnnnnnnnnnnnnnnnnnnnnnnnnnnnnatctccaagggactctcccggcacttctaccttccagagttacttcagtgcataaagtttgaattattttgttcttgtgggcagaagtgggaatgatggaatatcctcacggaaaaggcagtgaagttgggagtactgcttacaaaacagggtcaccagtgcattatgtggcgtgttcatccccacgccgtgtgtcacgggctagggcggcgtgttcatccccacaccgtgtgtcacaacaggctagggcacttcacgatgtcactacttgtttttctgacgttccaaaaacaacgtaacttggttttcatgtgtttttccgtggtatatgtgagattgatgctacgggtcttacggactcacacccgttcccactctctgcaatatggatcaggcagtgtttctgataggatgtgaaatggactctcctcgggtgggtccagcaggggccctgcccaccagaacacagtccgtgctgtgctgcgctaaggagctggccctcaactctccttggtgcagggttcccacaaccgagttctagttccctgaggtctttaaaaacaaaaacagaatgttgtacgtgaagattctaggaggggagggaccagcaaatctgagagaaccgtcctggggcctcccttcgaggagccctctgatgtgaggagggacttgagttgagtgacgctgtggtgtgaggtgttctgagctcactgaccggaaggtccaggtgaatctcgtcataagtgatctcaggctctcacaggatccggagggaaatgtgttagagggtctggaaaattcagtgcttttgagttacttgtttttattaaaaatttcctcacaaaagagagtcctcaagttgtggctgttcttgggaaaggggtcaccgtgtctgacaaagtgtaactttaaaaagcacgttgattttttacaaatgtaagtgtgcttgggaattccttaaattttgtgcaataaactattttttggtaaagattttc

SEQ ID NO: 72320 - DNA, 1237 bp, Homo Sapiens
  misc_feature (55)..(55): n is a, c, g, or t
  misc_feature (97)..(97): n is a, c, g, or t
  misc_feature (832)..(1101): n is a, c, g, or t
  misc_feature (1103)..(1124): n is a, c, g, or t
caactaccagaccccacctctcccagtcagccagtgtctgcagggtttcaggatntggggtaggaaacagaagatctcacacatgtcgtgctgattntaaataaggcatctgtctctgagacacctgggagagcacagccaccttcctcacggtgcctgcctgtctcttccgaaagtcgcctctgcttggccacatgatgctggtgtaaccacaaaagatcccaggacttctcgatgactgcagaagtacaggtgctcctacacacgagtacaggcgctcccacagacaatggtaaagattttcacttggggaacaggagtgtgaggtttgttaccgcctgcgacctacacctggctgactccaggggaaaccgcgggagtcgctgcagggagcccctggtctgctctcctcctcctcctccaccggcctctccctgtgcccccccaaaggtcagatcagatatggggcctcagtgtccttgtgcctcctgatggccgtcaggcctgaccaagggtccaagctgccccttcccagtggccagccacggtggaatcacacagggccagtggcctgagaggaagagaccagcaggaaggaaagatcctcagcaacaaagtaaaaccagaacaacagaggacctttctgtgtaagaatatttggctttagaaggtaaataaaataattatatttcttagaattttctgactatccctaaatcctgcaggtaaattattcccaacaaattttcaaaaggcaatcaataataagtaggttcttcttcaataacatgagcatatgcttcttaaagactgggtgacaggccgggcgcannnnnnnnnnnnnnnnnnnnnnnnnnnnnnnnnnnnnnnnnnnnnnnnnnnnnnnnnnnnnnnnnnnnnnnnnnnnnnnnnnnnnnnnnnnnnnnnnnnnnnnnnnnnnnnnnnnnnnnnnnnnnnnnnnnnnnnnnnnnnnnnnnnnnnnnnnnnnnnnnnnnnnnnnnnnnnnnnnnnnnnnnnnnnnnnnnnnnnnnnnnnnnnnnnnnnnnnnnnnnnnnnnnnnnnnnnnnnnnnnnnnnnnnnnnnnnnnnnnnnnnnnnnnnncnnnnnnnnnnnnnnnnnnnnnncaaagattggattatgatattcagtatctatgtacacatcctatggtgggatggctatccaaaaaaacacctcgtgccgaattcggcgcgccgtgacttcatactctctcccc

SEQ ID NO: 72321 - DNA, 640 bp, Homo Sapiens
  misc_feature (16)..(16): n is a, c, g, or t
  misc_feature (38)..(38): n is a, c, g, or t
  misc_feature (54)..(62): n is a, c, g, or t
  misc_feature (239)..(239): n is a, c, g, or t
gcgacttctccttgcntatgggaagtcctcaagtgagngatgttcaccatgtannnnnnnnnctcttaggacagactaattctgaaaataccgaagaaaagtagctctatgttctcaccccggttttcctgtacttctgcagtcatcgagaagtcctggatcttttgtggttacaccagcatcatgtggcaagcagaggcgacttccggaagagacaggcaggcaccgtgagaaaagtnggtctgtgctctcccaggtgtctcagagacagatgccttatttaaaaatcagcacgacatgtggtgaggagggacttgagttgagtgacgctgtggtgtgaggtgttctgagctcactgaccggaaggtccaggtgaatctcgtcataagtgatctcaggctctcacaggatccggagggaaatgtgttagagggtctggaaaattcagtgcttttgagttacttgtttttattaaaaatttcctcacaaaagagagtcctcaagttgtggctgttcttgggaaaggggtcaccgtgtctgacaaagtgtaactttaaaaagcacgttgattttttacaaatgtaagtgtgcttgggaattccttaaattttgtgcaataaactattttttggtaaagata

SEQ ID NO: 72322 - DNA, 662 bp, Homo Sapiens
  misc_feature (276)..(292): n is a, c, g, or t
  misc_feature (294)..(550): n is a, c, g, or t
  misc_feature (580)..(618): n is a, c, g, or t
ggacagactaattctgaaaataccgaaggaaaagtagctctatgttctcaccccggttttcctgcgtgtgtgcccttgggtgcgatgcctcccccagcgctctgtggtcgccggtgccagggccccctctggtttggcagggcctggctgcctttgctccctgcagtgagtcttttggtgttttcatgcacggcttgtgcttctggatctgaggcctctcgtgttcacgcggacacttccttccttaagaagacgcctaaaagaggaagttggaannnnnnnnnnnnnnnnngnnnnnnnnnnnnnnnnnnnnnnnnnnnnnnnnnnnnnnnnnnnnnnnnnnnnnnnnnnnnnnnnnnnnnnnnnnnnnnnnnnnnnnnnnnnnnnnnnnnnnnnnnnnnnnnnnnnnnnnnnnnnnnnnnnnnnnnnnnnnnnnnnnnnnnnnnnnnnnnnnnnnnnnnnnnnnnnnnnnnnnnnnnnnnnnnnnnnnnnnnnnnnnnnnnnnnnnnnnnnnnnnnnnnnnnnnnnnnnnnnnnnnnnnnnnnnnnnngcgtgaaccaccgcccccggctgcagttgnnnnnnnnnnnnnnnnnnnnnnnnnnnnnnnnnnnnnnnatctccaagggactctcccggcacttctaccttccagagttact

SEQ ID NO: 72323 - DNA, 693 bp, Homo Sapiens
agaggacaagtcagagaaagcagtgaaagatatgaacaggaaaagtcttggcaagactcagagagattaaaaggaatcttagaacgtggaaaagaagaattggctgaagctgagattataaaagattcgcctgattccccagaacctccaaacaaaaaaccccttgttgaaatggatgaaactccacaagtggaaaaatcaaaagggccagtgtcgttattatccttgtggagtaatagaatcaatactgccaattccagaaaacatcaggaatttgctggacgtttgaactctgttaataacagagctgaactatatcaacatcttaaagaggaaaatgggatggagacaacagaaaatggaaaagccagccggcagtgaagagtgacttgaagaactaaatttagcatattgcaaaaatattttgtgcggaattcgatataagtacttttacagcaagatggtatagttatgttgcctggactggtttttacatttttaaaatatttcagctgtcatttttgtactaattataaaattggcacataattcaaaaatatacatttgagatgatttgtccccccaaattaaacaagtttattttatggtataaagtgttctctctggaaatgtttttaaaaaaattcttaggcttctctttgcgaaataaaactattaaaatatttgaaatgc

SEQ ID NO: 72324 - DNA, 1363 bp, Homo Sapiens
cggcttcgagataagtcccggcgcttgcgcggcggcggctatggcggcggaggaggaggaggtggactctgccgacaccggagagaggtcaggatggctaactggttggctccccacatgggtgccctacgtctatatcacaccttaaagaagctgaagagaagatgttaaaatgtgtgccttgcacatacaaaaaagaacctgttcgtatatctaatggaaataaaatatggacacttgaagttctcttcataatatttcaaataagactccacttgtccttctccatggttttggaggaggtcttgggctctgggcactgaattttggagatctttgcaccaacagacctgtctatgcttttgacctattgggttttggacgaagtagtagacccaggtttgacagtgatgcagaagaagtggagaatcagtttgtggaatccattgaagagtggagatgtgccctaggattggacaaaatgatcttgcttgggcacaacctaggtggattcttggctgctgcttactcgctgaagtacccatcaagggttaatcatctcattttagtggagccttggggtttccctgaacgaccagaccttgctgatcaagacagaccaattccagtttggatcagagccttgggagcagcattgactccctttaaccctttagctggcctaaggattgcaggaccctttggtttaagtctagtgcagcgtttaaggcctgatttcaaacgaaagtattcttcaatgttcgaagacgatactgtgacagaatacatctaccactgtaatgtgcagactccaagtggtgagacagctttcaagaatatgactattccttatggatgggcaaaaaggccaatgctccagcgaattggtaaaatgcaccctgacattccagtttcagtgatctttggcgcccgatcctgcatagatggcaattctggcaccagcatccagtccttacgaccacattcatatgtgaagacaatagctattcttggggcaggacattatgtatatgcagatcaaccagaagaattcaaccagaaagtaaaggagatctgcgacactgtggactgaacacactgaagctctgatgggaaaacctggtgactgatatagttgttcagcaataattcatagtctgtgatgaagagtagtgaatacaacacacaaccaggcagccttcttgactatactttgcacatgttttctttaggaattcactcacacatttaaaccagttagtgccttctagaagaatggctttcctttctcctacacaaaattgaaatatacaagtctctaaatataatacctttaaataaaaggttatttgtccctctgaaa

SEQ ID NO: 72325 - DNA, 373 bp, Homo Sapiens
tctctgccttgggctgagtgaggaagaggagtgctgttcctgccttcctagcccagctgggtctgaccagaggctactgtgtacccatttaccatgcgtgattgttaactcagagtggggtgtagccaggtattgactgaatgtatgttcttgctgacctgtgtttttttctgtagggaccaaagcagtatccttacaataatctgtacctggaacgaggcggtgatccctccaaagaaccagagcgggtggttcactatgagatctgaggaggcttcgtgggcttttgggtcctctaactaggactccctcattcctagaaatttaaccttaatgaaatccctaataaaactcagtgctgtgttaaaaaaaa

SEQ ID NO: 72326 - DNA, 1057 bp, Homo Sapiens
  misc_feature (104)..(138): n is a, c, g, or t
  misc_feature (872)..(873): n is a, c, g, or t
  misc_feature (879)..(879): n is a, c, g, or t
cgcacttctctcgcttgggaaaaaaagaccgatcaccatatatggcgccatcctctgcagccgaacgaacgagcgcagcgagtagttagcgaggaagcggccgnnnnnnnnnnnnnnnnnnnnnnnnnnnnnnnnnnncagtcgacggtaccggacatatgcccgggaattcggccattacggccgggggaagaaggtgaagatggcggtggccagggccggggtcttgggagtccagtggctgcaaagggcatcccggaacgtgatgccgctgggcgcacggacagcctcccacatgaccaaggacatgttcccggggccctatcctaggaccccagaagaacgggccgccgccgccaagaagtataatatgcgtgtggaagactacgaaccttacccggatgatggcatggggtatggcgactacccgaagctccctgaccgctcacagcatgagagagatccatggtatagctgggaccagccgggcctgaggttgaactggggtgaaccgatgcactggcacctagacatgtacaacaggaaccgtgtggatacatcccccacacctgtttcttggcatgtcatgtgtatgcagctcttcggtttcctggctttcatgatattcatgtgctgggtgggggacgtgtaccctgtctaccagcctgtgggaccaaagcagtatccttacaataatctgtacctggaacgaggcggtgatccctccaaagaaccagagcgggtggttcactatgagatctgaggaggcttcgtgggcttttgggtcctctaactaggactccctcattcctagaaatttaaccttaatgaaatcccctaataaactcagtgctgtgttaacccaggagagnngaaaanaaccaacccacaaaaaaccatggtcggccgccttcgggcccttccaagaagctttttagaaccatttccgtttgggggccggcggccccagtgaggaaagggggacctctgggcccataacctgttttccctcggggagaaccctggggcccatggacaaaaggggcctttggaacct

SEQ ID NO: 72327 - DNA, 867 bp, Homo Sapiens
  misc_feature (779)..(779): n is a, c, g, or t
  misc_feature (783)..(783): n is a, c, g, or t
  misc_feature (785)..(789): n is a, c, g, or t
aggcatagtgacctatagaaaaagttggtacaaaaaagcaggctggtacggtccggaattcccgggatatcgtcgacccacgcgtccgcgtgaagaaggtgaagatggcggtggccagggccggggtcttgggagtccagtggctgcaaagggcatcccggaacgtgatgccgctgggcgcacggacagcctcccacatgaccaaggacatgttcccggggccctatcctaggaccccagaagaacgggccgccgccgccaagaagtataatatgcgtgtggaagactacgaaccttacccggatgatggcatggggtatggcgactacccgaagctccctgaccgctcacagcatgagagagatccatggtatagctgggaccagccgggcctgaggttgaactggggtgaaccgatgcactggcacctagacatgtacaacaggaaccgtgtggatacatcccccacacctgtttcttggcatgtcatgtgtatgcagctcttcggtttcctggctttcatgatattcatgtgctgggtgggggacgtgtaccctgtctaccagcctgtgggaccaaagcagtatccttacaataatctgtacctggaacgaggcggtgatccctccaaagaaccagagcgggtggttcactatgagatctgaggaggcttcgtgggcttttgggtcctctaactaggactccctcattcctagaaatttaaccttaatgaaatccctaataaaactcagtgctgtgttaacagagcaacaacacanaaanannnnncctggtcgggccgccttcgggccctccaagaagcttttctagaaccatttccgttttgggcgggccgggccccagtac

SEQ ID NO: 72328 - DNA, 928 bp, Homo Sapiens
cccggggggcccccgcatcggggcgccaatcggcccgcccagggggcagacggtttggcccccttgccagttccgccagccgaaggcttcccacccttttccttgctgggtgacctttttccaaaacggaactgactcagttcagcaggcccccccagtaccagactcagaaattgtgatagagggggcattttgaacagtgccgtattgtgacatgctgtattggctattccagaaagtaggagtaaagatggaaaggagaaagaagcaccctctgagattccagtggtgtgtgggggcaagatctgatggaacctgaaaaagagaacgaagactaaccaaagagaaaggaaagagaagaaaccctaaatgggcaaaggaaagcacatcctgtttgcggagctttgaaatattggaaccatttctaattgctcctgtttttctgggtaacaccagttttctgtagttgccactaaagcagtagactcttgagtctcacttgtctctgagagagacagaagttagaaagttttgacttggcgattccgaaagtatgcctttgttggcacttaaatgtccagtgagacttcttggcaccttagagccctctgagatactgattattttaggttcttctccctactttcagatgttttcagcccaacactgggtgctctcttccactacagagaatcctgaagaaaagggaaggtgtttcccatgatggtgaatgtcactgccatgaattcctgaatctacctgctgctgggagtcagagtccaagcataacccgtgtagcataaaagcagcgctgtagccctattccagtctttttcgttaatgtccagagtgaacaacaagagttagtcaatcattaactgttgactgttgattctcataataaatgcagcataacgaccaaaaaaaa

SEQ ID NO: 72329 - DNA, 1125 bp, Homo Sapiens
  misc_feature (93)..(93): n is a, c, g, or t
  misc_feature (993)..(1018): n is a, c, g, or t
  misc_feature (1020)..(1020): n is a, c, g, or t
gaatcaatatgcatcaaaataagtgatacttaaatcatatatcatagttacactccttaaaaaaaggtacataaattcagtgagtttttttcntaacatacagaagtactaaatactgcttgcagtataatattgatattggaagctgcagtttccagaataagtggagtaataactaaacagacatttaattttatttcaatatctatggaaaaaacacttattaaatctccctgtattttatgttgtctttattacagaatcacttgtctgtttgttgtgtgccacttactgacaaaactttaaacagtacttgatgccagctctctactctgtggctgtgggacctgtttcttttaggtacttgtgcttattaatctacttactaaattttcacattgacatttttggggatgatactaccatatacgaaatggaaaatgtaatatgctcagtgcttctgtaaaatgcagcaatactggtattactttacatcagtaggcatctttgacatgagcatataaatattttgttgactcagcaaaggtgacactttgtgactaaagtatcccattatatataatgttttttgaaatgttggaaattttggggaattatcaaatgtatagaagttgcatgaaggttatagagaggtgtaactgtttgttaactattacatggatttcatactaggcagtgacaactaacatgttacttcaactaaaagtgtataatgggttgtctttttatttatgaaaataaaagtaattttacttcccccacaaaagccgcccaccgcgagcccgccccacacaagcacacaacgcgcgaccaagcccaaataaatttggtgggcccctcccggcccctccaaaaactttttcaaaaccattttcttttggggcccgcggcgcccattatggtaacggaaacctgggccacaagtgtgcttcccaaaaaaactccgggaccctggactaggggctcgggatnnnnnnnnnnnnnnnnnnnnnnnnnngnggggcaaaaccgagagtgtttttaaaacaaaattccaaaagaggggtttctcggaggcacttacccgtggcttacatcaacccgggatctccaagcgcggctcct

SEQ ID NO: 72330 - DNA, 550 bp, Homo Sapiens
ccccacccagtgtcccaggccacaggagcttattggccaggagggaataatgtcccccaatactgcctgttgagggaccagagttggggtctttggtgcttccaacctcctgccaacctggagttcacaacaccagagccccacggcctcgcacactgaagcaggggcgtgcggtgactcggtgcttctgttttggaagaaccacctgtcatcaaaacatggacagcagggtgttctcagctcccagcgaagcctccacaacagaatggggccacagggcagccgggactccctgtctcacctacattaacccatgcatactgtatgccataaactcactttggtatatccgcgtcacatgcagagaggaactctgcgacgtcaaagtgttgcttcttaaagtttcattattggcaactagagggttgtttttaatgcatggaaactaaacagattcctcggggagttcctgaaggaaccaggtgggcaaacctttgcttatatacatgcggcctcacctggaagagaaataaaccacttgtactaaaaa

SEQ ID NO: 72331 - DNA, 763 bp, Homo Sapiens
  misc_feature (682)..(700): n is a, c, g, or t
ctgtggatccacatgagtgggtaccaggagccagaacctgccttgaccagcaaccccttagtgctgtataacatgcataacctcccttgtgactcttgcaggaaccactccattaccctccagctccccagcgttctcagtttataaacatgctggccagatctgtgagcctgcaaagagaactttccccagtcaccatagaccattctccttcctgaaggcatggggcagaccattcgtttatttagagaagagctatacattcttctttctggtcccatcttaaacgtcttctgttgtgctgcaccccagatggtgtctcagatgctttggggaatctttaacagctgaatttgagtcagtcctcttaggctgcacctccagcctctgcagatcccccctcatttcccatggatggtgggaccccattattctctcatctcggcattcagggaacagtttccttagcggcccctggtcacatgtcatcgggctgggcaggaagcgtccctgggtgcgtgctccacttctccctctcaggaagcccagtttcatccttagtaccccccctcgtgcccgctgtcggctggttatagcacttccactgctactgtcagataggaagtgatcgaagcagggggcaaagagaaagcccatatttgttctaagcagaaaagcaggnnnnnnnnnnnnnnnnnnngaccgcgtatgcggccgcaagcttattccctgttagtgagggttaattttcgcgtaggcactc

SEQ ID NO: 72332 - DNA, 661 bp, Homo Sapiens
acataaacagtgataattgtctgaaaatgttgtgtgaagtagctatccctcataatagaagaaaagaatgtggacaggaggacttggactctacatttactatatgtgaagacatcaagagctcgaagtgtaaattacccgaacaagaatcactaccaaatgataacaaagacattttacaacggcttgatccttcttcattctcaactaagcattctatgcctgtaccaagcatggtgccatcctacatggcaatgactactgctgccaaaaggaaacggaaattaacaagttctacatcaaacagttcgttaactgcagacgtaaattctggatttgccaaacgtgttcgacaagataattcaagtgagaagcacttacaagaaaacaaaccaacaatggaacataaaagaaacatctgtaaaataaatccaagcatggttagaaaatttggaagaaatatttcaaaaggaaatctaagataaatcacttcaaaaccaagcaaaatgaagttgatcaaatctgcttttcaaagtttatcaataccctttcaaaaatatatttaaaatctttgaaagaagacccatcttaaagctaagtttacccaagtactttcagcaagcagaaaaatgaaactctttgttttcttcttttgtgttct

SEQ ID NO: 72333 - DNA, 1238 bp, Homo Sapiens
ccggtacttttaaggttaggatgggacgggaaaagtgaagcaggatattagctccttataccttctcccttccatttctgagatctcacattccatctatcacagggttttcaaagagatgctgagggtaacaaggaactcacttggcagtcagagcatcatgctttgaggtttggggtgctcaggctgggagggtagaatgccattccagaggacaagccacaaaaatgccttaatttgagctcgtatttacccctgctgataagtgacttgagagttcccggttttttcctcttgtccttccctcccttctgtccttccatgtgtggggaaagggtgtttttggtagagcttggtttccaaagcgcctggctttctcacttcacattctcaagtggcagtttcattatttagaatgcaaggtggacatcttttggatatctttttctatatattttctaaagctttacatatgagagggtatagggaggtgtttataaaacacttgagaacttttttccttaatatcagaaagcaaaaaaataaaaccacaattgagatttgcctttcaaaccctcaggtttgcctctaaccaggtgtccctggtcaccatcagagtactggaatacgggaaccgaggagaccttggtccttttgtttttgttctggactcttgggagtggaaatgagaatgagtttattcctactggagcttagttccaatgcatttggctccagaaagaccccagtgccttttgacaatggccagggttttacctacttcctgccagtctttcccaaaggaaactcattccaaatacttcttttttcccctggagtccgagaaggaaaatggaattctggttcatactgtggtcccttgtaacctcaggtctttaatgtgatcactttcaaatttaaaagatccaggtggaaatatttttactatagtaataattctacaaaatacctgaattcttaacactgttatatttcagtataagtggtggctttttcttttcatgtctttgatctggttttattcctgtaattcagccacctgattttgtgaggggggggaataatatgtggtttttgtacaaacatgtttctcagtgtgttgttattttggaaaaaatgaggggagggagtttggcaagaatggagaaaatgaatgaagaaggcctaatctctctctttttcagtgaataaatggaacaccatttctggaaaaaaaa

SEQ ID NO: 72334 - DNA, 1355 bp, Homo Sapiens
gcccctgataccacgcatggggcaggacctttgatgtacccgtgctgccatgagtcctgtctggataagaggtagagcggccaggtttctgctctggtcctggctgggatcctgtaacaggctggggaacacccaacttcccagctttgctgaagactctactcaacccctgaccctttcctatcaggagagatggcttgtaccctgccctgaagctggcagttcagtcccttattctgccctgttggaagccctgctgaaccctcaactattgactgctgcagacagcttatctccctaaccctgaaatgctgtgagcttgacttgactcccaaccctaccatgctccatcatactcaggtctccctactcctgccttagattcctcaataagatgctgtaactagcattttttgaatgcctctccctccgcatctcatctttctcttttcaatcaggcttttccaaagggttgtatacagactctgtgcactatttcacttgatattcattccccaattcactgcaaggagacctctactgtcaccgtttactctttcctaccctgacatccagaaacaatggcctccagtgcatacttctcaatctttgctttatggcctttccatcatagttgcccactccctctccttacttagcttccaggtcttaacttctctgactactcttgtcttcctctctcatcaatttctgcttcttcatggaatgctgaccttcattgctccatttgtagatttttgctcttctcagtttactcattgtcccctggaacaaatcactgacatctacaaccattaccatctcactaaataagactttctatccaataatgattgatacctcaaatgtaagatgcgtgatactcaacatttcatcgtccaccttcccaaccccaaacaattccatctcgtttcttcttggtaaatgatgctatgctttttccaaccaagccagaaacctgtgtcatcttttcaccccaccttcaatcaacaagtcctactgactgcacatcttaaatatatctttatcagtccacaagtccttccaattatatttcccaagtatatctagaacttatcacttatattccccatgtactaccttagtttagggtaatattctcttgaaaaaaagtgtccttactttctgacaattcccaagtcatcttccagagtaaaatgcaattccatcagggcactttgatgaaaaccttcagattacttgttgaatttggcttccctcccaagcccataattgtacaaacttccgcatttggctaagaaaaactttcctctccccaacggaatttttggagggccctaactgaaagcgga

SEQ ID NO: 72335 - DNA, 1928 bp, Homo Sapiens
  misc_feature (1079)..(1079): n is a, c, g, or t
gtacacctgatgaagttcattcctctgtattccaaagtgcaaaggccttgtacgtcaacacccatgatagacagctttgttcggctaatgaatgagttcactaatatgccagtacctccaaaaccccgacaagctcttggagataaaatcgtgagggatattcgccctggagctgcctttgagcccacatatatttacagactcctgacagttaacaagtcaagcctgtctgaaaagggtcgacaagaagatgctgaggaatacttaggcttcattctaaatggacttcatgaggaaatgttgaacctaaagaagcttctctcaccaagtaatgaaaaacttacgatttccaacggccccaaaaaccactcggtcaatgaagaagagcaggaagaacaaggtgaaggaagcgaggatgaatgggaacaagtgggcccccggaacaagacttccgtcacccgccaggcggattttgttcagactccaatcaccggcatttttggtggacacatcaggtctgtggtttaccagcagagttcaaaagaatctgccactttgcagccatttttcacgttgcagttggatatccagtcagacaagatacgcacagtccaggatgcactggagagcttggtggcaagagaatctgtccaaggttataccacaaaaaccaaacaagaggttgagataagtcgaagagtgactctggaaaaactccctcctgtcctcgtgctgcacctgaaacgattcgtttatgagaagactggtgggtgccagaagcttatcaaaaatattgaatatcctgtggacttggaaattagtaaagaactgctttctccaggggttaaaaataagaattttaaatgccaccgaacctatcggctctttgcagtggtctaccatcacggcaacagtgcgacgggcggccattacactacagacgtcttccagatcggtctgaatggctggctgcgcatcgatgaccagacagtcaaggtgatcaaccagtaccaagtggtgaaaccaactgctgaacgcacagcctaccctcctgtattaccgcccgagtggacctgctngtaaaccctgtgtgcgctgtgtgtgcgcccagtgcccgcttcgtaggacaccacctcacactcacttcccgcctctctttagtggctctttagagagaaactctttctccctttgcaaaaatgggctagaatgaaaaggagatgccttgcggttcgtgcacaacacagcttctgttgactctaacttccaaatcaaaatcatttggttgaaacagactgttgcttgattttagaaaatacacaaaaacccatatttctgaaataatgctgattcctgagataagaaagtggatttgatccccagtctcattgcttagtagaataaatcctgcaccagcaacaacacttgtaaatttgtgaaaatgaattttatctttccttaaaaaagaaattttttaatccatcacacttttcttccctaccctttagtttttgataaatgataaaaatgagccagttatcaaagaagaactagttcttacttcaaaagaaaaataaacataaaaaataagttgctggttcctaacaggaaaaattttaataattgtactgagagaaactgcttacgtacacattgcagatcaaatatttggagttaaaatgttagtctacatagatgggtgattgtaactttattgccattaaaagatttcaaattgcattcatgcttctgtgtacacataatgaaaaatgggcaaataatgaagatctctccttcagtctgctctgtttaattctgctgtctgctcttctctaatgctgcgtccctaattgtacacagtttagtgatatctaggagtataaagttgtcgcccatcaataaaaatcacaaagttggtttaaaaaaaa

SEQ ID NO: 72336 - DNA, 531 bp, Homo Sapiens
agtgagtgtgaggtggtgtcctacgaagcgggcactgcgcgcacacacagcgcacacagggtttacagcaggtccactcggcggtaatacagaaggtaggctgtgcggttcagcagttggtttcaccacctggtactggtggatcaccttgactgtctggtcatcgatgcgcagccagccattcagaccgatctggaagacgtctgtagtgtaatggccgcccgtcgcactgttgccgtgatggtagaccactggaagagagcccagcaggcagcagagtgagaacagcactgcacacgaatcattacaggtctccgccgacttccctccagggatgcatcctatgtgtaaaacccctctccaaagcaggtgggacagagagatgtcatcacacaaaccaatgctatttcaactcaaacacgcaagcaatccataataaaaacttttctataactgcaaggtaagcctaagtcagataagtacatgtgtgcaagaacgcatattaaccacatatttaaaatggcggccgca

SEQ ID NO: 72337 - DNA, 1506 bp, Homo Sapiens
  misc_feature (358)..(394): n is a, c, g, or t
gcaggacaggctgggtgtggaatcggcacgagggtccgccatagtgcctggcttggaggtgtcgccgccgctcggtgagagcccccgagcggcagggggccaacacaaaaagggagccggagaagccctagccgctgcccagcagcttgcgggcgtgttcttgcggttccgggcctcaaggcgacggaaacgaaaggcgagcgaagcgcggaggatccggcgagaagaagcgtcagggagcctcggcggtgtccccggggtccgccgaagccacccggccgccggctggggcccggggtggtgaggaagtgctccgaggcctcgccgaggcctagcgccggctttgtgtccgaggcgnnnnnnnnnnnnnnnnnnnnnnnnnnnnnnnnnnnnntgcgggaaggcctctcctccgccgaccgcgcgttttcggcctaggccgtggggccgctcgtggcctccggggagcaggcgccaggggtttgtgtgcggtgggggcctgggcctgggcctggggaagctgacgccggtcgtccggaagccaggaggaggcgtgaggccgctcgtggactccgggcctaggccctctcccctcaaccttctcccggggcctgggtcaccccaatccacggagagagagacccgccgggaggtgcggccgcgctatggacccctgaccccgtggggtcgctcggactcttaacgtgtggactgaccgctactgactgcaccgccaatccccccgtctctgccggccccttagcatgagcgagggggacccagccgggtgacattgtgcccgttggcggattctcgatttcccctcttccccgtcctcgtcctcctcctcccccatgaagtgattctgagtatcggggggtctctggattattgttctgacgaacccctgcttgtggttggggggtatttaatctgaggccttagggtccttcggtgtctttgagtgttttgtgtgtacatattttgctcttaaagtttataaatatacgtatattgagagtgtccacgtctcctcgctgaaccttaggaatcccttggcaccatgtcctgtgtgcattataaattttcctctaaactcaactatgataccgtcacctttgatgggctccacatctccctctgcgacttaaagaagcagattatggggagagagaagctgaaagctgccgactgcgacctgcagatcaccaatgcgcagacgaaagaagaatatactgatgataatgctctgattcctaagaattcttctggaattgttagaagaattcctattggaggtgttaaatctacaagcaagacatatgttataagtcgaactgaaccagcgatggcaactacaaaagcagtatgtaaaaacacaatctcacactttttctacacattgcttttacctttataatgtagcagtgaagtaaatcattttagaacttaatatccaactgatcatagcccatattgtaaataaaatgtatttggatgccagct

SEQ ID NO: 72338 - DNA, 621 bp, Homo Sapiens
  misc_feature (61)..(62): n is a, c, g, or t
cttaaaaactcacattctgttctccaggaaccgcttttgcaattcagttttcctatctgcnnaatgataggaataaagccattaggtgaatgaatagatactagtatctccatttaacagaagaggaatcaaaaccttataggattgttgtgatatcacattagattatttgtaaacagctttcaaaaggctgcaaaagaacaaaaaagaatgttgttgcctgctgagcccaggggaacactgtaggtgaatcagggtatttcaggcccctgggctgctttgagacaggtgctcttaccaaacaccatcaattgttgagtgtgaaccctggaatagagtgaagcttacactgaagccagtatatccacatcccatatgatctggtgcttatgtatatttcatttccttacctccttgccatatactttactgttacttgttaagattaataaatcccttaagagttgatgtagggacttaagttccttaagggcagaagtttttaaaaatgtttttaatactttagtgcttatttatttgaagtagtggttttaaaaaatatacaactgacacacgctgatatataaggtatatagtaaaggatttaaggggtttaaaatg

SEQ ID NO: 72339 - DNA, 2544 bp, Homo Sapiens
  misc_feature (1167)..(1230): n is a, c, g, or t
  misc_feature (1332)..(1390): n is a, c, g, or t
gcggccgcctgaggggagcccgcgcctccgccgcctgagaggaggtcgagctgccgccggggcgatgctggaggagctggagtgcggggcgcccggcgccaggggagccgccacagccatggattgcaaagatagaccagcttttccagttaagaagttaatacaagcccgtctgccgtttaagcgcctgaatcttgtcccaaaggggaaagccgatgacatgtcagacgatcagggtacttctgtgcaaagtaaaagccccgatttagaggcctctttggacaccttggaaaacaactgtcatgtgggttctgacatagactttagaccgaaacttgtcaacgggaagggtcccttagataactttttaagaaatagaatcgaaaccagtattggccagagcacagtcatcattgatttgacagaggactcgaatgagcagccagacagtcttgtggaccacaataaactaaattctgaagcctctccctccagggaggcaataaatggccagcgagaagacactggggatcagcaggggttgttgaaggccattcagaacgacaagttggcatttcctggagagaccctttcagacattccttgcaaaacagaggaggagggtgttggctgtggaggtgcagggaggagaggcgactcccaggaatgttcgccacggagctgcccggagctgacgagtggcccgagaatgtgccccagaaaggagcaggacagttggagtgaagctgggggcatcctgttcaaagggaaggggcctatggtggtcttgcaggacatcttggctgtgagaccaccgcaaatcaagtcccttccagccacacccaaaggcaagaacatgacccctgagagtgaggtgctggaatctttccccgaagaagactctgtactcagccattcgtccctgagctctccctcttccaccagctcgcccgaggggccgcctgctcccccaaagcagcacagcagtaccagtcccttccccacctccacgcccctccgcagaataactaagaaattcgtcaaaggctctacagagaagaacaagctcagactgcaaagagatcaggagcgtctgggcaagcagctcaagttacgtgcagaaagggaagaaaaggagaagctgaaagaggaggccaagcgggccannnnnnnnnnnnnnnnnnnnnnnnnnnnnnnnnnnnnnnnnnnnnnnnnnnnnnnnnnnnnnnngcgggagaaggatgagaaggagaaggcggagaagcagcggctcaaggaggagcggcgcaaggagagacaggaagccctggaggctaaacttgaggaaaaaannnnnnnnnnnnnnnnnnnnnnnnnnnnnnnnnnnnnnnnnnnnnnnnnnnnnnnnnnngccgaaatcacgaggttcttccagaaaccaaagactccacaggcccccaagaccctggccggctcctgtgggaagtttgccccctttgaaattaaagagcacatggtcctggcccctcggcgtcggaccgctttccatccagacctctgcagtcagctggaccagctcctccagcagcagagcggcgagttctccttcttgaaagacctcaaaggccggcagcccctgaggtccggacccacgcacgtttccacccggaatgcagatatttttaacagtgatgtcgtcatcgtggagcgtgggaagggcgacggtgttcccgagaggaggaagtttggcaggatgaagctcctgcagttctgtgagaaccaccggcctgcctactggggtacctggaataagaagacggcactcatccgcgcgcgagacccctgggcccaggacacgaagctcctggactatgaggtggacagtgatgaggagtgggaagaagaggagcctggggagtccctgtcccacagtgagggggatgatgatgacgacatgggagaggatgaagatgaggacgatggtttctttgtgccccatgggtacctgtctgaggacgaaggtgtgacagaggagtgtgccgaccctgagaaccataaggtccgccagaaactgaaggccaaggagtgggacgagttcctggctaaggggaagcgctttcgcgtcctgcaacctgtgaagatcggctgcgtgtgggcggctgacagagactgcgcaggcgatgacctgaaggtactgcagcagttcgcagcctgcttcctggagaccctgccggcccaggaggagcagacgcccaaggcctccaagcgggagaggagagacgagcagatcctggcccagctgctgccgctcctgcaaggcaactgtgaacgggagcaaggtcaccatccgggagttccaggagcactgccgccggggactgctcagcaaccacaccgggcagccccgcggagcccctccaccacctacctggaaaccccccacccccagcgaggatgcccgccatccccctctaagtcccgggctccaggcgggctcattttccgagaacctccgtgtatggagaaagcggcctggactttcgggaatgtgcctgggtaccgtgc

SEQ ID NO: 72340 - DNA, 789 bp, Homo Sapiens
  misc_feature (630)..(693): n is a, c, g, or t
caatctatcacttcacctatatcaataccttcttcctggccaatggtctcgcgccggatgatgccgtcctcttattccagtaccccagtagcagcccggtgtttctcacaagaactgcaggagcttcatcctgccaaacttcctcctcctcgggaacacccgtcgcccttcccacgcctccacgatgacgacatcactgttaaaaatatcctgcattccagggtggaaacgtgcgtgggtccggacctcaggggctgccggcctttgaggtctttcaagaaggagaactcgccgctctgctgctggaggagctggtccagctgactgcagaggtctggatggaaagcggtccgacgccgaggggccaggaccatgtgctctttaatttcaaagggggcaaacttcccacaggagccggccagggtcttgggggcctgtggagtctttggtttctggaagaacctcgtgatttcggccttctctgctttaatgcgcttctcttcttctcttaaccgtttctcttcttcctttttccttttttcactcaagtttagcctccagggcttcctgtctctccttgcgccgctcctccttgagccgctgcttctccgcacttctccattctcatcnnnnnnnnnnnnnnnnnnnnnnnnnnnnnnnnnnnnnnnnnnnnnnnnnnnnnnnnnnnnnnnnggcactcactccttggcccgcttggcctcatctttcagcttctcccctcgtgccgaattaaaccagggcctcagacctagccgtagggtggggggt

SEQ ID NO: 72341 - DNA, 1093 bp, Homo Sapiens
gggagctgggggaccacaaacaaacagggtccttagctggggcaggggagcccaaatctagggagagactcctgagcctgaggtccctggaatgagtgtgggtagccgtaagtccccaagacatggggactttgcagtgagcaatgggtctccacaagtacctctcatcttgagagccctaatactaaaagatgggcacccacccccaccaagggaagactgccccattccctgagagccatcattcctaacgaccttgatctggagaatgtggagggagcatgtccctgaattttcctagatccctccaaatgccacccaccagagtcactggtgaccccagaaaatggatatagccgaaatctgcctttcccctttttcattccctgtgctgaaagagggaccagggtagatgccccctgccctcgaatcccccctccccgactgtggaatggatcgaccctaacgatcttccccgccccaaacactagaatagactggcctgaaatccccttgcccagtagaatggactgatctatgtgcacacacccccatcacatggaatgggctggtctaggctgtggcctgccaccttccttagagtgaatagggcggacactcctctcttttcctgtagcgtgtggaccggtccacgcaattctttatcctgtgaactcatctgagtgggaggtggtggacactggggtttccttccctctctccgtagcatccgttggtctttctctccatctctgttggtttgtctgtctctgtcttcctcccaatccctaggggaagggggcatttggctagggggtgcccctgtgagcctcgaccttgccccctcgtccctctccccagtgtttccaggacccccaataaaccttgtcctgtccgccccctggatccgcccccacacacacacaacccttgtcggccgccctcggccccccaaaaagctttcctaaaccatttcgtttgggcgcccggcggcccagaaagggaaaggtgaaacatgggtcataagcttgttttccctaagggagaacccccgggccacaggacctaagggcttctggaatttcctcccacc

SEQ ID NO: 72342 - DNA, 1901 bp, Homo Sapiens
cctccgacttgtccccaacgttcctaggtaccgaggcctgagtggcgtattcggcacgagggaggagggccccagggggcggggcttggctgctaggccccttgaaaacagagcaggggggcctgtggcacgttcagaggagcctggtgccccgctgcccgtggccgtcggcactgccgagccagggggcagtatgaagaccacattcaccatcgagatcaaggacggccgtggccaggcctccacaggccgggtgctgctgcccacaggcaaccagagggcagaactgacactggggctgcgggcgcccccgaccctactcagcaccagtagtgggggcaagagcaccatcacccgtgtcaacagccctgggaccctggctcggctgggcagtgtcactcatgtcaccagcttcagccatgccccccccagtagccgaggaggctgcagcatcaagatggaaccagagccagcagagcctctcgctgcagcagtggaagtggccaatggggctgagcagacccgagtgaacaaagcaccagaagggcggagccctctgagcgctgaggagctgatgactattgaggatgaaggagtcttggacaagatgctggatcagagcacggactttgaagagcggaagctcatccgggctgcacttcgtgagctccgacaaaggaagagagaccagcgggacaaggagcgggaacggcggctgcaggaggcacggggccggccaggggaggggcgcggcaacacagccactgagaccaccacgaggcacagccagcgggcagctgatggctctgctgtcagcactgttaccaagactgagcggctcgtccactccaatgatggcacacggacggcccgcaccaccacagtggagtcgagtttcgtgaggcgctcggagaatggcagtggcagcaccatgatgcaaaccaagaccttctcctcttcctcctcatccaagaagatgggcagcatcttcgaccgcgaggaccaggccagcccacgggccggcagcctggcggcgctcgagaaacggcaggccgagaagaagaaagagctgatgaaggcgcagagtctgcccaagacctcagcctcccaggcgcgcaaggccatgattgagaagctggagaaggagggcgcggccggcagccctggcggaccccgcgcagccgtgcagcgatccaccagcttcggggtccccaacgccaacagcatcaagcagatgctgctggactggtgtcgagccaagactcgcggctacgagcacgtcgacatccagaacttctcctccagctggagtgatgggatggccttctgtgccctggtgcacaacttcttccctgaggccttcgactatgggcagcttagccctcagaaccgacgccagaacttcgaggtggccttctcatctgcggagacccatgcggactgcccgcagctcctggatacagaggacatggtgcggcttcgagagcctgactggaagtgcgtgtacacgtacatccaggaattctaccgctgtctggtccagaaggggctggtaaaaaccaaaaagtcctaacccctgctcggggccccacggatgctggtggactgtgtgcccctggtggaggtggacgacatgatgatcatgggcaagaagcctgaccccaagtgtgtcttcacctatgtgcagtcgctctacaaccacctgcgacgccacgaactgcgcctgcgcggcaagaatgtctagcctgcccgcccgcatggccagccagtggcaagctgccgcccccactctccgggcaccgtctcctgcctgtgcgtccgcccaccgctgccctgtctgttgcgacaccctcccccccacatacacacgcagcgttttgataaattattggttttcaacg

SEQ ID NO: 72343 - DNA, 1631 bp, Homo Sapiens
  misc_feature (949)..(959): n is a, c, g, or t
  misc_feature (1077)..(1077): n is a, c, g, or t
  misc_feature (1318)..(1318): n is a, c, g, or t
  misc_feature (1329)..(1329): n is a, c, g, or t
  misc_feature (1339)..(1339): n is a, c, g, or t
  misc_feature (1355)..(1355): n is a, c, g, or t
  misc_feature (1413)..(1413): n is a, c, g, or t
  misc_feature (1465)..(1465): n is a, c, g, or t
  misc_feature (1517)..(1517): n is a, c, g, or t
ggaagggatccccgaggattagatgcacgaggattggaggcccgagccatggaggcaagagggttagatgccagaggattagaggcccgtgcaatggaggcccgtgcgatggaagctcgtgcaatggaggcccgagcgatggaggcccgtgcaatggaagtccgagggatggaggccagaggcatggataccagaggcccagtgcctggccccagaggacctatacctagtggaatgcagggtcccagtccaattaacatgggggcggttgtcccccagggatccagacaggtcccagtcatgcagggaacaggaatgcaaggagcaagtatacagggtggaagccagcctggcggctttagtcccgggcagaaccaagtcactccacaggatcatgagaaggctgctttgattatgcaggttctacaactgactgcagaccagattgccatgttgcctcctgagcaaaggcagagtatcctgattttaaaggaacaaatacagaaatccactggagcaccttgataggttttcaaaaatacctggcaagaaatctggaaattctataattttgttgaaatattgaaaaaagatgacctgcatcctaacccttgaatgactcaaatcagtgccaggtggaggactcccatcaccttctctcagaacaaaatcacttcattttattgtcttagtttgtatattttctgtgacttgaaataaactttgaaccccagggaagcgagggcgcgggcgaggaggaacatggccggcccgcctccggccctcggagaaacctttcctaggaccatttctgtttgcgccgcgccgggccccaccgaaggtagacccgaacactggttccctaatcttgggtccccgaagggagatcccgtgcggccttggaccaaggggccggggcgatctcgtcccccccaccaaaacaaaccgnnnnnnnnnnnggtcatacccacaagcccttgtactgcaacccggagtcccccggaatgcggaacgcttcgttgaaaggggtgcaatttaaccccggcgaacggcgtcttcgcaaacgctccgcgattnttctcccaaagcgccggaacgcactcccgcgactgactgagtgaagaatttgaacgccgcgcacgacgccaggcagcccctctaggcgcggaggtgtctgcaatcgggagacgacggccgacccgccggtgctggcagaacaatgcgtgcacaattcaaagaggcgccctcttctctgtcggccccacgagacacagatgcggtcgacgagggtccacactctccaatctctcgagagcgngtggacgaccntccgctacgncggaaagaagacgcancgactacaactcctgtggcgacacagcgcgcgtgacatgtgcgtcactaacgaagacnacgcgactatcacgtgatccgcaccgcgctccgctctccgcgcgatacgagnctcacgagagcaagttctatatctctcgcgccccgcgctatcggcgatatantaagaaccacacaccctctgcgtgtgcgagccctccgcaaatatatagacaagacgactcttgtcacgtcgacgcgcaccgcgatagttatggccgcgcgcacccgcatgcggt

SEQ ID NO: 72344 - DNA, 783 bp, Homo Sapiens
  misc_feature (465)..(503): n is a, c, g, or t
aaggcaatggactatagaacagtgggcaaaaaagcaggctggtaccggtccggaattcccgggatatcgtcgacccacgcgtccgaaggagtcagtatacaaggaggaggtatacaaggaggaggtatacagggggcaagcaagcaaggtggaagccagcctagcagttttagtcctgggcagagccaggtcactccacaggatcaggagaaggcagctatgatcatgcaggttcatcaactgactgcagatcagatagccatgctgccccatgagcaaaagcagagtatcctgatttaaaaggaacaaatccagaaatccactggagcgtcttgaaaggtttaagaaaatatttggctgtagtctcaaattttattctgtagcatggagaatgggtgcaaaaagctgacttctgtatccccacacttggattagggtttccctcctcctagaacctaatcttannnnnnnnnnnnnnnnnnnnnnnnnnnnnnnnnnnnnnnattaattgagggtggggggaggagggagtgcgtctgttcactttaagttactttaaaataactctgaacatgattatattatgccaaataagattacaaagaataagcagcaatattgaagcatctacagtatgttaactacattttttaaatgtcgagtaaaacttagtgaaaactgctcataaagactaaaagttgacctgttaaaacgttaatgtactaagatagttttaagatttttggttgtataacaaaataaaagtttacccaaaagtataag

SEQ ID NO: 72345 - DNA, 1436 bp, Homo Sapiens
  misc_feature (16)..(16): n is a, c, g, or t
  misc_feature (36)..(36): n is a, c, g, or t
  misc_feature (43)..(43): n is a, c, g, or t
  misc_feature (113)..(113): n is a, c, g, or t
  misc_feature (294)..(384): n is a, c, g, or t
  misc_feature (763)..(771): n is a, c, g, or t
  misc_feature (784)..(793): n is a, c, g, or t
  misc_feature (1426)..(1426): n is a, c, g, or t
agatgatagaaaatanaaaggtgtgtataactatcntgtatantaaagtggcctacgagataggaagaagaatgatggatcccttttgatcaatcagaaaaaggaaacacganaagaaaagtcaggaaggtagagagagaaaaagcgagggaaggagaaagaatgggaataaaataaggaggtaagagatactatttttgctgagcaaccagtgtgtttcaggatgatacaaagaaaaatatagaatagaaataagtgcaggcttggaatcagctacaaatcctaaagatgggnnnnnnnnnnnnnnnnnnnnnnnnnnnnnnnnnnnnnnnnnnnnnnnnnnnnnnnnnnnnnnnnnnnnnnnnnnnnnnnnnnnnnnnnnnntaaaattccagagtgaccgtggcacttgggtgtacaggtaattcctccagagctgtttgctggcttcaggagtggagtgagaatttcttttttatgaaaagggatataaaggcaccgagctgatgcagtatttgtaatattaagttgacctaacaaggtatttgcatgagtcacaattacaaagttttgagcggttttgtaatttgacatttaggaaagtctcctatttattctcatactttacattcatgcttagtatactatagaggatgccagctttaatctttctgtcatttaaagcaatatgataagggtattcaataattgggtgccctaaatttctggatgagaaaattttcaattctggccatgagaaagnnnnnnnnntaaacagccttcnnnnnnnnnncctttgttttaaaactgtggttttttaaaaaagcaataattaactcagacctcactaaaaatcatttttgtttttatattgttatgtcataagctctattatgttattctaacaagtagcaatttcacaaaatttgtatgtagatgttaacgcacatttcctttgcttcttttattagactagtgttgactttggggggggacatttattcacaaatgagaagtaggcacaaagtaaaaaatggaaccatctactaacaaggatcctttaaaactgccaagggagctctaacttgaagccacatcctacagatggcagcccaaatagcacatgggcaattggcaccatctttatatggttgagtctcctgaatattttgaatgaattctcaacaaaatgtgctagccactggggacgcaaaacaagtaagatccctgttgcaagaaattcattttatagtgagggaggttggcatggagactaaaattctcaggaaaatgagatccgtgttagattagaagtcctgatgtgaaatgggaggaggggaaaaagcagcaatactgtgtttggaaatatactctgtatccgggtttcctgtgtatgttacccacttaaatggtattatcctgcttntggttttaaa

SEQ ID NO: 72346 - DNA, 1022 bp, Homo Sapiens
tttggagtcctgatgctttgaactatggagtgagccgacatcactctgggacgattcctgtttgactgttggtgtgactatggccggatgcggaatgcccgtcgtgtgtagcgtatgatgtggtgggaccatatggggagggaacctagaagacagaaagctggacatggaagcattgacggtcagagctgtggggtaggggtgtctgaatcctcctgtcgtgattgggtacactggttgaccttgctgtggtactaaccatcctagcggatgggggatttgtcctacggtgccaggcgatagtgggtaatacggggatatatctggagggtgcggaggccgtgggattcctgttttggggtctacgtcggctggtaagtgtggaggtgggtttcccggcgtgaagtgttcattgctgtacgtgataagaggcgtgagggggtggacatggtgagggtgctgcaccactggcactttgttagagacaatgtgtgccggtgatggggaccgggcatccttgagggcttgtctactctggaggctccctgcctggacatcaagcagtggccatttcatctggagataggttcgggcggtgggcgagagcgatccgttggggaggtaggggctcgtcaggtcggggatcatgatgaaggggtagccgggatacggtggccccttaaagagccctccatcttgcctcttggccgcttcttccaaactttcccgggatttgtctcggaaactttcggagcgaggcggaggccgtctttccgcctcggaatcggaggagctgttttgattcgtttctgattcattgactagagacgatttgacatcagctaaatccctctctgccgaggagttttcggagctcttctcctcctgttcgccctcgtctttgaaggaaatcagttcgtcgttggcgcctaggtcatcccctccaccgccgttcagctgcggcattttttttcacccaccagcagcaattttggaagaaaaatgaaggaggaagaaaagcc

SEQ ID NO: 72347 - DNA, 1986 bp, Homo Sapiens
aaggtagcgaggcctgggtggcgaattcggcacgaggggaaggaaggagctcccaactcgccggcctggccacgggatggcccccaaattcccagactctgtggaggagctccgcgccgccggcaatgagagtttccgcaacggccagtacgccgaggcctccgcgctctacggccgcgcgctgcgggtgctgcaggcgcaaggttcttcagacccagaagaagaaagtgttctctactccaaccgagcagcatgtcacttgaaggatggaaactgcagagactgcatcaaagattgcacttcagcactggccttggttcccttcagcattaagcccctgctgcggcgagcatctgcttatgaggctctggagaagtaccctatggcctatgttgactataagactgtgctgcagattgatgataatgtgacgtcagccgtagaaggcatcaacagaatgaccagagctctcatggactcgcttgggcctgagtggcgcctgaagctgccctcaatccccttggtgcctgtttcagctcagaagaggtggaattccttgccttcggagaaccacaaagagatggctaaaagcaaatccaaagaaaccacagctacaaagaacagagtgccttctgctggggatgtggagaaagccagagttctgaaggaagaaggcaatgagcttgtaaagaagggaaaccataagaaagctattgagaagtacagtgaaagcctcttgtgtagtaacctggaatctgccacgtacagcaacagagcactctgctatttggtcctgaagcagtacacagaagcagtgaaggactgcacagaagccctcaagctggatggaaagaacgtgaaggcattctacagacggggctcaagccccacaaagcactcaaggactataaatccagctttgcagacatcagcaacctcctacagattgagcctaggaatggtcctgcacagaagttgcggcaggaagtgaagcagaacctacactaaaaacccaacagggcaactggaacccctgcctgaccttacccagagaagccatgggccacctgctctgtgcccgctcctgaaacccagcatgccccaagtgagctctgaagccccctcctcaatcccttgatggcctcccaccctgtaagaggctttgcttgttcaaattaaactcagtgtagtcaaacacagacatggttgttgcaccagaaaggtccccactagagctaagcgtgaagctgaagctctgtccctattcccccagcccagctagctgatcacaccaacagatcctcatcagcaaagcatttggctttgtcctgcccaagtgggctgcagactgagtgctgcccttgtagcttccccagaccccaactcactgcagttcatctgaacaacctgagctcctgggccggggtggaaggagggggataaacctaaggccctgatccaaagcagcctgttgagctggttctccagggctgcagtctctccaggtgtacagctgctgtccctgccctgtcctgtccttgcacagtctcctatgtctgagccccagtgccttctgttcgggccctcctttggtgggaaggcagagccctgacccttgaatggttgtccttgactctgtgctgctgccttctgcagagaggcacctaagctgtttaaagagcccagtgattgtggctgctcctcctagaggtgggagggggcaagaggcctccttggtcagtgtccatgctttctgggcagggacttggttttttgttccaacagtggccttctccgggcttcatagttctttgtaatatgttgaagttaatttgaattgactgattttgttgaactgtgtgtttaagctgttgcattaaaaagctttcttctacatcaatatctgctgtgctttcatttatgccttttcagctttgcacctggaactctgtagtaataataaaagttattgcttattgggcattc

SEQ ID NO: 72348 - DNA, 861 bp, Homo Sapiens
  misc_feature (810)..(810): n is a, c, g, or t
gggggaggaaggaaggagctcccaactcgccggcctggccacgggatggcccccaaattcccagactctgtggaggagctccgcgccgccggcaatgagagtttccgcaacggccagtacgccgaggcctccgcgctctacggccgcgcgctgcgggtgctgcaggcgcaaggttcttcagacccagaagaaaaaagtgttctctactccaaccgagcagcatgtcacttgaaggatggaaactgcagagactgcatcaaagattgcacttcaccacgggccttggttcccttcagcattaagcccctgctgcggcgagcatctgcttatgaggctctggagaagtaccctatggcctatgttgactataagactgtgctgcagattgatgataatgtgacgtcagccgtagaaggcatcaacagaatgaccagagctctcatggactcgcttgggcctgagtggcgcctgaagctgccctcaatccccttggtgcctgtttcagctcagaagaggtggaattccttgccttcggagaaccacaaagagatggctaaaagcaaatccaaagaaaccacagctacaaagaacagagagcactctgctatttggtcctgaagcagtacacagaagcagtgaaggactgcacagaagccctcaagctggatggaaagaacgtgaaggcattctacagacgggctcaagcccacaaagcactcaaggactataaatccagctttgcagacatcagcaacctcctacagattgagccctaggaatggtccctgcacagaaagttgcggccagggnaagtgaagcagaaacctacactaaaaaaccccaacaggggcaactgggaac

SEQ ID NO: 72349 - DNA, 763 bp, Homo Sapiens
gaatgtacaccatatggaaaatgtgtgatcctcataaaataaaatggaataccatgatccagcaatcccagtcgacatatatactcaaaaaaaattaaaagcagggtcttgaagagatacttgtgttccatggtgatagcagccattgttcacaatagctaaaacatagaagcagcccaatcggccatcagtagatgaatggataagcaaaatgtagtatatccatgcaatggaatattattccacttcaaggaagaaaattctgacactggctacagcatgaatgaaccttgaggacgttatgcagttttacaggatgagttatggagctggatagtggtgatggtggcacattaaggatgtatttaatactgttcttaaatggtacacttaaaaatggtaaattttatgtgtattttacaatctttttttaaattgaagaaaaatcctgtagataaattagaaaattcttcccttcataggtttatctgcatttgattctcccatacttgtacaaggatttatttgtattcaaatggacaaattacgcaataggaaatatttgaaaatatttatcatgggtaattgctattttcattgacttcctaagattttatgtaataatcatttgagtcaatattggtagctaatgtactaatctaatattgaaatcagattgatcatctttgttacttaaagataatttgattggatcagcagttatttcaaattgattaaacaaaaaattataaaacacctaaaa

SEQ ID NO: 72350 - DNA, 1322 bp, Homo Sapiens
tggaaaaaatggcaaagttattcaagaaatagtggacaaatctggtgtggttcgagtgagaattgaaggggacaatgaaaataaattacccagagaagacggtatggttccatttgtatttgttggcactaaagaaagcattggaaatgtgcaggttcttctagagtatcatattgcctatctaaaggaagtagaacagctaagaatggaacgcctacagattgatgaacagctgcgacagattggtatgggtttcagaccttcttccaccagagggcctgaaaaagagaaaggatatgccactgatgaaagtaccgtctcttctgtacaaggttctaggtcttatagcggaagaggcagaggtcgtcggggacctaattacacctccggttatggtacaaattctgagctgtctaacccctctgaaacggaatctgagcgtaaagacgagctgagtgattggtcattggcaggagaagatgatcgagacagccgacataagcgtgacagcaggagacgcccaggaggaagaggcaaaagtggttcagggggtcgaggtcgtggtggaccacgtggtggcaaatcccccatcagttctgtgctcaaagatccagacagcaatccatacagcttacttgataatacagaatcagatcagactgcagacactgatgccagcgaatctcatcacagtactaaccgtcgtaggcggtctcgtagacgaaggactgatgaagatgctgttctgatggatggaatgactgaatctgatacagcttcagttaatgaaaatgggctagtcacagttgcagattatatttctagagctgagtctcagagcagacaaagaaacctcccaagggaaactttggctaaaaacaagaaagaaatggcaaaagatgtgattgaagagcatggtccttcagaaaaggcaataaacggcccaactagtgcttctggcgatgacatttctaagctacagcgtactccaggagaagaaaagattaataccttaaaagaagaaaacactcaagaagcagcagtcctgaatggtgtttcataaactgaagaagttcctagtttacagttcttttacattacatttacaatagtgcttgtacaagcttgccaaagatagaatatggatcgccagtctttacatcgcactttcagttcctccatttggaattcaaaaaggggagggatcctgaagaaatcatatgttaaacatactttgacacctactgtgttataaaatatatcatcagatgtgccttgagaatagtatatgtaacattaaaaaaaagttgctggctaaaaaa

SEQ ID NO: 72351 - DNA, 292 bp, Homo Sapiens
  misc_feature (143)..(151): n is a, c, g, or t
gcccctcccccctcctcccctctggttggaaagtttctagaatctcttcccagcggcctttgcggttccaacatggcggagctgacggtggaggttcgcggctctaacggggctttctacaaggccatttaagcacccgtctnnnnnnnnntgagtagatcttcatagtaaggtaggatctacaagacacaaactgaagagaaaagcgaagttcagaacaaattgtagcaaatgtttaacaatttaaaggagatttgtatattattaaaattacattttttcctgtgaaaaa

SEQ ID NO: 72352 - DNA, 2123 bp, Homo Sapiens
acagcctctgtgactatagaaccgtgtttacaaaaagcaggctggtacaggtccggaaatcccgggatatcgtcgacccacgcgtcgcaacatggcggagctgacggtggaggttcgcggctctaacggggctttctacaagggatttatcaaagatgttcatgaagactcccttacagttgtttttgaaaataattggcaaccagaacgccaggttccatttaatgaagttagattaccaccaccacctgatataaaaaaagaaattagtgaaggagatgaagtagaggtatattcaagagcaaatgaccaagagccatgtgggtggtggttggctaaagttcggatgatgaaaggagaattttatgtcattgaatatgctgcttgtgacgctacttacaatgaaatagtcacatttgaacgacttcggcctgtcaatcaaaataaaactgtcaaaaaaaataccttctttaaatgcacagtggatgttcctgaggatttgagagaggcgtgtgctaatgaaaatgcacataaagattttaagaaagcagtaggagcatgcagaattttttaccatccagaaacaacacagctaatgatactgtctgccagtgaagcaactgtgaagagagtaaacatcttaagtgacatgcatttgcgaagtattcgtacgaagttgatgcttatgtccagaaatgaagaggccactaagcatttagaatgcacaaaacaacttgcagcagcttttcatgaggaatttgttgtgagagaagatttaatgggcctggcaataggaacacatggtagtaacatccagcaagctaggaaggttcctggagttaccgccattgagctagatgaagatactggaacattcagaatctacggagagagtgctgatgctgtaaaaaaggctagaggtttcttggaatttgtggaggattttattcaggttcctaggaatctcgttggaaaagtaattggaaaaaatggcaaagttattcaagaaatagtggacaaatctggtgtggttcgagtgagaattgaaggggacaatgaaaataaattacccagagaagacggtatggttccatttgtatttgttggcactaaagaaagcattggaaatgtgcaggttcttctagagtatcatattgcctatctaaaggaagtagaacagctaagaatggaacgcctacagattgatgaacagctgcgacagattggttctaggtcttatagcggaagaggcagaggtcgtcggggacctaattacacctccggttatggtacaaattctgagctgtctaacccctctgaaacggaatctgagcgtaaagacgagctgagtgattggtcattggcaggagaagatgatcgagacagccgacatcagcgtgacagcaggagacgcccaggaggaagaggcagaagtgtttcagggggtcgaggtcgtggtggaccacgtggtggcaaatcctccatcagttctgtgctcaaagatccagacagcaatccatacagcttacttgataatacagaatcagatcagactgcagacactgatgccagcgaatctcatcacagtactaaccgtcgtaggcggtctcgtagacgaaggactgatgaagatgctgttctgatggatggaatgactgaatctgatacagcttcagttaatgaaaatgggctaggcaaaagatgtgattgaagagcatggtccttcagaaaaggcaataaacggcccaactagtgcttctggcgatgacatttctaagctacagcgtactccaggagaagaaaagattaataccttaaaagaagaaaacactcaagaagcagcagtcctgaatggtgtttcataaactgaagaagttcctagtttacagttcttttacattacatttacaatagtgcttgtacaagcttgccaaagatagaatatggatcgccagtctttacatcgcactttcagttcctccatttggaattcaaaaaggggagggatcctgaagaaatcatatgttaaacatactttgacacctactgtgttataaaatatatcatcagatgtgccttgagaatagtatatgtaacattaaaaaaaagttaatgactaaaaa

SEQ ID NO: 72353 - DNA, 616 bp, Homo Sapiens
  misc_feature (185)..(185): n is a, c, g, or t
  misc_feature (187)..(188): n is a, c, g, or t
  misc_feature (194)..(194): n is a, c, g, or t
agatgatagtgaaaaaaaaccccagcgacgcaatcgtagccgcaggcgtcgcttcaggggtcaggcagaagatagacagccagtcacagttgcagattatatttctagagctgagtctcagagcagacaaagaaacctcccaagggaaactttggctaagaaaacaacgacaaccgaacatgcgncnnaaaagnactcgctgacttgaagagcatggtccttcagaaaaggcaataaacggcccaactagtgcttctggcgatgacatttctaagctacagcgtactccaggagaagaaaagattaataccttaaaagaagaaaacactcaagaagcagcagtcctgaatggtgtttcataaactgaagaagttcctagtttacagttcttttacattacatttacaatagtgcttgtacaagcttgccaaagatagaatatggatcgccagtctttacatcgcactttcagttcctccatttggaattcaaaaaggggagggatcctgaagaaatcatatgttaaacatactttgacacctactgtgttataaaatatatcatcagatgtgccttgagaatagtatatgtaacattaaacaaaaagttgctggct

SEQ ID NO: 72354 - DNA, 666 bp, Homo Sapiens
gctttcctgctgaaggccctgaaatcacctgtgttccaggccacctgctaacaataaataatgctgccctgatgtggggaattagctcaagtggtagagcgcttgcttagcacgcaagaggtagtgggatcgatgcccacattctccaagctttattatttagacatcgtgtctccaaacactcaggtctccaaacccaagttagtgtctgagaacaggatgctgctttggttcaagacgtaggagcagcaataatagagggctggtgatggctccctcttggcattcagtatagtgtagatctaccatgtaattaattctctgtttctttgaggagctgtgaaaccaagggacatatacaactgctcttttctccctgtttctacctgcagctttgtcctaaatgtgagacaattatgaaaagtgcagcgcagagccacttgggtaaatacagccccggctttctgctcaggggacagagtttgaggcactgcagaggaaccggccaaagtatgagacccatatattgagagtaacagagtgtaaagttcaaaaaaatcaaaatatttaaagatttatcatgggtcttgatgacatgatggaatctctctactctctggacttattatgtgtggtaataaatttactttttaaaagccaaaaaaa

SEQ ID NO: 72355 - DNA, 1002 bp, Homo Sapiens
ggtcagggttgaatgtgtaatgttccttgctattgactgttattgttgattcttaggatcaggccaagaatcatctggaaaacattatcttaattccgtctctcatatcctaaacagtacattttactaagaaattccatatgaaaaactccactcatgtctcctgagattatcctgtaagtgaagtagctttcatttaaccaagctaaattatttccatttagccatgttaaagagaagccaagtctagagaaagcaatcctgtaacccatgaatctggtgtacccattttcccttaacgtaacgggaagtgttttgaaattcccaggaagagagctgttttgtaatcaaagtgatggataataagaaagccagactttggaaaaggataattggaataaagggaggtgcttgaagattttccaaactactttatgtcatttagcttctattttctgaagggctttctttggtgccatgtactcagatcagtcagttgactgaaagatgatcatgttttcttcgtaaagatttaagcaattggcaactacaaagacattattttcttactgttctatatcatgtactgttgctgacattacaaaaagggtctggaagggaaaccgtgtcactgttttatcttttttctttaaaatacaaaagtatcccaactaatcatttattatggtcagcttgttttacatgtcccctatcatgagaaatgctatcaacatctgtgatttctaagagtcttaccaaattgttactttaattcttgtgtcctgctgagtggtttttcttttaaaataccatttttatcaccctgtggcactgggtgtgttactgcgattacactgatgattctgagctgtgcttcttcaagtagctcagttcttgcgttttatattaggtaacagttttgtgatgcttttgtgcattctttgtcatctcttctgagttttcgaatctgtcataaataaactttttcactatgcacctggt

SEQ ID NO: 72356 - DNA, 589 bp, Homo Sapiens
  misc_feature (62)..(62): n is a, c, g, or t
  misc_feature (114)..(209): n is a, c, g, or t
  misc_feature (219)..(243): n is a, c, g, or t
agccagtaacatacttctagagaacaggaaaagagactaggataatacatcttccacacatntggcccactgataatgttaattctctggcgtatttcaaagaacttgttcctnnnnnnnnnnnnnnnnnnnnnnnnnnnnnnnnnnnnnnnnnnnnnnnnnnnnnnnnnnnnnnnnnnnnnnnnnnnnnnnnnnnnnnnnnnnnnnnngtcttgaagnnnnnnnnnnnnnnnnnnnnnnnnnccttgttcctttataggttcctggtagaatcagtagagatgatttcagctcattgacatttttttaagctatatccccttgtcattccattgagaaagctgacaactgggatagggaggggattagataatagatggggtcaaattctgtgtgaatgtgaacttgcctagtaagcactttgtctctgttcactactgcgatagaggaaatctatctccctatcttgggtccttgaactacagcctgctgtcttacaccagtggagctaccctttaaatgtacaaattatttgtatgctaatgtaatatggtgaaattaaaataaatcacactgttaattgttaaaa

SEQ ID NO: 72357 - DNA, 725 bp, Homo Sapiens
  misc_feature (254)..(349): n is a, c, g, or t
  misc_feature (359)..(383): n is a, c, g, or t
cgttcagtataagagaatggtcatgtactctttctctctccatcagcttcctcactgaaaatgtgcattaagtgccttgtagatactaatcaagaaagctgtgattctcctcaaagcgtatttttgtgaaatcttttaagagccagtaacatacttctagagaacaggaaaagagactaggataatacatcttccacacatttggcccactgataatgttaattctctggcgtatttcaaagaacttgttcctnnnnnnnnnnnnnnnnnnnnnnnnnnnnnnnnnnnnnnnnnnnnnnnnnnnnnnnnnnnnnnnnnnnnnnnnnnnnnnnnnnnnnnnnnnnnnnnngtcttgaagnnnnnnnnnnnnnnnnnnnnnnnnnccttgttcctttataggttcctggtagaatcagtagagatgatttcagctcattgacatttttttaagctatatccccttgtcattccattgagaaagctgacaactgggatagggaggggattagataatagatggggtcaaattctgtgtgaatgtgaacttgcctagtaagcactttgtctctgttcactactgcgatagaggaaatctatctccctatcttgggtccttgaactacagcctgctgtcttacaccagtggagctaccctttaaatgtacaaattacttgtatgctaatgtaatatggtgaaattaaaataaatcacactgttaattgtt

SEQ ID NO: 72358 - DNA, 1457 bp, Homo Sapiens
ctacgcgtccgggccgcgctctccccgcttcttcgcagtcttcgcccctctcctgtcgccgccatgagcactggcaccttcgtcgtgtgcgcagccgctcaattaccgcggcggggcccgcgtggagccggcggacgcctccggtaccgagaaagctttcgagccagcaaccggccgagtgatagctactttcacatgttcaggagaaaaggaagtaaatttggctgttcaaaatgcaaaggctgcttttaaaatatggagtcaaaaatctggcatggagcgttgccgaatccttttggaggctgccaggataataagggaacgggaggatgaaattgctactatggagtgcatcaacaatggcaagtccatctttgaggcccgcttggacatcgacatttcctggcagtgcctggagtattatgcgggcttggctgcatccatggctggtgaacacatccagctcccaggtggatcgtttggttataccagaagagaaccacttggggtatgtgtgggaataggagcatggaactacccctttcagattgcctcttggaagtcggctccagcattagcctgtggtaatgccatggtctttaaaccttctccctttacacctgtttctgcattgctactggctgaaatctacagtgaggctggtgtacctcctgggctcttcaatgtggtgcagggaggggctgccacaggccagtttctgtgtcagcatcccgatgtggccaaagtctccttcactggaagtgtgcccactggcatgaagatcatggagatgtcagctaaaggaatcaaacctgttaccttggaacttggaggcaaatctccactcatcatcttctcagactgtgatatgaacaatgctgtaaagggggcgctgatggccaacttcctcacacaaggccaggtttgctgtaatggcacaagagtatttgtgcagaaagaaattcttgataaatttacagaggaagtggtgaaacagacccaaaggattaaaattggagatccccttctggaagatacaaggatgggtccactcatcaaccgaccacacctggagcgagtccttgggtttgtcaaagtggccaaaggagcagggtgctaaagtgttatgtggtggagatatatatgtacctgaagatcccaaattaaaggatggatattacatgagaaccttgtgtattaagtatgtcctctttttgtttgcttttagatgatttgaattaaatatctgtaatagatagagatgaatatttatataaatatgtacatgatatcaagcaagggctggcaaattatgtggtcctactacccagagtttaagaagtagaactgcatccattatctttgaagccttctgtgtgcccctcctttagggcacccatatgtattagtttatccaggaccacaactattgttatacaacgcagggctcaaaaata

SEQ ID NO: 72359 - DNA, 1559 bp, Homo Sapiens
  misc_feature (1198)..(1222): n is a, c, g, or t
gcatagtaatataaacaagtgggtacaaaaaagcggctggtacggtccggaattcccgggatatcgtcgacccacgcgtcgcaacttcctcacacaaggccaggtttgctgtaatggcacaagagtatttgtgcagaaagaaattcttgataaatttacagaggaagtggtgaaacagacccaaaggattaaaattggagatccccttctggaagatacaaggatgggtccactcatcaaccgaccacacctggagcgagtccttgggtttgtcaaagtggcaaaggagcagggtgctaaagtgttatgtggtggagatatatatgtacctgaagatcccaaattaaaggatggatattacatgagaccttgtgtattaactaattgcagagacgacatgacctgtgtgaaggaagagatctttgggcctgttatgtccattttatcatttgacactgaagctgaggttctagaaagagccaatgataccacttttggactagcagctggcgtctttaccagggacatccaacgggctcatagagtggtagctgagcttcaggctgggacgtgcttcattaacaactataacgtcagcccagtggagttgccctttggtggatataagaagtcaggatttggcagagagaacggccgtgtgacaatcgaatattattcacagctgaagactgtgtgtgtggagatgggtgatgtggaatctgctttttgaaaacctgcagtgaaacctattgacatggccacgctgtggaatgatgtgaattggccctgtttacagaggcagtacaactgaatgttattttacatccagaattttggcgttcagtataagagaatggttcatgttactctttctctctccatcagcttcctcactgaaaatgtgcattaagtgccttgtagatactaatcaagaaagctgtgattctcctcaaagcgtatttttgtgaaatcttttaagagccagtaacatacttctagagaacaggaaaagagactaggataatacatcttccacacatttggcccactgataatgttaattctctggcgtatttcaaagaacttgttcctggctgatccaagtgcagtggtatttacaactaattgatcacaaccagtttgtagatttctttgttccttctccattcccactgcttcacttgcctagtcttgaagnnnnnnnnnnnnnnnnnnnnnnnnnccttgttcctttataggttcctggtagaatcagtagagatgatttcagctcattgacatttttttaagctatatccccttgtcattccattgagaaagctgacaactgggatagggaggggattagataatagatggggtcaaattctgtgtgaatgtgaacttgcctagtaagcactttgtctctgttcactactgcgatagaggaaatctatctccctatcttgggtccttgaactacagcctgctgtcttacaccagtggagctaccctttaaatgtacaaattatttgtatgctaatgtaatatggtgaaattaaaataaatcacactgttaa

SEQ ID NO: 72360 - DNA, 1734 bp, Homo Sapiens
  misc_feature (499)..(500): n is a, c, g, or t
ggggcggccggtagctgttgctgttgggggaccccctcattcctgccgctgccgtccctgctgcctcatggcggccatcggagttcacctgggctgcacctcagcctgtgtggccgtctataaggatggccgggctggtgtggttgcaaatgatgccggtgaccgagttactccagctgttgttgcttactcagaaaatgaagagattgttggattggcagcaaaacaaagtagaataagaaatatttcaaatacagtaatgaaagtaaagcagatcctgggcagaagctccagtgatccacaagctcagaaatacatcgcggaaagtaaatgtttagtcattgaaaaaaatgggaaattacgatatgaaatagatactggagaagaaacaaaatttgttaacccagaagatgttgccagactgatatttagtaaaatgaaagaaacggcacattctgtattgggctcagatgcaaatgatgtagttattactggtccnncgtttgattttggagaaaagcaaaaaaatgctcttggagaagcagctagagctgctggatttaatgttttgcgattaattcacgaaccgtctgcagctcttcttgcttatggaatttggacaagactcccctactggaaaaagcaatattttggtgtttaagcttggaggaacatccttatctctcagcgtcatggaagttaacagtggaatatatcggggttctttcaacaaacactgatgataacatcggtggtgcacatttcacagaaaccttagcacagtatctagcttctgagttccaaagatccttcaaacatgatgtgagaggaaatgcgcgagccatgatgaaattaacgaacagtgctgaagtagcgaaacattctttgtcaaccttgggaagtgccaactgttttcttgactcattatatgaaggtcaagattttgattgcaatgtgtccagagcaagatttgaacttctttgttctccactttttaataagtgtatagaagcaatcagaggactcttagatcaaaatggatttacagcagatgatatcaacaaggttgtcctttgtggagggtcttctcgaatcccaaagctacagcaactgattaaagatcttttcccagctgttgagcttctcaattctatccctcctgatgaagtgatccctattggtgcagctatagaagcaggaattcttattgggaaagaaaacctgttggtggaagactctcttatgatagagtgttcagccagagatattttagttaagggtgtggacgaatcaggagccagtagattcacagtgctgtttccatcagggactcctttgccagctcgaagacaacacacattgcaagcccctggaagcatatcttcagtgtgccttgaactctatgagtctgatgggaagaactctgccaaagaggaaaccaagtttgcacaggttgtactccaggatttagataaaaaagaaaatggattacgtgatatattagctgttcttactatgaaaagggatggatctttacatgtgacatgcacagatcaagaaactggaaaatgtgaagcaatctctattgagatagcatcttagtgttttagagaaatcaagaatttttaaaaacaagaatatcaacatttggttttgtgtataagtggtgtttgtattaaaatacttttcaatgaactgtataaactatgttttattaaactacaatatatcagt

SEQ ID NO: 72361 - DNA, 885 bp, Homo Sapiens
ggggctggcgggaacgtgaagctccgcggtgcctgatggggccgttgggcggccggtagctgttgctgttgggggaccccctcattcctgccgctgccgtccctgctgcctcatggcggccatcggagttcacctgggctgcacctcagcctgtgtggccgtctataaggatggccgggctggtgtggttgcaaatgatgccggtgaccgagttactccagctgttgttgcttactcagaaaatgaagagattgttggattggcagcaaaacaaagtagaataagaaatatttcaaatacagtaatgaaagtaaagcagatcctgggcagaagccagaaatgcggtccttggacctggcttctcagcaattatccctgagagggaagatcctggagatatcctgagagcacacagagcttccccacaccttcagacttgcaccttgctgtccagaagctgcctagccctcctttccaacccacaatggccagtgccaatagcagtgcgggcatccggtggtccagacaggagacacgaactcttctccccatactaggcgaggcagagtatattcagcgcctccagactgtgcatcacaatgcagatgtctatcaggctgtgtctaagcgaatgcagcagggagggcttccgccgcaccgaacgtcagtggccgcttccaagtttaaaggtctgaaaggcattatatttaaaaggcctatgttgcccatgccacaagtatgggtgagccaacacactgtccatttttatgatacgttggatcagctttctccgaaatcagatagtgactgacccagacaacttaatgggagggatgctgcttgggccaagcactgtgatcagaacttagtggcctttggaggcca

SEQ ID NO: 72362 - DNA, 1115 bp, Homo Sapiens
  misc_feature (44)..(78): n is a, c, g, or t
aactggacgagcgcagcgagctcattgagcgaggaagcggccgnnnnnnnnnnnnnnnnnnnnnnnnnnnnnnnnnnncagtcgacggtaccggacatatgcccgggaattcggccattacggccggggagtaagaagccagcagggctggtgctggggcttcttctcctgaaggggctgcaagagggaaggcttagccatgtcgtccttgatcagaagggtgatcagcaccgcgaaagccccaggggccattggaccctacagtcaagctgtattagtcgacaggaccatttacatttcaggacagataggcatggacccttcaagtggacagcttgtgtcaggaggggtagcagaagaagctaaacaagctcttaaaaacatgggtgaaattctgaaagctgcaggctgtgacttcactaacgtggtgaaaacaactgttcttctggctgacataaatgacttcaatactgtcaatgaaatctacaaacagtatttcaagagtaattttcctgctagagctgcttaccaagttgctgctttacccaaaggcagccgaattgaaattgaagcagtagctatccaaggaccactgacaacggcatcactataagtgggcccagtgctgtgtagtctggaattgttaacattttaatttttacaattgatgtaacatcttaattaaccttttaattttcacaattgatgacagtgtgagtttgatgaaaatatctgaagctattatggaaataccatgtaatagggagagttgaacatgaatattagagaaggaatccagttacttttttaaattacacctgtgtgcacctgtattactgaatataggaaagagatacccattacatagttactcagtaaacaaaagagaaataccaggtaggaaagaagagttactattcctgagaaataatcaagaacatatttaatttaaactaatgatgtgaactatttagttttgatgtccgttatgtgattctgcttttacttgagtaaaattaaagtgtttaaatttgagatcaaggagaagatagtggaacaaaatgttatatagataatatttttctaatggaaataaaataggcagatttccttta

SEQ ID NO: 72363 - DNA, 1639 bp, Homo Sapiens
  misc_feature (833)..(833): n is a, c, g, or t
ctaggctacgggccacgcgccgctgcgctgccgccgccactgtcctcttcggaggcgcgggcccgacggaaaccatgtttgtggctcgcagcatcgcggcggaccacaaggatctcatccacgatgtctctttcgacttccacgggcggcggatggcaacctgctccagcgatcagagcgttaaggtctgggataaaagtgaaagtggtgatttggcattgtactgctagctggaagacacatagtggatctgtatggcgtgtgacatgggcccatcctgaatttgggcaggttttggcttcctgttcttttgaccgaacagctgctgtatgggaagaaatagtaggagaatcaaatgataaactgcgaggacagagccactgggttaaaaggacaactctggtggatagcagaacatctgttactgatgtgaagtttgctcccaagcacatgggtcttatgttagcaaacctgttccgcagatggtatagtaacgaatctatgaggcaccagatgttatgaatctcagccagtggtcttttgcagcatgagatctcatgtaagctaagctgtagttgtatttcttggaacccttcaagctctcgtgctcattcccccatggatcgccgtaggaagtgatgacagtagccccaacggcaatggccaaggttcagatttgggaatataatgaaaacaccaggaaatatgcaaaagctgaaacgtctgatgacaggtcactgatcctgttcatgatattgcattcgctccaaatttgggaagatctttccatattctagcaatagcgaccaaagatgtgagaatttttacattanagcctgtgaggaaagaactgacttcctctggtgggccaacaaagtttgaaatccatatagtggctcagttcgataatcataattctcaggtctggcgagtgagttggaatataacaggaacggtgctagcatcttcaggagatgatgggtgtgtaaaattgtggaaagctaattatatggacaattggaaagtgtactggtatttttgaaaggtaatgggagcccagtcaatgggagttttcagcagggaacctcaaatccttccctaggttcaaatattccaagtcttcagaattcattaaatggatcttctgctggcagaaagcacagctgagtacaagctaactggagtaactttgctgttttgctgcttgttgcatgcacacaggaatggaaagcgagctccttttccccttccccagcgccgtttgacctctcccaagatacaccagcagcctgcttactactaaacgcaatccaaaaggcctttaaaaatacagtgtatattttttgtactagtcagtttattgacactatttgaaacttttgaaatataaacggagaggctttctgttgagacattgtcaccaaaacaattttttgaaatgttcctgaaactaatttgggtttaaagattaaaagggttgttaccattcttatctgagtagttgggaggaggggaataccactttagttcatttggaaaatatagacatatttcttttgctttcttaaaacagcttaaaatgatgaacttttataattttaatttgaagattgaataaatattttttataaagattaaa

SEQ ID NO: 72364 - DNA, 731 bp, Homo Sapiens
  misc_feature (85)..(115): n is a, c, g, or t
aggaaagcgaggtggacattcatctgtttccacttgagtctgagtcttcaagttttcactccagctaacacagatgtaaaagacnnnnnnnnnnnnnnnnnnnnnnnnnnnnnnnaagttacacatttttcagatataaaagactgaccaatattgtacagtttttattgcttgttggatttttgtcttgtgtttctttagtttttgtgaagtttaattgacttatttatataaattttttttgtttcatattgatgtgtgtctaggcaggacctgtggccaagttcttagttgctgtatgtctcgtggtaggactgtagaaaagggaactgaacattccagagcgtgtagtgaatcacgtaaagctagaaatgatccccagctgtttatgcatagataatctctccattcccgtggaacgtttttcctgttcttaagacgtgattttgctgtagaagatggcacttataaccaaagcccaaagtggtatagaaatgctggtttttcagttttcaggagtgggttgatttcagcacctacagtgtacagtcttgtattaagttgttaataaaagtacatgttaaacttacttagtgttatgttctgatttctgttgacattcttttggctagtagaagacaaaagtaatacatttatggtatgcaaagcactatcctaggtatttcattgtaatattttacttaccccttatcacaactctgatagattct

SEQ ID NO: 72365 - DNA, 1499 bp, Homo Sapiens
  misc_feature (1308)..(1416): n is a, c, g, or t
gctgggtggcgaattcggcacgagggcgctccgaggagcggcgcaagtggtttgaggccacagacagcaggaccccagaggtgcctgctggtgaggggccgcgccggggcctgggtgcccccctgactgaggaccagcaaaaccggcttagtgaggagatcgagaagaagtggcaggagctggagaagctgcccctgcgggagaataagcgggtgcccctcactgccctgctcaaccaaagccgcggagagcgccgagggcccccaagtgacggccacgaggcactggagaaggaggttcaggctcttcgggcccagctggaggcgtggcgtctccaaggggaggctcctcagagtgcactgagatcccaggaggatggccacatccccccgggctacatctcacaggaggcatgtgagcgcagcctggcagagatggagtcctcgcaccagcaggtgatggaggagctgcagcggcaccacgagcgggagctgcagcgcctgcagcaggagaaggagtggctcctggctgaggagacggcagccacggcctcagccattgaagccatgaagaaggcctatcaggaagagctgagccgagagctgagcaaaacacggagtctccagcagggcccggatggcctccggaagcagcaccagtcagatgtggaggcactgaagcgagagctgcaggtgctatcggagcagtactcgcagaagtgcctggagattggggcactcatgcggcaggctgaggagcgcgagcacacgctgcgccgctgccagcaggagggccaggagctgctgcgcccacaaccaggagctgcatggccgcctgtcagaggagatagaccagctgcgcggcttcattgcctcgcagggcatgggcaatggctgcgggcgcagcaacgagcggagttcctgcgagctagaagtgcctgcttcgcgtaaaagaaaacgaactccagtacctaaagaaggaggtgcagtgcctccgggacgagctccagatgatgcagaaggacaagcgcttcacctcgggaaagtaccaggacgtctatgtggagctgagccacatcaagacacggtctgagcgggagatcgagcagctgaaggagcacctgcgtcttgccatggccgccctccaggagaaggagtcgatgcgcaacagcctggctgagtagaggtcccgcccagctgcagaccctccaggctggaggaccagccgccctccttccctcctggatggaagtaaaaagccaagctttctccccaccctctgtgggccacacgtgcacttgcacccacnnnnnnnnnnnnnnnnnnnnnnnnnnnnnnnnnnnnnnnnnnnnnnnnnnnnnnnnnnnnnnnnnnnnnnnnnnnnnnnnnnnnnnnnnnnnnnnnnnnnnnnnnnnnntgcatatctgagcacgcccctcgcactgggtctcaccttgcaccttcttcaggattttatatgtgaagagatttttatataga

SEQ ID NO: 72366 - DNA, 622 bp, Homo Sapiens
  misc_feature (433)..(539): n is a, c, g, or t
cgcagggcatgggcaatggctgcgggcgcagcaacgagcggagttcctgcgagctagaggtgctgcttcgcgtaaaagaaaacgaactccagtacctaaagaaggaggtgcactgcctccgggacgagctccagatgatgcagaaggacaagcgcttcacctcgggaaagtaccaggacgtctatgtggagctgagccacatcaagacacggtctgagcgggagatcgagcagctgaaggagcacctgcgtcttgccatggccgccctccaggagaaggagtcgatgcgcaacagcctggctgagtagaggtcccgcccagctgcagaccctccaggctggaggaccagccgccctccttccctcctggatggaagtaaaaagccaagctttctccccaccctctgtgggccacacgtgcacttgcacccacnnnnnnnnnnnnnnnnnnnnnnnnnnnnnnnnnnnnnnnnnnnnnnnnnnnnnnnnnnnnnnnnnnnnnnnnnnnnnnnnnnnnnnnnnnnnnnnnnnnnnnnnnnntgcatatctgagcacgcccctcgcactgggtctcaccttgcaccttcttcaggattttatatgtgaagagatttttatataga

SEQ ID NO: 72367 - DNA, 661 bp, Homo Sapiens
tctttcttcttccccaccccttaattttaactttgtggtaactgagtgcccccgcgtgcctgcgtgttgagtgtgtgggcggcagtgccgttccggaggcctggtccatctggagttttgaggggtgaggggaccagagcagtgggaccagcatggggatcagcttcccttccccacctggagccagggactgtccgggtagccagttttggtcctgccagctgcctccctgatccctccccactctcgccccttctctatgaacttaaatcaaaaaccacttccctccatctcctcctgctcctgcgtggagggggaatgtgtgctggctagggtggaggactgagcacctgagcctggggctggctccccggggtccccgactcagctggtggctgtggagctgagtcccctccccgtaacctctgcaaggccagcacccaccatcactacctgcacctgctgtggtcccaccctctggaggcctgggaacctggctgcagcctgggaaggctggagaggcagacggtgggacccaccagctctctccccatcccgcttcttccctgggggccaggccctacctgtgtggtggtgggtgggctgtcaagacgtgtcatgtacatttgtatcaaaaataaagaagtgaccatgagctgtt

SEQ ID NO: 72368 - DNA, 766 bp, Homo Sapiens
  misc_feature (165)..(165): n is a, c, g, or t
cagaaccctgattttaattatattccctgctgcagacattagccttctttaattcttttgccattacatacatgtttcggctacagactgaacacgaactaaagtccctaaggaggaaaaaaccttaacatattcctgagatgtgattcttttattacttctttntgcaaagctaattatcaaatgatttgattaaacctagacgcattaggaaatgcaagttttacctaaaacttgcagaaatttaaacacatttccatttacttactaacgaacagacctgatttttatttaaaaacacaatttagctttgccaacagaagagtaaaggaaaccataacttataaatttgtaatgtgttcctccttgttggagacattagccagtgtttagttttagaccaacttatacaaacagagtattgatttgtacacattctggagacttgctatatcatggtttgctatggcacagactcagcttagcatggggacattttgaacttcattcaaagttgagtagttactggaacctttgacattgccttgtaatgaggtacttccaaaaaaagacccctaacaatggcataatagtgaggtctctctgtgcatatacataatatatatgcaggataaatgtgtgcaccaatcaaatctaaaattttatgtgactgtcaaatgaatattatttgggttaagatttttcatttctgatttggatagaaaattgctattaatcttgtattaaaatagtttttaaaaatcta

SEQ ID NO: 72369 - DNA, 372 bp, Homo Sapiens
gatatatttatttgatttatttacataaccagtagaaaggagattttaaaaatatttattacatttgttgcgtagaaatcatagaaaataaaaattgatacaattttgatatacaactttagaaaggcatatttatcctttcacaccagagaagtttatgcaatgccagacatggaaataccaaagccactggtgacaaagggtaaacgctactgatagaagaaagccttgtccatttttatagttttcttctctaccattattaatttttgagcaaataccagtccagtggaaagagttctgaacataaaaggcacctagagtaaaaattagaccttaactaataaaacagctgtacacgtttacatcaag

SEQ ID NO: 72370 - DNA, 1145 bp, Homo Sapiens
gagggactggccggcactgtgactcccacggtgtcttcctggtgcgccagagtgagacaaggcggggtgaatacgtcctcaccttcaacttccaggcaaggccaagcacctgcgtttgtcgctgaacgaggagggtcagtgccgggtccagcacctgtggttccagtccattttcgatatgctcgagcacttccgggtgcaccccatccctttggagtcgggaggctccagtgatgttgtccttgtcagctatgtcccatcctcccagcgacagcagggccgggagcaggctgggagccatgcgggggtgtgcgagggagatggatgccaccccgatgcctcctgcaccctcatgcccttcggagcgagtgactgtgtaaccgaccacctcccatgacccaccccagccccttgaacccccttcatggacagatcccccacagcctggggcagaagaggcgtcgagggcgccagaagtggcggcagcagcagccgcagcagccaaagagaggcaagagaaagagaaagcgggcggtggaggggtcccggaagagctggtccccgtggttgagctggtccccgtggttgaattggaagaggccatagccccaggctcagaggcccagggcgctgggtctggtggggacgcgggggtgcccccaatggtgcagctgcagcagtcaccactagggggtgatggagaggaagggggccaccccagggccattaacaaccagtactccttcgtgtgagccaaccccacccgctccaccctttttaaaccccccagccctgctcgtgagattgggctgggtagggacagaggaggccgaaatccctcccccatgcttcctgacccttgttggccaagggcatctttgatggtacaagcagaggctcgggagaggctcccgtcacacactacaggtcccctccccagggcaggggatttgggctccatgagctccttgaggggctcttctggtcagccccaccctgggggccatttccccattaactacccccagcccgaggcagggtgagggggaagggctgtcagttacattaaggtggttgttgttgttgttttaaacaaaatggagaagcataaataaataaaaaggtttatctcggttctatcgtga

SEQ ID NO: 72371 - DNA, 828 bp, Homo Sapiens
  misc_feature (61)..(169): n is a, c, g, or t
  misc_feature (201)..(212): n is a, c, g, or t
gtgccaagctaaaattaaccctcactacaagggaataagcttgcggccgcatacgcggtcnnnnnnnnnnnnnnnnnnnnnnnnnnnnnnnnnnnnnnnnnnnnnnnnnnnnnnnnnnnnnnnnnnnnnnnnnnnnnnnnnnnnnnnnnnnnnnnnnnnnnnnnnnnnncacagctactgtgagtttctgtttatcccccnnnnnnnnnnnnaagcccattgtttattctttgagaatttgttgtaacttcttcaggataacacctgagtccacaggctgagcagctgtggcccagacagaactgctccggcttggctgttccagcaggtggggcgctggcctcggtgagggcacagcagcaaggttcacggatatccgtgtgtcttgtctgtggccaccaggcacaggtttggcttccggtcagtgtcccgacactgtgcgggaggtgacaacagagcaaagcagcgcaggggtcagggaggtggagacactgctgaaatcacactaccccaccctcagctgaagccccacgttccacaaacttggggtcatagattgtccagtcactggctccctccctgtcagcacagcacagaggaaggggctaactgaatcttttaccacttctggcctggctccagaactttgttctagattccttaaaagtcggtagctgatgtcaaactcaattgagcagtagctttgatcccttggtctgggggtcgaaggaagatggcgctgttatcagcggggaaatgtactatttaagatcagctttgttgtaaaaccatttgttctagaataaaactcaattggaaacgtgaaaa

SEQ ID NO: 72372 - DNA, 734 bp, Homo Sapiens
aacagatatacaggaccaaagctctacaaagaacccagtgcaaaatccaataagcacataatacaaaatgctttagctcattgctgtttggctggaaaagtaaatgaaggtcagaagaaaaaaatactggaggaaatggagaaatcagatgccaacaacttcttaatcttgttccgggattcaggatgccagttcagatctttatacacttattgcccagaaactgaagaaatcaataaactgactgggataggccctaaatctatcactaaaaaaatgattgaaggactttacaaatataattctgacaggaaacagtttagccacatacccgctaaaactttatctgccagtgttgatgcaattaccattcatagccatttatggcagaccaaaagaccagtaacacccaaaaaacttttacccactaaggcatagaagttgggaaatacttgcttcagaacattcatggtaaatttgcacttcatctttcctgcctatagaaaatctttctaattgccaacaagacttttattaattaaaactggacattaagctctgttgtcatgaacaactggaatgtaaaccacagtattttggagtgcagaacattctcaattaagtgataagtccaaatgatgaaggaaatgttttaattcacaaatggagatttgtatgtgttatcaggttcacctgcttgatattagatacattaaagcactgaattttcatgg

SEQ ID NO: 72373 - DNA, 995 bp, Homo Sapiens
  misc_feature (182)..(182): n is a, c, g, or t
  misc_feature (237)..(237): n is a, c, g, or t
gcgccccaaccattctgggcaaaattcccaccctcaagtcctcaccagactgatcgagttttttgtcctggacagtgacctatttgttggaagagacgccacatttgaggaaggtatcccagacagcccgtcccccacaagaagagggtgcggcagcccccgggcccaggagtggacgttgntgctgggacagtcgacatacaggagagctgcaggagtgcagcgaggtgcagagcntgagacatgcccgcccccctgagcagagccgcagcccaggcccagtgctcggccatggccccttgggctcccggggcccgcgctgctcttcttcctcctgtgcccttcgtcgtccagtggctcttccgaatgtttcggacccaaaagaggtgactgtcagtggagggtctctgcagccaactgagactatcttgctgtgccctgagccttcctagggtttagaagaacagcattcaaaattccccgtcctgtcagtgtttgccttcgcacctcctcccctaaagcagcgcggggggcaaataagacccccacccctccctgcagcttcacagggacgcttccttccctccccgcaaccaccccaggctcccctgggaggctgcagttgtggtacacgtccccggtgctgggttggccgtgactcgggggcggggcgatcgggtctcagcccctgccttccccagtctctgggtcacccgaattttcccacccctgcttctccccgaggaggttgagctcttgagcaagttgggacttgggccggggcctggaagaatgattggctgggaggccgcgggagggaggccaggaggcccggaccagttgggaggagtgagcaggccccgggggagggggatgagcgcagtttgctcgctttcctcccctgccggccccctccgcccccacacacactcgggacgtcttcattgaagattcacttacaaaggaatgtttcactaaataaaagaaaaccagaa

SEQ ID NO: 72374 - DNA, 580 bp, Homo Sapiens
  misc_feature (141)..(176): n is a, c, g, or t
gctaaagaaccaacgaaatgaaaaggtatcaggaaaaaaagatcaggaagttgtattcaggtacaaatctttttttaaataagtattttgttgaggttgaagaattgctggcaattaaaagaatagagctaattatggctnnnnnnnnnnnnnnnnnnnnnnnnnnnnnnnnnnnntattatggtgctcaacacttgttactgcaagctaccttaatttcccaagagtggtgccttactctgttttttctgatatggtcttccaatcagtgtgtgtaacatacctgttgtttatcagccattgtaggtggctgtgtctgttgcatcatcataagaagtttaagctttgtgctctgataaattgtgttctgttaaagaggttagtaggatgaaaacagcaaaacaataattttttcaacaaattgtaaattataagaaaaagagttggtttgtgtacaacaattttaatgattcccttgttcatttttgctgtgaaatgcactgaaaaaaatcctcaaaatgagttatagttcctgtgttgggaaaattgacaaataataaaactagagaaaaaacaaaaa

SEQ ID NO: 72375 - DNA, 595 bp, Homo Sapiens
tttttgcgcgaaatttaaatgctaaagaaacaacgaaatgaaaaggtatcaggaaaaaaagatcaggaagttgtattcaggtacaaatctttttttaaataagtattttgttgaggttgaagaattgctggcaattaaaagaatagagctaattatggctttcatcattcattcatgtatttattgagcacctacttattatggtgctcaacacttgttactgcaagctaccttaatttcccaagagtggtgccttactctgttttttctgatatggtcttccaatcagtgtgtgtaacatacctgttgtttatcagccattgtaggtggctgtgtctgttgcatcatcataagaagtttaagctttgtgctctgataaattgtgttctgttaaagaggttagtaggatgaaaacagcaaaacaataattttttcaacaaattgtaaattataagaaaaagagttggtttgtgtacaacaattttaatgattcccttgttcatttttgctgtgaaaagcactgaaaaaaatcctcaaaatgagttatagttcctgtgttgggaaaattgacaaataataaaactagagtacaaac

SEQ ID NO: 72376 - DNA, 3523 bp, Homo Sapiens
  misc_feature (1403)..(1417): n is a, c, g, or t
  misc_feature (3348)..(3348): n is a, c, g, or t
  misc_feature (3353)..(3353): n is a, c, g, or t
  misc_feature (3357)..(3357): n is a, c, g, or t
  misc_feature (3365)..(3365): n is a, c, g, or t
tgcagtgtgtatgcagtttgtgcgaaaggaaaacctactctctctggcctgtcagcaccagttttgccgcagctgctgggagcagcactgctcagttctcgtcaaggacggcgtgggcgtgggagtctcttgcatggctcaggactgtccactccgtacaccagaggactttgtgtttccattgcttcccaatgaagaattgagagagaaatacaggcgctacctcttcagggactatgtggagagtcattaccagctccagctgtgccctggtgcagactgccccatggttattcgggtacaggagcctagagctcgccgagtacagtgcaatcggtgcaacgaggtcttctgtttcaagtgtcgtcagatgtatcacgcacccacagactgtgccacaatccggaaatggctcacgaagtgtgcagacgactctgaaacagccaactacattagtgctcacactaaagactgtcccaagtgcaacatctgcattgagaagaatggaggctgcaatcacatgcaatgctccaaatgtaaacacgacttctgctggatgtgtctaggagattggaagactcatggcagtgaatactatgagtgcagtcgttacaaggagaatcctgacatcgtgaaccagagccaacaagcccaggcgagggaagccctcaagaagtacttattctactttgagaggtgggaaaaccacaataaaagcttgcagctagaggcacagacataccagcggattcacgagaagattcaggagagggtcatgaacaatctggggacatggatcgactggcagtacctacagaatgctgccaagctcttggccaagtgtcgatacaccctgcaatacacctacccatatgcatattacatggagtccggacccaggaagaagctgtttgaataccagcaggctcagctggaggctgagatcgaaaacctctcatggaaagtggagcgtgcagacagctatgacagaggggacttggagaaccagatgcatatagcggagcagcggaggagaaccctgctgaaagatttccatgacacctaagttgggatgtggatgtgccggggtgaggaagatgtggctgcaaggtctcccggctgccatactgcatgctgcaggctctgcctttcatgaccccaggcaacagccagggccccactcctgagagacactggcaacacctcttagttgatttctgttttcttctcttttcactttttgtttctaccagggtagaggccatgttgaactggcctcttttcaggacttttatttccccctggatggttgttgggagggagggaaagtgttttctgaatggctattaatagtattagatcattacaacttatgtaactttcaaaggttgtacaattatacnnnnnnnnnnnnnnnggcaaactataggataacacagagccctttttgaaaataaattggcattggagtgttttaccctctagctgttttacttagaatgtaacatatgctgcctacccacctcaaaatgtctgtactgcaagagggccctgggcctctgctttccatattcacgtttggccagagttgtagtcccaaagaagagcatgggtggcagatggtagggaattgaactggcctgtgcaatgggcatggagcacaaggggtcacagcatgcctcctgccttaccgtggcagtacggagacagtccagaacatggtcttcttgccacggggtgttgttgtctctggtggtgctgcatgtctgtggctcacctttattcttgaaactgaggtttacctggatctggctactgaggctagagcccacagcagaatggggttgggcctgtggccccccaaactagggggtgtgggttcatcacagtgttgccttttgtctcctaaagatagggatctacttttgaagggaattgttcctcccaaataaatttgctttaccttggtccctttcttttgtgccagtattcaagtggtatagctctgagcaaggtcacatttgggccaaacctgacactgtcttgctgcattctcctttggcaaacatcagggtcagaattcaggatagcccttcctagggcactggactttctggcatgggggctgtgtttgcacaagttattttcatgttacctggagagtgtccagaggctgctctgaggctgaggtgtgttcccccttgcctggttccagctgtcagagggataccatcctagggtctgggaatccaagggccacgagactccttggtttgtggtccgagatcctgtactaaggagggtctggccagaggaacagaccagcttttgcacaatgaagcgcaagggaacaagtggtttgcctggtgtcctacctgtcctgaacctggtcctgtgggccattgaaaagttagatctgtgatctctggggtttttgtggctttgttcaatgcttccactctagggcaggcagagcagtctatactctcccaagcctgcttgacctccaagtagagctgatacagagatctgtgaatattgtgatagaaattctttggtattcatacatttcagctgcaagtcagcaatttcccaggtaccatgtaagctataaaacagtcattcttaaagacagaggatagctgtgactcatgggatcatgaggtccatggctggttgcaggttccctttttccttcctcaggttttgtctcttcctgtgttgtccccagcaagggagagactgtggggtggattgggagaacagattaggagtatagcaaatgaacccagaatggaacagtggggagctaactgtgaatgaggagagtacctgctgcaggacctggaggtcaggtgtgaatgctgtattggcacagggaataaatatcctggcgtctggagccttcacctctccgtcaagtccttcctgtgatactgccatggcacaggatctgagttgcagctctgcaccctaaatcacaccctgggcattgtctgggctgcagggctgccaggttctgtacttgtgtccagctgtggccctggatgctggagctggagggttttctgtgctcagactgtagcctgtagctcttggcctgtgtagagccccctcctgtgccctcagtggctgtcgtttgttaacatcatcaggaagatgggaaaggtcaggcagaatttttctgccctacaaagggtggaagagaaaggacacagtattttcatgaatttaccatatatctttgtttttcttcaacgaaaaagttaattgaggcaatgtcatctgctcaaagttgagtggtttattcacaataaactgtaagtttctgattttggcacaccacanaatgngaangagaaganagattcttggcgggccgccctcggcccctggaaaaacttttcaaaacccttcctttggggggccggggccccattaaggaaagggaaaaagggctcaataactggtttccaaaggaaaaaccgcgggcaagtgaaaaggggctttggagttccccccc

SEQ ID NO: 72377 - DNA, 444 bp, Homo Sapiens
ctttctgtcctcacaatctgttcccatagtatcatcttagtagtcagatttggataggcagtttctcccagggagccctttagaagcccaaagagccccatgcataatggtctctaagcatagtagaccatcaggggcctagctttgcagagtcctcagggctcgagtcctgttgccccagaagggtagagcgatctggcagtaagcatacagctgctctggacaggttagaaggatggactgaagaagacctgctcttgcactttggggaataagttagaggagtctgtggccatgtcctgccagcaaggtgtctatcctgaactcctgtgtagacctctgcaccttcatgggactcctgtggttttcttcttcttctgtgcccgtggcagtacggagacagtccagaacatggtcttcttgccacggggtgttgttgtctct

SEQ ID NO: 72378 - DNA, 1480 bp, Homo Sapiens
  misc_feature (1132)..(1200): n is a, c, g, or t
  misc_feature (1204)..(1204): n is a, c, g, or t
  misc_feature (1216)..(1294): n is a, c, g, or t
  misc_feature (1296)..(1297): n is a, c, g, or t
  misc_feature (1302)..(1302): n is a, c, g, or t
  misc_feature (1304)..(1304): n is a, c, g, or t
  misc_feature (1310)..(1347): n is a, c, g, or t
  misc_feature (1373)..(1415): n is a, c, g, or t
gggctggtacgctccggatgttcccgggatatcgtcgacccacgcgtcgccacgcgtcggggcatgagtagatgctcagtaagtggtgcacagggttggtccctatggtggaggccccctaacaccgcccaacccccctccatgttctcacagctccacgcactgagcacgggcatgaaggccatgatgtcagaattctgcacccagggagctgagatgtgccgcagggcctgtggcggacatggctactcaaagctgagtggcctgccatcactggtcaccaaattgtcggcctcctgtacctacgagggtgagaacacagtgctctacctgcaggtggccaggttcctggtgaagagctacctgcagactcagatgtcccctggctccacgccacagagatctctctctccatctgtcgcatatctcaccgcacctgacctggccaggtgtccagcccagagggcagccgacttcctctgcccggagctctacaccacggcctgggcacatgtggcagtaaggctcataaaggactcagtgcagcatttacagaccctgacgcaatccggagctgaccagcacgaggcttggaaccagaccactgtcatacacctccaggctgctaaggtgcactgctactatgtcactgtgaagggttttacagaagctctggagaaactagaaaatgaaccagcgattcagcaggtgctcaagcgcctctgtgacctccatgccatacatggaatcttgactaactcgggtgactttctccatgacgccttcctgtctggtgcccaagtggacatggcaagaacagcctacctggacctgctccgcctgatccggaaggatgccatcctgttaactgatgcttttgacttcaccgatcagtgtttaaattcagcacttggctgttatgatggaaacgtctacgaacgcctgttccagtgggctcagaagtcaccaaccaatactcaggagaaccctgcctatgaggaatatataagaccacttttacaaagttggagatccaagctatgaaataaccaacagtattcaagaagcaaccagcaccatcatgtgataatggtactatggcatatatgcaacattaaaattttaaattagnnnnnnnnnnnnnnnnnnnnnnnnnnnnnnnnnnnnnnnnnnnnnnnnnnnnnnnnnnnnnnnnnnnnnaaanaacaacaccaannnnnnnnnnnnnnnnnnnnnnnnnnnnnnnnnnnnnnnnnnnnnnnnnnnnnnnnnnnnnnnnnnnnnnnnnnnnnnnanncccananacaaannnnnnnnnnnnnnnnnnnnnnnnnnnnnnnnnnnnnnaaaaaactttttttaacccctctctnnnnnnnnnnnnnnnnnnnnnnnnnnnnnnnnnnnnnnnnnnncatctttgtcgtttctccaaaaaacaacgcggccacaaaaagaaggggtggtttttttcccccac

SEQ ID NO: 72379 - DNA, 696 bp, Homo Sapiens
  misc_feature (39)..(39): n is a, c, g, or t
gatacaaaaaggactgatgaaagggagacgtgattcttntgaaagattaattcacagaatttttatcacagttgaaatatcaattgcaataacaactgaaaactgattgctattactgaacactgcccttaggtggctcactcttagaagacacaaagtcactggactacaatcctttagggcagggattgtgtctcttgctcgttgtatatacatggttcttacacagtgcctggcattcaaaaaatgcattcagaaaaatttggtattcaaaaaatgcttgatgaattgactgactgcctgaatgaataaataaattggtggattaatgactgaatggagtacagaagactgtggtcccagaagaccttaacattgagcttgctgcagactgaatgtttgcctcctctcaaaattaatatgttgaaacctaatccttaatgtgatagtattaggatgtggggcctttggaaagtgattaggttatgaaggtggagccctcgtgaatgggagtagtatccttataaaagataccccagagaggtcccttgtcccttccaacatgtgaggctacagtgaaaagatggccatctgtaaaccaggaagtgagtcctcaccagataccacatctgttgtgctttgatcttggatttccctgtccccacgaactgtggtaaataaatttctgttgtttgt

SEQ ID NO: 72380 - DNA, 1247 bp, Homo Sapiens
  misc_feature (165)..(173): n is a, c, g, or t
  misc_feature (342)..(350): n is a, c, g, or t
cagtcgacggtaccggacatatgcccgggaattcggccattacggccggggggccagccacatgccatcttccctgcgatcaggcaaaaaagtggaattaaaaagtcaaacctttatatgcatgtgttatgtccattttgcaggatgaactgagtttaaaagaannnnnnnnnctcttcaagttgctttgtcttttccatcctcatcacaagcccttgtttgagtgtcttatccctgagcaatctttcgatggatggagatgatcattaggtacttttgtttcaacctttattcctgtaaatatttctgtgaaaactaggagaacagagatgagatttgacnnnnnnnnnttgaattaaaaataacacagtctttttaaaactaacataggaaagcctttcctattatttctcttcttagcttctccattgtctaaatcaggaaaacaggaaaacacagctttctagcagctgcaaaatggtttaatgccccctacatatttccatcaccttgaacaatagctttagcttgggaatctgagatatgatcccagaaaacatctgtctctacttcggctgcaaaacccatggtttaaatctatatggtttgtgcattttctcaactaaaaatagagatgataatccgaattctccatatattcactaatcaaagacactattttcatactagattcctgagacaaatactcactgaagggcttgtttaaaaataaattgtgttttggtctgttcttgtagataatgcccttctattttaggtagaagctctggaatccctttattgtgctgttgctcttatctgcaaggtggcaagcagttcttttcagcagattttgcccactattcctctgagctgaagttctttgcatagatttggcttaagcttgaattagatccctgcaaaggcttgctctgtgatgtcagatgtaattgtaaatgtcagtaatcacttcatgaacgctaaatgagaatgtaagtatttttaaatgtgtgtatttcaaatttgtttgactaattctggaattacaagatttctatgcaggatttaccttcatcctgtgcatgtttcccaaactgtgaggagggaaggctcagagatcgagcttctcctctgagttctaacaaaatggtgctttgagggtcagcctttaggaaggtgcagctttgttgtcctttgagctttctgttatgtgcctatcctaataaactcttaaacacataaaaaaa

SEQ ID NO: 72381 - DNA, 1621 bp, Homo Sapiens
tatgaaagagcccgagaactgctggtatcatacgaagaggagcagtttacggtgctggagaaatttaggtatttacctaaggccattaaggcgtggaataacccgtccccacgtgtagaatgtgtcctggcagagctcaagggcgttacatgcgagaacagggaggctgtgctggatgcttttctggatgatggcttccttgtccccacatttgaacagttggcagctttgcagatagaatatgaagatggtcagactgaggtccagagaggggaaggtactgacccaaagtcacacagtgtcccttacaaaccagaaaacgtggacttgaatgacgtcctggtgccaaagccgttctctcagttctggcagcccctgctcaggggcctgcactcccagaacttcacgcaggccctattggagaggatgctctctgaactgccagccttggggatcagcgggatccggcctacctacatcctcagatggaccgttgaactgatcgtggccaacaccaagactggacggaatgctcgccgattttctgcaggccagtgggaagcaagaaggggctggaggctgttcaactgctccgcctcccttgactggccccggatggttgagtcctgcttgggctcaccttgctgggccagcccccaactccttcggatcatcttcaaagccatggggcagggcctgccagacgaggagcaggagaagctgctgcgcatctgttccatttatacccagagtggagaaaacagcctggtgcaggagggctctgaggcctcccccattgggaagtctccatatacactagacagcctgtattggagcgtcaagccagccagctccagcttcgggtctgaagcaaaggcccagcaacaggaggagcagggcagtgttaatgatgtcaaggaagaggagaaggaggagaaagaggtcttgccagaccaggtagaggaggaggaagaaaatgatgaccaagaggaggaagaggaggatgaagatgatgaagatgatgaagaggaagacagaatggaggtggggcctttctctacagggcaagagtcccccactgccgagaatgctaggcttctggcccagaaaagaggagctttgcagggctctgcatggcaggttagctcagaagacgtgcgatgggacacatttcccctaggccgaatgccaggtcagaccgaggacccagcagagctcatgctggagaattatgacaccatgtatcttttggaccagcctgtgctagagcagcggctggaaccctcaacatgcaagactgacaccttgggcctgagctgtggtgtcggcagtggcaactgcagcaacagcagcagcagcaacttcgagggccttctctggagccaggggcagctgcatgggctcaaaactggcctgcagctcttctgatggccatccctggtgcaagtgttcatccagccgtgccagggcaacagcccaccccctagtacaactgatgctccctgagacaacctgggagacagcctggatcagccacatcaactcagttgtccaccacaggggaattttgaatgtcgttttgttattgttttgttttgaaaaataataaacaggcaactgt

SEQ ID NO: 72382 - DNA, 1419 bp, Homo Sapiens
tggtacggtccggaatcccgggatatcgtcgaccacgcgtcgcggacgcgtgggcggactgcgtgggcggacgcgtggggtggcggttcggcagtgagggtagcacgctgagctgaaggctgtgcggagcggcgcggcacagagcctgttgttgagctcagtatgtcgtgggaatccggggccgggccaggtctaggttcccaggggatggatctcgtgtggagtgcgtggtacggaaagtgcgttaaagggaaagggtcgttgccactctcggcccacggcatcgtggtcgcctggctcagcagggccgagtgggaccaggtgacggtttatctgttctgtgacgaccataagttgcagcggtacgcgcttaaccgcatcacggtgtggaggagcaggtcaggcaacgaactccctctggcagtggcttctactgctgacctgatacgctgtaagctcttggatgtaactggtggcttgggcactgatgaacttagactgctctatggcatggcattggtcaggtttgtgaatcttatctcagagaggaagacaaagtttgccaaggtccccctcaagtgtctggctcaagaggtaaatattccggattggattgttgaccttcgccatgagttgacccacaagaaaatgccccatataaatgactgccgcagaggctgctactttgtcctggattggctccagaagacctattggtgccgccaactggagaacagcctgagagagacctgggagttggaggagttcagggaagggatagaggaagaggatcaagaggaagataagaacattgttgttgatgacatcacagaacagaaaccagagcctcaggatgatgggaaaagtacggagtcagatgtaaaggccgatggagacagcaaaggcagcgaagaggtggattctcattgcaaaaaggccctgagtcataaagagctatatgaaagagcccgagaactgctggtatcatacgaagaggagcagtttacggtgctggagaaatttaggtatttacctaaggccattaaggcgtggaataacccgtccccacgtgtagaatgtgtcctggcagagctcaagggcgttacatgcgagaacagggaggctgtgctggatgcttttctggatgatggcttccttgtccccacatttgaacagttggcagctttgcagatagaatatgaagaaaacgtggacttgaatgacgtcctggtgccaaagccgttctctcagttctggcagcccctgctcaggggcctgcactcccagaacttcacgcaggcccctataggagaggatgctctctgaactgccagcactgggggatcagcggggatcccggcctacctacatcctcagatggaccgttgaactgatcgtggccaacaccaagactggacg

SEQ ID NO: 72383 - DNA, 876 bp, Homo Sapiens
cagtcgacggtaccggacatatgcccgggaattcggccattacggccgggggagacgcagagtcttgagcagcgcggcaggcaccatgttcctgactgcgctcctctggcgcggccgcattcccggccgtcagtggatcgggaagcaccggcggccgcggttcgtgtcgttgcgcgccaagcagaacatgatccgccgcctggagatcgaggcggagaaccattactggctgagcatgccctacatgacccgggagcaggagcgcggccacgccgcggtgcgcaggagggaggccttcgaggccataaaggcggccgccacttccaagttccccccgcatagattcattgcggaccagctcgaccatctcaatgtcaccaagaaatggtcctaatcctgagtcgtcacccttggattttatggatcacggagctgaccatctttacctggtcctggaactgaaaaactgtagcttgtgtgaaaatgagcctttggaccagtctttattaaaacaaacaaacatgagtagtctgcatatcgaatatctagagctctaaaccccccaatacttaaaagtctaattgctgtcctgtggtttcattagtctgataggaagatagggatttcctcagtcacagatgatattttgaaggaaagctgcaataaagccacaatgatttgaggtctttgcttaagtatgagatacttgatgggggctttatcatgcaacattagtttgcttaccttaagaattgcccaaaaatgaaagaaaatatgagcttttcagttaaacatactcctaaaaacattttccgggattttactactaaaattggacatttaagcgaagtaaaagaggccgggtgcggtggctca

SEQ ID NO: 72384 - DNA, 711 bp, Homo Sapiens
agatgtacatcaaagagataaatagagtgaagcagaactagtgggcggaccagctcgccagcaacagaagggttgtagtcggcctggcagtggacagggaggttggctagaactattaccttaggtcctgtgataatatccctgaatccaacttttcagaaagaaataggtaacatatttttcaccaggaagcttcacccagacactgaacagaatggtctcagtgcactaatggaggctcagttaaagggttgtggtagcacaaggaagagacattctgacttggaaatttggagaaggcttcacaaatgaaggggcatttgaaatgagctttgaaggtgcaagagtattccaagttgagaagacaacctgagtggtgttgggtgaacagtcattctacctggctgtagtgtagtatagtgtagtgtagtgtaggaaacatcagaggagtggagtgggatatgagcctggagagagctggcagccatggatcattgaaagccttgaatgtctgatggggaggttgactttattttgtaggcaatggaaagccaccagtggttttagttgagcagcaatgaaattaagcctgtgctttgcaaagattaatctagcagcaacagattggaagcaacaccaccattcctggtatcagtccaggtaaaatatattacagctctttactggagcaataacagtaatattagaagg

SEQ ID NO: 72385 - DNA, 1038 bp, Homo Sapiens
atgatgtctctgcacccgctcatatgtcgctgtttgttgatgtgcgtacattaccagacgttgactgtacgattatcgatccttaggattgcctgagccagatcgcacgagaaatagttctcattggtgttccaagtgattgtgctcaggcagtgcagcagggtgctgctgcctcagacattgtcgtgcagtctgagagtgtccactgccagattctctccagcagcaaaccagcctgggcttgcatgtgatcttgagcaacttaacgggtgaagctggctttctcccccctgtgactggagtgcatgttgacaccagcactttttctgcacatgtatcttcaatccaacaaaggccgtttttttaatgctgagtaacaggccaccaagcggctactgcgttatatcttctcagcaaccggccgcagtctcttttgcaccattttctacaccagacctgcttggcaccacagggagctcttttcctgccctgcacaatgacattccaaccaccaccagccagacattacagccaaccttgctgattgtcacaagcaggaccttggggccactggcactgtcagatagtaagccatttcttgggtagaggaggaaactcctctccacaaatccacttgggcctgtgcaaatggcacttgaaagagtccccatgcacttggagtccatgagccaatgggatatgcaaagacgcttaaacatttcagggctggtttctctgttcatatccaattctggtgcttaggaacagggacccatgctgatgcccaagggcaaaaagccccacttcctttaaggaagtgaacaggcctgaccctgatgcccaataacgggcaaccctaggctttttgtttttcttgcttttattcctttttgttgttggccttgtgctgcgtttgtttacaaaagatgtattttgtttaaccaaatattaaaaatggaaaactccatatatgtctccttgtctgcctgaattctataattgtgtaaagaaaaataaactttagtatgacgctgtttt

SEQ ID NO: 72386 - DNA, 1024 bp, Homo Sapiens
  misc_feature (35)..(35): n is a, c, g, or t
  misc_feature (48)..(48): n is a, c, g, or t
  misc_feature (185)..(185): n is a, c, g, or t
  misc_feature (420)..(421): n is a, c, g, or t
ttgtgattgacgtacatcaacggaacgttgctgtnggattatcgatcnttgggattgcctgggccagatcgcagagctttgtatatggagtcaccgcctacttttcagtgtgtagccattttctgtacttggaaacaaagagagaatagttctccatatgctgttccaaagtgatgtgtgctcanggcagtgcagggcagggtgactgctgccctcagatcaatggtcgtggcaggtctgagagctgtcccactggccagacttctctccagcagcaaagccagcctggggcttgcatgttgatcctgagcaagcttaacggggtgaagctgggctttctcccccctgtgactggagtgcatgttgacaccagcactttttctgcacatgtatcttcaatccaacaaggccgtttttttnnaatgctgagtaacaggccaccaagcggctactgcgttatatcttctcagcaactggccgcagtctcttctgcaccattttctacaccagacctgcttggcacccacagggagctcttttcctgccctgcacaatgacattccaaccaccaccagccagacattacagccaaccttgctgattgtcacaagcaggaccttggggccactggcactgtcagatagtaagccatttcttgggtagaggaggaaactcctctccacaaatccacttgggcctgtgcaaatggcacttgaaagagtccccatgcacttggagtccatgagccaatgggatatgcaaagacgcttaaacatttcagggctggtttctctgttcatatccaattctggtgcttaggaacagggacccatgctgatgcccaagggcaaaaagccccacttcctttaaggaagtgaacaggcctgaccctgatgcccaataacgggcaaccctaggctttttgtttttcttgcttttattcctttttgttgttggccttgtgctgcgtttgtttacaaaagatgtattttgtttaaccaaatattaaaaatggaaaactcca

SEQ ID NO: 72387 - DNA, 1163 bp, Homo Sapiens
  misc_feature (1101)..(1101): n is a, c, g, or t
aagcgaaaaataaagagcatagtgacaaaacacgtgtataccaagcaggctggtacggtccggaatcccgggatatcgtcgaccacgcgtacggactagttctatcatctttgatcgtgtcgtgtttctttgtgcattagggacagcagcttcctgtagcgaggaagcgtgtagtctatacaagtcatccccgcagcagcccattggatgctttgctgtgaaatacttacccggtcagcttggttttgaacctcagagaccatccactgtcttggacacctagaaggtggaacaaggaaagagattcgagaagtgagagagggtcgggggcggtggctcccaaagtgctgggattacaggcgtgagccaccgcacccggcagagttttataatgaaaaattaactaatattctagtatgaagtgaggaggatactgaacaggatgtggctaaagccaacctgggacagccatggggtggcttggttgtcttcactccagtgttgtccctaccatttcgcagcattgatttaggaggctctgggacaaaagagaagccaaagagcagttatcccagttcactcactctggcaaaatcaggaaaaaaaagtctgcttttgacatcaaattccactaatttggggcagcgttgggtgaggaaagtattgtgaagacaggcttcttggagtaggggcagccacaattcagtagacactctaggctcggaggctgccactgtagttgccaagctcaggttgggtggttctgtgctgtatggatggaataggacctgggctggtcatcttcatgtcgtttcctctctgtatcaatggaagttcaacccgcccctacctcttcagatagttgtaggccacttttctcttgtaactttggaaaacaaaagaggagaaataagtatcataccatatgcgtgtctccaaagtggatgtggttgcctcaaggcaggtggcaggcaggggtgacctgctggccctcagatcaatggtcgtggcaggtctgagagctgtcccactggccagacttctctccagcagcaaagccagcctggggcttgcatgttgatcctgagcaagcttaacggngtgaagctgggctttctcccccctgtgactggagtgcatgttgacaccagcactttttctgc

SEQ ID NO: 72388 - DNA, 915 bp, Homo Sapiens
  misc_feature (261)..(289): n is a, c, g, or t
  misc_feature (672)..(697): n is a, c, g, or t
aggtgacaagcaattgtattgtgcaaaacaatcactatacagcaacaaatacatttgcaaatttgattgaaaaacatgaactaactacaaccagccattgaagaaatgcctttctatggtaacaggcgtcatacttgtagatgggctgacatcccacctacaagtatgacacctgtgtaacaccagctaggtacggctggagaaggctgaagagagaatgccattaaatggaagaatgtactgattgtagtgaccttctcnnnnnnnnnnnnnnnnnnnnnnnnnnnnnctacagtaatacagcaagcgtggaataatcagccaatatataacattccatcagtattttattaaggaaataacctgaatgtggttgattttgacatagctgcaattacagttttcttctatttttcaagccacaataaggaaaataaactactcatggtctaaatactagagataaagtagattcatggcttggtaaggaaattttaagcattccttcaaagattgacgtgctaaaataagcattgatgttttgagtttttttacacctaggatttttagcttgggtgtgtaggtgaaggccaagactctctgcaggaaaaagcttattttcaaactcagaaaataaaatgtcaatcataaaaatctacttcaactttagcnnnnnnnnnnnnnnnnnnnnnnnnnntatactctgtatgctgggattccgaggttccaacacactgttacaaatctgtggggggtttctttcttctgataattctagagcctgttaccatagaaaggcatttcttcaatggctggttgtagttagttcatgtttttcaatcaaatttgcaaatgtatttgttgctgtatagtgattgttttgcaaaataaaattgcttgtcacctaactgctaa

SEQ ID NO: 72389 - DNA, 719 bp, Homo Sapiens
  misc_feature (35)..(35): n is a, c, g, or t
  misc_feature (66)..(67): n is a, c, g, or t
  misc_feature (92)..(92): n is a, c, g, or t
ctgacattaatattttatgtaagtctgaagtatantgggtgttaaatgcataccctatagttattnntgatgtgcttgctaaatttcatgtntaaaagtcacctcttttttagacttgtaaattacatatatatttcaaaaatggttcttaaagtatttcatgaaattaatgcatatctaatttcaaaattttccaccctctccatgtaatcagagctcaaaaaagatggtccaagaaggctccctagtggacacgctgcaatctagtgacaaagtcgaaaggtacctgttttccctacacactttcatacacaaactgttaattgcttattttgtcagccaagagaaacagatgtttgagattgcctgtaagaagttattgaatcagtcaaaattagtgactataaaaacaattgagttttttgacttgtgaaattgatcctgatataaattgtaaactagggcagaaaccccccagggaaggaattgagaacattatgaagatagcaaataaacttgacacaaatttttacattttaatttttatctttccctaatttagtttaacaggcttttctcatgaagaactagacgactcttggtaaccatgtttgctgcccagcttctaacttacataccgtgagaagttacgtaacatttactcctttgtaaatgtttccctatcatcagacaaaactcaataaaaatgtgtgtaatcc

SEQ ID NO: 72390 - DNA, 1118 bp, Homo Sapiens
  misc_feature (988)..(996): n is a, c, g, or t
ccttcttgggggtaacctcagacgcctctcttcacacccccttccaaaagcaaaaagaagcctcgaaagtgaaatgtatctggaaggtctgggcagatcacacattgcttcccccagtccttgtcctgacagaatgcccctaccatcacccactgagtctaggcacagcctctccatccctcctgtctccagccctccggagcagaaagtgggtctttatcgaagacaaactgaacttcaagacaaaagtgaattttcagatgtggacaagctagcttttaaggataatgaggagtttgaatcatcttttgaatctgcagggaacatgccaaggcagttggaaatgggcgggctttctcctgccggggatatgtctcatgtggacgctgctgcagctgctgtgcccctctcatatcagcacccaagtgtagatcagaaacaaattgaagaacaaaaggaagaagaaaaaatacgggaacagcaagtgaaagaacgaaggcagagagaagaaagaaggcagagtaacctacaagaagttttagaaagggaacgaagagaactagaaaaactgtatcaggaaaggaagatgattgaagaatcactgaagattaaaataaaaaaggaattagaaatggaaaatgaattagaaatgagtaatcaagaaataaaagacaaatctgctcacagtgaaaatcctttagagaaatacatgaaaatcatccagcaggagcaagaccaggagtcggcagataagagctcaaaaaagatggtccaagaaggctccctagtggacacgctgcaatctagtgacaaagtcgaaagtttaacaggcttttctcatgaagaactagacgactcttggtaaccatgtttgctgcccagcttctaacttacataccgtgagaagttacgtaacatttactcctttgtaaatgtttccctatcatcagacaaaactcaataaaaatgtgtgtaatccaatgtgggnnnnnnnnnccataattaattttgataccatagtgtgtgaaccaagaataatctagtcacgtgaaacctcttctccagtcatagtatttctcattcattataataaaagtaactggcttttaacctcaaaa

SEQ ID NO: 72391 - DNA, 710 bp, Homo Sapiens
  misc_feature (238)..(238): n is a, c, g, or t
gccaaatccctaagtgccgttcgggggccatgtgtgcagcatgactctccctgtctgtggcagagacccaagcgcttgcttaagccccagtgctccatgccagcacttgaactgtctggggtttgatggacagaggctgaggaatttcctggcttccccagatagtgtcctgggacatggtatgctttggggctggggtagcatggaatccctctgaggacctggatactggtactancggggtggggaagaggaaccttaaacttggctttccccagccttcagcctgagtctagcatgtttctagctccccagtcccttgtgaagccttgagggctggcagaagggttaggaggttgaactctagattcccttcctgtctttgccttccttttacccctttccctgcaacctccttgactctggcctgaatttgttggtgcctcagccttgggtggcttgtctctgcttcttgccaggtgggagggcctgtccacaccctggatccccgtaccacagtgccagccatgcccttcccctgggctaccattgtccctttcctcacccagttggtagaggagtcaggaggtgggaggccgtgggctttggttttataatgtaaccactgtgggggtgggggaggatggtgaaccatgtatttcagtgaaatatttaatatatttaaatatcaataaaatcaaactctgtgt

SEQ ID NO: 72392 - DNA, 1241 bp, Homo Sapiens
  misc_feature (600)..(600): n is a, c, g, or t
ggaatgatagacagtgttaaaaaaagcaggctggtaccggtccggaatttcccgggatatcgtcgaccacgcgtcgggtagcaaaaggagggagaggagtcctttttgtgccaaatccctaagtgccgttcgggggccatgtgtgcagcatgactctccctgtctgtggcagggacccaagcgcttgcttaagccccagtgctccatgccagcacttgaactgtctggggtttgatggacagaggctgaggaatttcctggcttccccagatagtgtcctgggacatggtatgctttggggctggggtagcatggaatccctctgaggacctggatactggtactacggggtggggaagaggaaccttaaacttggctttccccagccttcagcctgagtctagcatgtttctagctccccagtcccttgtgaagccttgagggctggcagaagggttaggaggttgaactctagattcccttcctgtcttgccttccctttacccctttccctgcaacctccttgactctgccctgaatttgtggtgcctcagtttctctgtctgtacctatttaagccaaaggcactagcctgaattntgcttgaagatcactttgtcttggaaatgactagagaggcagaggagaagggtttccagagttgctaggtttgggagtggaaggggcaggcagtgcacttgcccctcctcatgccccttctgacaccagctccctgtggaggcctggtttctgggtaatgcctcccttgggcatcttcatgcatcaaccaaatgggccatcaggtacttcattagtcatggcagaaggaggggaaaagacttgttttccagacagaaaatctactcccctgtccccagccatatccctggataggaagggataggaagagactacttggtgccatggggtaggggtgagggtataagtagatcagagtgggaagacctcagccttgggtggcttgtctctgcttcttgccaggtgggagggcctgtccacaccctggatccccgtaccacagtgccagccatgcccttcccctgggctaccattgtccctttcctcacccagttggtagaggagtcaggaggtgggaggccgtgggctttggttttataatgtaaccactgtgggggtgggggaggatggtgaaccatgtatttcagtgaaatatttaatatatttaaatatcaataaaatcaaactctttgtaaaaaaaa

SEQ ID NO: 72393 - DNA, 575 bp, Homo Sapiens
acatcagtaacttgattgcttcagaaatcatccgcaacgaggacatcaacgccagggtgagcgccatcgagaagtgggtggccgtagctgacatatgccgctgcctccacaactacaatgccgtactggagatcacctcgtccatgaaccgcagtgcaatcttccggctcaaaaagacgtggctcaaagtctctaagcagactaaagctttgattgataagctccaaaagcttgtgtcatctgagggcagatttaagaatctcagagaagctctgaaaaaatatcccatattatccgagagattcgccagtttcaacaaactgcctacaaaatagagcaccaagcaaaggtaacgcaatatttactggaccaatcttttgtaatggatgaagaaagcctctacgagtcttctctccgaatagaaccaaaactccccacctgaagctgtgcccagcccagacccagctgctcccggggacatgtgctagatgatactgtacatattcgtttggtttcactggattttcttcttcagtatgtgcttctccaagaatacaaatcgtccttgttcttag

SEQ ID NO: 72394 - DNA, 684 bp, Homo Sapiens
gggggaagggccgacgtggtgggcaacttgcccagatctaatggctgcttgccaaggccacatgaaccctgtacaggatccacagaggaaagtgctgttgcagtggcttctggcgctcaacccccaccacgatgcacagtccagccctctgttgctctcagcaccttcccacccatgtgtggttagcagttgtgtgcagtggttcccaattagcacttgggttgggaagggccaagcatgggggagtcagggtggagacgaagcctggttgtgattagatggattgcagcatgcttgatttttttcattgaactggtcattcctgcagaggggtgttagaactgacctggcttcttggcaagtgttcagctgagactacttattggccctgagcacagcccaaacacctgcttagtcctgaaaccctgacctgagttgtggagatggaggagacctggaggaaatactcattccattggagaggccttgtctcttctgccttggaagctgccccagttagatgaggagacagaattacgtactcaagagagtaatttgcaagaagcacagctgtgatttcattttccaggcatccttagcctatgtctctagacagtggtcccctcaagggcagtactgagttaatactcttttaccttgcctaacatggcactggtttaaatt

SEQ ID NO: 72395 - DNA, 871 bp, Homo Sapiens
gcatacggctaggtacgaggccgggtgttgaattcggcacgaggggcgcctctcgaacgagtgtgggcgcgaggcaggatgacgacctcaggcgcgctctttccaagcctggtgccaggctctcggggcgcctccaacaagtacttggtggagtttcgggcgggaaagatgtccctgaaggggaccaccgtgactccggataagcggaaagggctggtgtacattcagcagacggacgactcgcttattcacttctgctggaaggacaggacgtccgggaacgtggaagacgacttgatcatcttccctgacgactgtgagttcaagcgggtgccgcagtgccccagcgggagggtctacgtgctgaagttcaaggcagggtccaagcggcttttcttctggatgcaggaacccaagacagaccaggatgaggagcattgccggaaagtcaacgagtatctgaacaaccccccgatgcctggggcactgggggccagcggaagcagcggccacgaactctctgcgctaggcggtgagggtggcctgcagagcctgctgggaaacatgagccacagccagctcatgcagctcatctggaccagccggcctcggaggactgggtgggctgggggccctgactggacctggcctggccagcttactggggagcagtgggcctccagggagcagtcctcctccagctcccggagccagtcggcagcggtcaccccgtcatccacaactcttcaaccgtgcaccccagcccttctgctccagcagtgctcaggaaatagcccgagcccgcgccaagttcgggaatggagcaagaccagagccagccgaccagccatcaatgaggacttcaaggatg

SEQ ID NO: 72396 - DNA, 2279 bp, Homo Sapiens
  misc_feature (1321)..(1436): n is a, c, g, or t
  misc_feature (1440)..(1440): n is a, c, g, or t
  misc_feature (1598)..(1608): n is a, c, g, or t
  misc_feature (1994)..(1994): n is a, c, g, or t
  misc_feature (2058)..(2058): n is a, c, g, or t
ctctttgtttttctatctcaggctgctactccgctatggctctatctgtcctctccgtatggttgccacacatgtttgtttcgactttctctggtcttctctcctgaaccatgggtacattcccacctcctttgtatactctctttggacacctgcttctcgtgctgtgtgtatcttgttcttctttcgtcggttgtgtgttctcgggtgtatgtctttccctctcggatttctatctgctctgtgttcatggttggctacatggcctttttctttgggtatctgttggtcttttatgctgttcctggtttgtgggtccttcctagttaattgctcacggttgtgtgcttgcatctaccccttagtttgccttggggtctactggggggcccttttgtatttcttgtcttctgaactttctggtatatcgtgttatgtgttgccttcatgatgctctcgctgtgaaacatgagtcactagtctagctctattcagcttattcgggaccatccgggctttcggtagacctgtgttgtgtcttgtggtcctgactgggaccctggccctggccagcgttcctgtgtgagcagttgggcctccagggacagctcctcctccagctcccggagccagtcggcagcgggtcaccccgtcatccaccacctcttccacccgtgccaccccagccccttttgctccagcagctgcctcagcaactagcccgagccccgcgcccagttccgggaatggagccagcacagcagccagcccgacccagcccatccagctgagcgacctccagagcatcctggccacgatgaacgtaccagccgggccagcaggcggccagcaagtggacctggccagtgtgctgacgccggagataatggctcccatcctcgccaacgcggatgtccaggagcgcctgcttccctacttgccatctggggagtcgctgccgcagaccgcggatgagatccagaataccctgacctcgccccagttccagcaggccctgggcatgttcagcgcagccttggcctcggggcagctgggccccctcatgtgccagttcggtctgcctgcagaggctgtggaggccgccaacaagggcgatgtggaagcgtttgccaaagccatgcagaacaacgccaagcccgagcagaaagagggcgacacgaaggacaagaaggacgaagaggaggacatgagcctggactgagccacgcgccgtcctccgaggaactgggcgcttgcagtgcgttgcacaccctcacctcccacccactgattattaataaagtcttttcttttacctgcnnnnnnnnnnnnnnnnnnnnnnnnnnnnnnnnnnnnnnnnnnnnnnnnnnnnnnnnnnnnnnnnnnnnnnnnnnnnnnnnnnnnnnnnnnnnnnnnnnnnnnnnnnnnnnnnnnnntaanaccttggtgagccccgctccggccccccaagaaattttctaagaacctttcccttggcacgggggggccccccacgcgcaaagtaacacatggtcccctcgggtttccccagggtaatcccggggcccttcacgcagccggcttggaatttcctcgcnnnnnnnnnnnccgcccgggaggcaaagccccaccgggttcaagacacaactcccaaagacgaggttttcgcgaggacatatacgcgggagctctcacacagcggggtgcttcggcgacctccctcttccaaaacaacaaatttacagccgcaggcgtctcagcgcactctctttgcagcaaaaattgtgggggggacccatagcctcagacgagccctcgcccggccagaacaggtggcgccgccacaatccccgaagatgccatatactggaagcctactcctttagagaatcccgctggaggagcgggagatgcgatagtaacacgaaactgcgaccgccccaatgacgggcgaaataataatacattatgcatcgaaagcgggcgcacaacgncccctgccatgcgcgcaaagacagaacgttctatgatacaccggtgtcgtcgcccacccacagnttattaatatcccgagagcacgttgggctagagtaactcctcctcacctcgtcagtgcgtaatcgtgtgtctggtgactgacgaatataaccactaccggtcgtaacgtcgcaccgtagactacaccacctgccgcctgtcaacgcaggacaacatcatatgtcgcgcaccgtgtgtctctattcgcgcacgctggacacacgtatctatctatatatgtg

SEQ ID NO: 72397 - DNA, 861 bp, Homo Sapiens
  misc_feature (255)..(446): n is a, c, g, or t
  misc_feature (449)..(531): n is a, c, g, or t
  misc_feature (631)..(641): n is a, c, g, or t
gcggcgcctactactactatacggctgcgagaagacgacagaagggcgatgtggaagcgtttgccaaagccatgcagaacaacgccaagcccgagcagaaagagggcgacacgaaggacaagaaggacgaagaggaggacatgagcctggactgagccacgcgccgtcctccgaggaactgggcgcttgcagtgcgttgcacaccctcacctcccacccactgattattaataaagtcttttcttttacctgccnnnnnnnnnnnnnnnnnnnnnnnnnnnnnnnnnnnnnnnnnnnnnnnnnnnnnnnnnnnnnnnnnnnnnnnnnnnnnnnnnnnnnnnnnnnnnnnnnnnnnnnnnnnnnnnnnnnnnnnnnnnnnnnnnnnnnnnnnnnnnnnnnnnnnnnnnnnnnnnnnnnnnnnnnnnnnnnnnnnnnnnnnnnnnnnnccnnnnnnnnnnnnnnnnnnnnnnnnnnnnnnnnnnnnnnnnnnnnnnnnnnnnnnnnnnnnnnnnnnnnnnnnnnnnnnnnnnnccccgggggaaaaccaaggtttttaaaaaatccaaaaggggtccggggggcttttcgggatttacccaagggggccccaggggccttaaatttaaattannnnnnnnnnnggcccctatggaaaaagggggggaatcctctaaccctttctccccccttggaaccctccccaaacggtttggtaaccttgaattccccgggggttcccaacctttgcccccctgggtaaaaatttttcccccggtaaaaagcggggggcaaaaaaatttcccttattggccccaccttaaaaaccaaaatgggggaaaaccccccccggggttttgcgtg

SEQ ID NO: 72398 - DNA, 1251 bp, Homo Sapiens
  misc_feature (597)..(624): n is a, c, g, or t
gggaggaagagcgagcccggacggcgcctctcgaacgagtgtgggcgcgaggcaggatgacgacctcaggcgcgctctttccaagcctggtgccaggctctcggggcgcctccaacaagtacttggtggagtttcgggcgggaaagatgtccctgaaggggaccaccgtgactccggataagcggaaagggctggtgtacattcagcagacggacgactcgcttattcacttctgctggaaggacaggacgtccgggaacgtggaagacgaacccaagacagaccaggatgaggagcattgccggaaagtcaacgagtatctgaacaaccccccgatgcctggggcactgggggccagcggaagcagcggccacgaactctctgcgctaggcggtgagggtggcctgcagagcctgctgggaaacatgagccacagccagctcatgcagctcatcggaccagccggcctcggaggactgggtgggctgggggccctgactggacctggcctggccagcttactggggagcagtgggcctccagggagcagctcctcctccagctcccggagccagtcggcagcggtcaccccgtcannnnnnnnnnnnnnnnnnnnnnnnnnnncagccccttctgctccagcagctgcctcagcaactagcccgagccccgcgcccagttccgggaatggagccagcacagcagccagcccgacccagcccatccagctgagcgacctccagagcatcctggccacgatgaacgtaccagccgggccagcaggcggccagcaagtggacctggccagtgtgctgacgccggagataatggctcccatcctcgccaacgcggatgtccaggagcgcctgcttccctacttgccatctggggagtcgctgccgcagaccgcggatgagatccagaataccctgacctcgccccagttccagcaggccctgggcatgttcagcgcagccttggcctcggggcagctgggccccctcatgtgccagttcggtctgcctgcagaggctgtggaggccgcccacaagggcgatgtggaagccgtttgccaaagccatgcagaacaacgcccagccccaagcagaaaagaggccgacccgcaaggaccaagaagggaccaaaaagggaggacatggggccctggaacttggagccaccgcccccgttccttcccaagggaaacttgggcgcgcctttggcagggggccgtttgcaacccccccctcc

SEQ ID NO: 72399 - DNA, 1094 bp, Homo Sapiens
cctgggtggcgaattcggcacgaggcaggcgccgaggaggaagagcgagcccggacggcgcctctcgaacgagtgtgggcgcgaggcaggatgacgacctcaggcgcgctctttccaagcctggtgccaggctctcggggcgcctccaacaagtacttggtggagtttcgggcgggaaagatgtccctgaaggggaccaccgtgactccggataagcggaaagggctggtgtacattcagcagacggacgactcgcttattcacttctgctggaaggacaggacgtccgggaacgtggaagacgacttgatcatcttccctgacgactgtgagttcaagcgggtgccgcagtgccccagcgggagggtctacgtgctgaagttcaaggcagggtccaagcggcttttcttctggatgcaggaacccaagacagaccaggatgaggagcattgccggaaagtcaacgagtatctgaacaaccccccgatgcctggggcactgggggccagcggaagcagcggccacgaactctctgcgctaggcggtgagggtggcctgcagagcctgctgggaaacatgagccacagccagctcatgcagctcatcggaccagccggcctcggaggactgggtgggctgggggccctgactggacctggcctggccagcttactggggagcagtgggcctccagggagcagctcctcctccagctcccggaaccagtcggcagcgggtcacccccgtcattcacccacctccttccacccggggccaccccagccccctttctggtccaggcagctgccttcagcaaactaacccccgaacccccgcgccccagttttccggggaatgggaagccagcaacagccaggcccagacccggaaccccagacccattccaagacttggaacggaacctcccagaaggcataccttgggcccacggatggtaacgctaaccgagcccgcggcccagaccagggcggggccaagaaaaaggggtggacctcgggcgcacagtggggggctttgaacccccccgcaaaaaatattgggggttttcccacatacctttggggcacaacagc

SEQ ID NO: 72400 - DNA, 1432 bp, Homo Sapiens
  misc_feature (46)..(56): n is a, c, g, or t
  misc_feature (93)..(93): n is a, c, g, or t
ctgtatatatagcgggtgggaggattcgtgggggtgcagactcaannnnnnnnnnntatgtggagtggtacgggcggagggggagttcgtaanttgcggggtcaaatgataggacgctaagggtagcggggagacagcaaaccatctagttaattgttatgagttgtttacgcgaaatatagtgggtcgggcgataagttacagaggaggtcatcgtcgtgcgaaaacgaagtgggtgacaggagatgtgaggcacgtgcgttaggggtagaacacataagagacaaaatggtaacagcagtgggatcagtcagatatggattaggtggtcgggcgatcaggtatgattcgatggagcgcagttgattaatttttggaggtagagagtatcagaggggaagctcgtaagtcatcttaaagtgttcttcgcgcgatggtttggggatataatagagtggcgctaggatcgtggtcatggctgtgggtgcggcggagctgtgatcggttggcggggggccccagggataatgcgtggggggagggtgtgattagatgagtggtatgtggatagggatatgggtactaggggcagtgatggcggattggccgtccccggggaacggggccgcgggggttcgggggtaattggctggggtcagttgtctggaacaagaagagggctggggtggcacgggtggaagaggtggtggatgacggggtgaccgctgccgactggctccgggagctggaggaggagctgctccctggaggcccactgctccccagtaagctggccaggccaggtccagtcagggcccccagcccacccagtcctccgaggccggctggtccgatgagctgccatgagctggctgtggctcatgtttcccagcaggctctgcaggccaccctcaccgcctagcgcagagagttcgtggccgctgcttccgctggcccccagtgccccaggcatcggggggttgttcagatactcgttgactttccggcaatgctcctcatcctggtctgtcttgggttcctgcatccagaagaaaagccgcttggaccctgccttgaacttcagcacgtagaccctcccgctggggcactgcggcacccgcttgaactcacagtcgtcagggaagatgatcaagtcgtcttccacgttcccggacgtcctgtccttccagcagaagtgaataagcgagtcgtccgtctgctgaatgtacaccagccctttccgcttatccggagtcacggtggtccccttcagggacatctttcccgcccgaaactccaccaagtacttgttggaggcgccccgagagcctggcaccaggcttggaaagagcgcgcctgaggtcgtcatcctcgcgcccacactcgttcgagaggcgccgtccgggctcgctcttcctcctcggcgcctgcc

SEQ ID NO: 72401 - DNA, 284 bp, Homo Sapiens
tgcaccaattgtctggctccattcccggaactgggcgcggggctcgggctagttgctgaggcagctgctagggcgatgtggaagcgtttgccaaagccatgcagaacaacgccaagcccgagcagaaagagggcgacacgaaggacaagaaggacgaagaggaggacatgagcctggactgagccacgcgccgtcctccgaggaactgggcgcttgcagtgcgttgcacaccctcacctcccacccactgattattaataaagtcttttcttttacctgccaaa

SEQ ID NO: 72402 - DNA, 709 bp, Homo Sapiens
  misc_feature (84)..(84): n is a, c, g, or t
agcctggagatatcctcaggaagcacatctgtagtgcactcccagcaggccatggactagtcactaaccccacactcaaagagngcatgggtggtggagaagcagaaggagcaatcaagcttatctggatatttctttctttatttattttacatggaaataatatgatttcactttttctttagtttctttgctctacgtgggcacctggcactaagggagtaccttattatcctacatcgcaaatttcaacagctacattatatttccttctgacacttggaaggtattgaaatttctagaaatgtatccttctcacaaagtagagaccaagagaaaaactcattgattgggtttctacttctttcaaggactcaggaaatttcactttgaactgaggccaagtgagctgttaagataacccacacttaaactaaaggctaagaatataggcttgatgggaaattgaaggtaggctgagtattgggaatccaaattgaattttgattctccttggcagtgaactactttgaagaagtggtcaatgggttgttgctgccatgagcatgtacaacctctggagctagaagctcctcaggaaagccagttctccaagttcttaacctgtggcactgaaaggaatgttgagttacctcttcatgttttagacagcaaaccctatccattaaagtacttgttagaacacaaa

SEQ ID NO: 72403 - DNA, 903 bp, Homo Sapiens
  misc_feature (848)..(848): n is a, c, g, or t
caagctgtcgaggggagcccttagaggggacaacttcttggagtggcggccaagctgggccttaccaggtgtgatcatagtcttaggtatcatggagttcccatctccgcagaggcaggctcttcccagctccacgagaggcggagaattgcaacttcttcctctctgggaacggcctatctagctcctgggaggaatctcaaagatctttcttcttaagacatcgaagaaaaactgagaggctgtagctcgacctagtttctgtgaagaattttgtcaagtgatccctctcggaccctgagcctctttatttggattttgtgccttgagcaccaagagaatatgcactctgggttgcctggacagctggggtggtgattcacaggaagggtccaagccatcactacacctgactcaagccggaaagagctcccagaggacttcctggagctgccagcctcagcctgagatgcgggatattcgtccccaaggagcgaggagggacagctcgccttctttgcaggaaaaatgctggcaggtggtgcaagcaaggacatctatgcatagaattctgacagcagctggaccctcaacttcttcagaagacgagaaccctgcctggcaccgctggcaggcatctggcctgacaccgctctggaggcctcccacaagcagcaaccaagccagaaaaagttgagaccagacccgttgtccctaaagatggggcccagaatgttggggtgaagctgtaggaacagggtgaaagctggtggtgtgagcaaagagaccagctatggggtggtcaggggattccgggaggtgcatgggtatgttgcagacccccccanggacaagggtggctgtggaagaatggcaaataaacacaaggcaaagtctcaaaaa

SEQ ID NO: 72404 - DNA, 1019 bp, Homo Sapiens
  misc_feature (160)..(577): n is a, c, g, or t
  misc_feature (638)..(665): n is a, c, g, or t
gtggttgaagcacctcgagagaagcgcagttcgtacgcagtcgacagggcccgggagtccgggaacctgtatctatatcttgggttcccactcgactgacgtgatttgtatctgtcggggccgaccttggaaaacccgcaacgcgccttttacgttcctnnnnnnnnnnnnnnnnnnnnnnnnnnnnnnnnnnnnnnnnnnnnnnnnnnnnnnnnnnnnnnnnnnnnnnnnnnnnnnnnnnnnnnnnnnnnnnnnnnnnnnnnnnnnnnnnnnnnnnnnnnnnnnnnnnnnnnnnnnnnnnnnnnnnnnnnnnnnnnnnnnnnnnnnnnnnnnnnnnnnnnnnnnnnnnnnnnnnnnnnnnnnnnnnnnnnnnnnnnnnnnnnnnnnnnnnnnnnnnnnnnnnnnnnnnnnnnnnnnnnnnnnnnnnnnnnnnnnnnnnnnnnnnnnnnnnnnnnnnnnnnnnnnnnnnnnnnnnnnnnnnnnnnnnnnnnnnnnnnnnnnnnnnnnnnnnnnnnnnnnnnnnnnnnnnnnnnnnnnnnnnnnnnnnnnnnnnnnnnnnnnnnnnnnnnnnnnnnnnaagaattcggaacgaggtctgtctgaactctattcaaaagtatctttgctctcttgggccnnnnnnnnnnnnnnnnnnnnnnnnnnnnctaatcctgctttcatactagccagtgtggggaaaaggtacaatatgtcaaagagatgagagagtgttatttcttgggcaattttctattagtgtttcttattttggccagttcttttatttatgtccttgtgacccaggtacttggggggccagctacccttctggccttttagcgtctttgaaggagaccagacatgagtgaatacctaggagagtgtcagcatgtttctggaaaattggcagagaccaagccctgctgcagattcgtcaggccaggtgaaagggccaggcagttgcagctgatgatgtaaatattttgtacagtagataaataaatgtttaaaagaaaaaa

SEQ ID NO: 72405 - DNA, 667 bp, Homo Sapiens
  misc_feature (290)..(569): n is a, c, g, or t
  misc_feature (572)..(572): n is a, c, g, or t
gcctacttgtaaaaatgactgaacaaactttttagatgaataattaagcaacacatatccctcttgctttcattgccattttaataaaaaaatagaaactcctatattacaaaatatattgcgtattgatgtcacaatggaaattttacaaacacaaactttataaaagggtgttaagccaattccagatgaagcaaagacatgaaaacaggaaagttctagaaaaagtctaaataaatgtattcatattctatgagtgaaaaagataattcaaaaggatgtccgtaagnnnnnnnnnnnnnnnnnnnnnnnnnnnnnnnnnnnnnnnnnnnnnnnnnnnnnnnnnnnnnnnnnnnnnnnnnnnnnnnnnnnnnnnnnnnnnnnnnnnnnnnnnnnnnnnnnnnnnnnnnnnnnnnnnnnnnnnnnnnnnnnnnnnnnnnnnnnnnnnnnnnnnnnnnnnnnnnnnnnnnnnnnnnnnnnnnnnnnnnnnnnnnnnnnnnnnnnnnnnnnnnnnnnnnnnnnnnnnnnnnnnnnnnnnnnnnnnnnnnnnnnnnnnnnnnnnnnnnnnncanaaaaaaataaattacaaaggactcatatatattaattttgtataattcctctaaaggaattattcaaagatctcaaaatatttcactgatattta

SEQ ID NO: 72406 - DNA, 948 bp, Homo Sapiens
  misc_feature (646)..(673): n is a, c, g, or t
gctggtacggtccggaattagggatgcagaagttatgggatagcagataagatagagttcatctgtggagatttcttgctgctggcttcttttttaaaggctgatgttgtgttcctcagcccaccttggggagggccagactatgccactgcagagacctttgacattagaacaatgatgtctcctgatggctttgaaattttcagactttctaagaagatcactaataatattgtttattttcttccaagaaatgctgatattgaccaggtggcatccttagctgggcctggagggcaagtggaaatagaacagaactccttaacaacaaattgaagacaatcactgcatattttgtgacctaattcgaagaccagcctctgaaacctaactatgcagcagtgcgaggacaaaagatcatggagtggtcaaaatattcagatgagacatttggcatgtcttcctttattcactgatattttctacccatggtcttatatcaccgtatgaaatggaaacttacaggacttaaatatcagtgaaatatttgagatctttgaataattcctttagaggaattatacaaaattaatatatatgagtcctttgtaattcatttttttgagacaggatctcacttttaccnnnnnnnnnnnnnnnnnnnnnnnnnnnnacagtcactgaggttcagccttctgagttcaagcaatccttctgttctcagtctcctcagtagctggggctttaggtggggcactggcacaccgtactaattttgtattttttgagagacgaggtcccaccaatgttgccaggctggtgtcaaactcctgggctcagtccagtccccccatctcaaccttccccaagtgtggaattacggcgtgagctactgtgccagcttaggaatcctttgaattttcttttcactcataggaatatgagtcg

SEQ ID NO: 72407 - DNA, 603 bp, Homo Sapiens
cccccctgccccgggagtcccgcctgccagaggatgatgagaggccccctgaggagtatgaccagccctgggagtggaagaaggagcggatttccaaagcctttgcaggggacacccacaatgggtgggcctggacagcgagggacccagcagagatgccccccttcctctctctcatccttagctggtatcacggggccatcagccgaaccgacgccgagaacctgctccggctgtgcaaagaggccagctacctggtgcgcaacagtgagaccagcaagaatgacttctccctctccctcaagagcagccagggattcatgcacatgaagctgtcccgaaccaaggaacacaaatatgtgctgggccagaacagcccgcccttcagcagcgtccctgaaattgtgcaccactatgccagccgcaagctacccattaagggagccgaacacatgtccctgctttaccctgtggccatccggactctttagatgtgaagccagggcactgtgatagacctgtacccagccctgtgcccatcacctggctgagggctgtggctcttgccagggacgtgatctttcaaacctttcttctcctggg

SEQ ID NO: 72408 - DNA, 1100 bp, Homo Sapiens
  misc_feature (120)..(120): n is a, c, g, or t
  misc_feature (131)..(131): n is a, c, g, or t
  misc_feature (145)..(145): n is a, c, g, or t
  misc_feature (264)..(264): n is a, c, g, or t
  misc_feature (284)..(284): n is a, c, g, or t
  misc_feature (319)..(319): n is a, c, g, or t
  misc_feature (330)..(331): n is a, c, g, or t
  misc_feature (434)..(434): n is a, c, g, or t
  misc_feature (711)..(724): n is a, c, g, or t
  misc_feature (1021)..(1041): n is a, c, g, or t
cccgtaccttgctcgtgttgtttggatggacgtacatcaccagacgttgactgtacgattatcgctccttaggattgcctcggccaagatcgcacgaggtcagatcctcagtcagatgcntatgggcagtntgagtcagtggctnttgtgttctcatcacacactgcggagctgttgtagagcaccttggtgtggtgatctgaagctggagtgatggacccagctatcctgttttaccgccttgtctggcactgtgaccacgcntcaggctgctctgggggtcntgtccctggatgtccattccttgccctctgacccntcacactctcnncaagtcttgagcagagttggggcccaatggtagcattgctgtcatctctgggaggagagtgagtatacaagtcagtgacagttcagccaggctcccttgggtntgggaagaggcactgcccttctgtgctgtggatcctgcttgtctgctctggagtccccccacccttgccaggagcttcacaaaccagagacgggctgtcagcaagagctcagacaggatgtggtgcaagtgcaggtgcacgagtttaaccctcagctgcaggagctagtctcaggtgttctggggatgcctcaggctaagaattttgccgactttctgggcttggttggctaatgccaaatgcccctgcttaaatatcacaaggtgctgattctccnnnnnnnnnnnnnncataccaatgtgctcaaactttgagctaggtcttgtgagtttgcctagcactcagacctgtttaagtaacgttctttacattgaaacaagtcaaccgaagctttgtggtgcaggagctgagggtgccccagactcagtgggagccctggttgggccccaaactctcccagcagggtcctcggtttcctcatttgtgaaataaatgagtgggccacgacgttaataagcccaagagaactgtgaaggtggtagtcccttgccctaattggtgctcaataaagttgttggcataaacgnnnnnnnnnnnnnnnnnnnnncctgagcaggcggccgcaagcttattcccttgtagtgagggttaattttagcttggcac

SEQ ID NO: 72409 - DNA, 730 bp, Homo Sapiens
agtggcagaaaaaaggattaaacttttaaataactctgatgaaagacttcaaaacagcaggcccaaagatcgaaaagatgtctggtcaagtattcagggacagtggcctaaaaaaacgctgaaagagcttttttcagactctgatactgaggctgcagcttccccaccgcatcctgccccagaggagggggtggcagaggagtcactgcagactgtggctgaagaggagagttgttcacccagtgtagaactagaaaaaccacctccagtcaatgtcgatagtaaacccattgaagaaaaaacagtagaggtcaatgacagaaaagcagaatttccaagtagtggcagtaattcagtgctaaatacccctcctactacacctgaatcgccttcatcagtcactgtaacagaaggcagccggcagcagtcttctgtaacagtatcagaaccactggctccaaaccaagaagaggttcgaagtatcaagagtgaaactgatagcacaattgaggtggatagtgttgctggggagctccaagacctccagtctgaagggaatagctcgccagcaggttttgatgccagtgtgagctcaagcagtagtaatcagccagaaccagaacatcctgaaaaagcctgtacaggtcagaaaagagtgaaagatgctcagggaggaggaagttcatcaaaaaagcagaaaagaagccataaagcaacagtggtaaacaac

SEQ ID NO: 72410 - DNA, 1175 bp, Homo Sapiens
  misc_feature (1090)..(1101): n is a, c, g, or t
cttaaaccaggcacaatgtccccgaatcattccttgaggaagcgcagatcatgaagaagctgaagcacgacaagctggtccagctctatgcagtggtgtctgaggagcccatctacatcgtcaccgagtatatgaacaaaggaagtttactggatttcttaaaagatggagaaggaagagctctgaaattaccaaatcttgtggacatggcagcacaggtggctgcaggaatggcttacatcgagcgcatgaattatatccatagagatctgcgatcagcaaacattctagtggggaatggactcatatgcaagattgctgacttcggattggcccgattgatagaagacaatgagtacacagcaagacaaggtgcaaagttccccatcaagtggacggcccccgaggcagccctgtacgggaggttcacaatcaagtctgacgtgtggtcttttggaatcttactcacagagctggtcaccaaaggaagagtgccatacccaggcatgaacaaccgggaggtgctggagcaggtggagcgaggctacaggatgccctgcccgcaggactgccccatctctctgcatgagctcatgatccactgctggaaaaaggaccctgaagaacgccccacttttgagtacttgcagagcttcctggaagactactttaccgcgacagagccccagtaccaacctggtgaaaacctgtaaggcccgggtctgcggagagaggccttgtcccagaggctgccccacccctccccattagctttcaattccgtagccagctgctccccagcagcggaaccgcccaggatcagattgcatgtgactctgaagctgacgaacttccatggccctcattaatgacacttgtccccaaatccgaacctcctctgtgaagcattccagacagaaccttgttatttctccagactttggaaaaagcattgtatcgatgttatgtaaaaggccaaacctctgttcagtgtaaatagttacctccagggccaacaatcctagtgctttccttttttaaaaatgcaaatcctatgtgattttaactctgtcttcccctaattcacctnnnnnnnnnnnngtattattttccaaaagtggcctctttgtatacccccataaaattttttttcatgttttaacaaaaaccgggag

SEQ ID NO: 72411 - DNA, 654 bp, Homo Sapiens
  misc_feature (572)..(583): n is a, c, g, or t
gggaggtgctggagcaggtggagcgaggctacaggatgccctgcccgcaggactgccccatctctctgcatgagctcatgatccactgctggaaaaaggaccctgaagaacgccccacttttgagtacttgcagagcttcctggaagactactttaccgcgacagagccccagtaccaacctggtgaaaacctgtaaggcccgggtctgcggagagaggccttgtcccagaggctgccccacccctccccattagctttcaattccgtagccagctgctccccagcagcggaaccgcccaggatcagattgcatgtgactctgaagctgacgaacttccatggccctcattaatgacacttgtccccaaatccgaacctcctctgtgaagcattcgagacagaaccttgttatttctcagactttggaaaatgcattgtatcgatgttatgtaaaaggccaaacctctgttcagtgtaaatagttactccagtgccaacaatcctagtgctttccttttttaaaaatgcaaatcctatgtgattttaactctgtcttcacctgattcaactnnnnnnnnnnnngtattattttccaaaaagtggcctctttgtctaaaaccaataaaattttttttcatgttttaacaaaaacc

SEQ ID NO: 72412 - DNA, 1142 bp, Homo Sapiens
  misc_feature (940)..(940): n is a, c, g, or t
ctagacggccccgccgcgccagggagggattcggccgccgggccggggacaccccggcgccgccccctcggtgctctcggaaggcccaccggctcccgggcccgccggggaccccccggagccgcctcggccgcgccggaggagggcggggagaggaccatgtgagtgggctccggagcctcagcgccgcgcagtttttttgaagaagcaggatgctgatctaaacgtggaaaaagaccagtcctgcctctgttgtagaagacatgtggtgtatataaagtttgtgatcgttggcggaaattttggaatttagataatgggctgtgtgcaatgtaaggataaagaagcaacaaaactgacggaggagagggacggcagcctgaaccagagctctgggtaccgctatggcacagaccccacccctcagcactaccccagcttcggtgtgacctccatccccaactacaacaacttccacgcagccgggggccaaggactcaccgtctttggaggtgtgaactcttcgtctcatacggggaccttgcgtacgagaggaggaacaggagtgacactctttgtggccctttatgactatgaagcacggacagaagatgacctgagttttcacaaaggagaaaaatttcaaatattgaacagctcggaaggagattggtgggaagcccgctccttgacaactggagagacaggttacattcccagcaattatgtggctccagttgactctatccaggcagaagagtggtactttggaaaacttggccgaaaagatgctgagcgacagctattgtcctttggaaaccccagaggtacctttcttatccgcgagagtgaaacaccaaaggtgcctattcactttctatccgtgattgggatgatatgaaaggagaacatgtcaaacattataaaaatcgcaaacttngacaatggtggatactacattaccacccggggccagtttggaacaacttcagcagctttgtacaacattactcaggtaacctgggatgggaaaacccaaaagtagcccctaaggacttcttaaaccaaggcaccaatggtcccccggaatcaattcccttgagggaaaccgcccaaatcattgaaagaaaacttgtaagccc

SEQ ID NO: 72413 - DNA, 836 bp, Homo Sapiens
  misc_feature (136)..(187): n is a, c, g, or t
  misc_feature (476)..(563): n is a, c, g, or t
  misc_feature (630)..(630): n is a, c, g, or t
  misc_feature (826)..(826): n is a, c, g, or t
atggaaagaaaacaccaggtttaataccttataaaatatgtatagaaattgaacattcctgtaagatacagttcaagtcacaattgaattataaatgtaatcagatattctgatataatgaaaagttctagttggnnnnnnnnnnnnnnnnnnnnnnnnnnnnnnnnnnnnnnnnnnnnnnnnnnnnttctaaccacggggtttaaactttgatcttaaaaaagtaaatatatatttacaatctttaaatttcacacatttgttacttttacatgatctttattatttaagaaaaacctcttttaaccatttatataacagaaaaaaaatagggaggctggtagatcatcacatatatagtagctaaaatatgaaaggccagggaatttattattaatgaagtcataaaacagacttaaccaaaagtgtgtgctaggaaacaagcagtttcacttcagagacttcattgcaggaannnnnnnnnnnnnnnnnnnnnnnnnnnnnnnnnnnnnnnnnnnnnnnnnnnnnnnnnnnnnnnnnnnnnnnnnnnnnnnnnnnnnnnncaaatacatgtaggtatgaagacatcgtctggggtgtgaaagtttagttcacaccagaaccttcctnttaaggcttaaaaacctcaaacagtatttcattcttaatacaagaaccaatgtttaaagcataaaatccttaattggagtgttcagcccagttgattatcaaaagcgatttataaaatgcttcaatactgatgatgttaaagcaaccaaaactttgtgatgctcacagaggtttggcttccggggttatggtccanagtcatttgc

SEQ ID NO: 72414 - DNA, 944 bp, Homo Sapiens
gaaaattattgaaagggccccaggggaaattttatttattttattgaaggttcataaaacccaggatcttaaaccaaaaaggtgtgtggtagggaaaccaagcaggtttccactttcagagactttcattgcaggaacccaagtttcccttatggggaaaaaaagtgattataaataacagttatctgaaaggtggttgagaggattaaatgagatcacctatgcaaacaaatacatgtaggtatgaagacatcgtctggggtgtgaaagtttagttcacaccagaaccttcctttaaggcttaaaaacctcaaacagtatttcattcttaatacaagaaccaatgtttaaagcataaaatccttaattggagtgttcagcccagttgattatcaaaagcgatttataaaatgcttcaatactgatgatattaaagcaaccaaaactttgtgatgctcacagaggtttggcttccggggttatggtccaaagtcatttgccttctgagaagattgcagagatgtcagatacttaatttctcaaacaacttggcatcagccttctatgttttctgtctatcatagtctccaaccatcttcttgatgtgtgacaatttgctctttaactgcttgcaatgattcttcttacttttgtaatctgcagatcccttcacttgcttcagtctattgtattcatcagcagcagccatgtactcttcactttcttctctatagtcatccaatcctttatccaaacgggagagttctttattgatctcatcaagttctgattgtaagctcttgtattcctgtaggccagtgtcaaaattcctcttgtacagttgtctttgttgatctgaagtgataggtggatattccctgatccagtcctcctccagctcatcacaggactcgccggaagaagaaaatgatccggggatcctc

SEQ ID NO: 72415 - DNA, 952 bp, Homo Sapiens
  misc_feature (44)..(44): n is a, c, g, or t
  misc_feature (47)..(81): n is a, c, g, or t
agacgaacgacgagcgcagcgaagtcagtgagcgaggaagcggncgnnnnnnnnnnnnnnnnnnnnnnnnnnnnnnnnnnncagtcgacggtaccggacatatgcccgggaattcggccattacggccgggaatgactttgtacacatgacttcctgctttcattatgaaggaggggaaactagttcccttgtatggtaactccaaagttaaaaaattgtgcatgtctgaggggttgaatatattttgtaaaactctaaatacatttgtatttctgtgctgttctaaagtttacctttttacttatatgaaagataactatatatttaaatcatgtaagtggaacacagtgtagggggtttttccaatcttatttttcatcaggttctcacacccacgtagtatgctgctcaaattttttcgtgtgtgcaaatgtgaacatttgaacatttcagttaggtactgagccagaaaaggtaattgaagttttcagaaagcttctgtgcttagaaaatattttgttgttttcttaaaatattagtattttgtagctggaagaataagatcaaggcttacatgtttcaggccacttggtcactggttcctgaatttagaaaacattggattaatgagttggtgaaggcatttagtggttacaaaaacagtttaaatatttatgattaaaggcttttcacaaacctttttaaagaaaatttagctgagaaaacttaaaaagttttctaaggaagtttaactgtggcacatgttttgatcagaaaggtagttctctttgctctggtagttttaaagtttgtactagttctttatttctgttgtttttttaaattgttaaaattataaatcacgtctaatcatactgaattgtaaaacttgaattgtatctttattttaagcataaatgagaataaaatgatcctgttcaccctgccaaa

SEQ ID NO: 72416 - DNA, 624 bp, Homo Sapiens
tgggatggctcaggaaatgttatcagcaaattgatagaaggttacggaaaaatctaaaatccctaatcatggtacatccttcttggtttatccagaacacttctggctgttaccaagaccatttattagctcgaaattcagccaaaaaattagatacgtgtttaatttggcagaactagcagaacttgtccccatggaatacgttggcataccagaatgcataaaacaagttgatcaagaacttaatggaaaacaagatgaaccgaaaaatgaacagtaagtttggcatctagtccaaacaagactgaagaatgtgctgatggagcagtgctgtttctgcattcataatgcatttattggcccatatttttatgtaacctgttacaaaatagacttgactttttcataatggacttttgtattatacaagggactgttcactgctgtactggtttgcaaatttcttgaatttagctctttaatagctaactgtattattatcgttttatattttatattgctaaatagagaaccacactttatataaagtagtttttgcatttgtttattgaatgatgcatcttcttcggtgaaatatttatatgcataaatggcaaaggaaag

SEQ ID NO: 72417 - DNA, 1609 bp, Homo Sapiens
  misc_feature (437)..(445): n is a, c, g, or t
  misc_feature (717)..(737): n is a, c, g, or t
  misc_feature (845)..(1043): n is a, c, g, or t
  misc_feature (1447)..(1447): n is a, c, g, or t
aaaaaaatgaatcttggtcaacatttaaaccaaagtaaaaggggaaaaaccaaagttatttgttttgcatggctaagccattctgttatctctgtaaatactgtgatttcttttttattttctctttagaattttgttaaagaaattctaaaatttttaaacacctgctctccacaataaatcacaaacactaaaataaaattacttccatataaatattattttctcttttggtgtgggagatcaaaggtttaaagtctaacttctaagatatatttgcagaaagaagcaacatgacaatagagagagttatgctacaattatttcttggtttccacttgcaatggttaattaagtccaaaaacagctgtcagaacctcgagagcagaacatgagaaactcagagctctggaccgaaagcagaaagtttgccgggnnnnnnnnngacaacattattaccatcgattcagtgcctggataaagaggaaagcttacttgtttaatggcagccacatgcacgaagatgctaagaagaaaaagaattccaaatcctcaacttttgaggtttcggctctccaatttaactctttggcaacaggaaacaggttttgcaagttcaaggttcactccctatatgtgattataggaattgtttgtggaaatggattaacatacccgtctatgcctaaaagataataaaactgaaatatgtcttcnnnnnnnnnnnnnnnnnnnnngcctacagcagcggacgcacccttcttcccttaatcgtgggctccatgtccattttcactatacgtcgtcggacaaagttcttaatgagagtcacagctgtattacgnnnnnnnnnnnnnnnnnnnnnnnnnnnnnnnnnnnnnnnnnnnnnnnnnnnnnnnnnnnnnnnnnnnnnnnnnnnnnnnnnnnnnnnnnnnnnnnnnnnnnnnnnnnnnnnnnnnnnnnnnnnnnnnnnnnnnnnnnnnnnnnnnnnnnnnnnnnnnnnnnnnnnnnnnnnnnnnnnnnnnnnnnnnnnnnnnnnnnnntgttgcacttccgcttcctccctcattaacaccctgcgctcggtcgttcaggttgcgtgtatcgttatcagttcacgtcaaggcggtaatatggttttcacataatcacgtgatcatgcatgaaactatatgtgaccatatcgccatcacgaagccagtaatcgtttattcgtcccgttactgttgttttccataggttctacctcctgtatatttacaacaattcttgtctcacgtcactacgtggggaattcctataggaccataactttttcaccttttttcccctgtaagttcctcgtgccctcttctgttctgatttgtcttttacgtattttgttttgttttctccttcgaaaaacttttcctttcctattcttattggaccgatctcacctcgagcnttcttttttcttttggcctggttcataccgcctttcagctcactgtgtcctttctgtcaccatttcttattcatccgcactgtaaattatattgttgatttacttgtattgttactatgttggttcacgtggcttctctctgttgtgttttgcggcaccttg

SEQ ID NO: 72418 - DNA, 700 bp, Homo Sapiens
  misc_feature (78)..(133): n is a, c, g, or t
  misc_feature (417)..(417): n is a, c, g, or t
accaaagtaaaaggggaaaaaccaaagttatttgttttgcatggctaagccattctgttatctctgtaaatactgtgnnnnnnnnnnnnnnnnnnnnnnnnnnnnnnnnnnnnnnnnnnnnnnnnnnnnnnnncacctgctctccacaataaatcacaaacactaaaataaaattacttccatataaatattattttctcttttggtgtgggagatcaaaggtttaaagtctaacttctaagatatatttgcagaaagaagcaacatgacaatagagagagttatgctacaattatttcttggtttccacttgcaatggttaattaagtccaaaaacagctgtcagaacctcgagagcagaacatgagaaactcagagctctggaccgaaagcagaaagtttgccgggaaaaaaaangacaacattattaccatcgattcagtgcctggataaagaggaaagcttacttgtttaatggcagccacatgcacgaagatgctaagaagaaaaagaattccaaatcctcaacttttgaggtttcggctctccaatttaactctttggcaacaggaaacaggttttgcaagttcaaggttcactccctatatgtgattataggaattgtttgtggaaatggattaacatacccgtctatgcctaaaagataataaaactgaaatatgtcttcacaggtctcccg

SEQ ID NO: 72419 - DNA, 1150 bp, Homo Sapiens
  misc_feature (820)..(875): n is a, c, g, or t
cgtgtgtgtttttgttaactaccctacagatattgaatgcaccttgagataatttagtgtttttaactgatacataatttatcaagcagtacatgaaagtgtaataataaaatgtctatgtatctttagttacattcaaatttgtaactttataaacatgttttatgcttgaggaaatttttaaggtggtagtataaatggaaactttttgaagtagaccagatatgggctacttgtgactagacttttaaactttgctctttcaagcagaagcctggtttctgggagaacactgcacagcgatttctttcccaggatttacacaactttaaagggaagataaatgaacatcagatttctaggtatagaactatgttattgaaaggaaaaggaaaactggtgtttgtttcttagactcatgaaataaaaaattatgaaggcaatgaaaaataaattgaaaattaaagtcagatgagaataggaataatactttgccacttctgcattatttagaaacatacgttattgtacatttgtaaaccatttactgtctgggcaatagtgactccgtttaataaaagcttccgtagtgcattggtatggattaaatgcataaaatattcttagactcgatgctgtataaaatattatgggaaaaaaagaaaatacgttattttgcctctaaacttttattgaagttttatttggcaggaaaaaaaattgaatcttggtcaacatttaaaccaaagtaaaaggggaaaaaccaaagttatttgttttgcatggctaagccattctgttatctctgtaaatactgtgnnnnnnnnnnnnnnnnnnnnnnnnnnnnnnnnnnnnnnnnnnnnnnnnnnnnnnnncacctgctctccacaataaatcacaaacactaaaataaaattacttccatataaatattattttctcttttggtgtgggagatcaaaggtttaaagtctaacttctaagatatatttgcagaaagaagcaacatgacaatagagagagttatgctacaattatttcttggtttccacttgcaatggttaattaagtccaaaaacagctgtcagaacctcgagagcagaacatgagaaactcagagctctggaccgaaagcagaaagtttgccggg

SEQ ID NO: 72420 - DNA, 1549 bp, Homo Sapiens
ggtccggaattcccgggatggggggagctgcggcggtggcggtgcaggaggccgggcaggggtgcggagggaccgacggacgcacgggcgggcggccgggagccatggagcgcggccctggggcccgggggcgcgggccggggtgggcttcccacggcacgacatggagacctgtggttgcgaggctccctggggctcggcttggaccgcgatggggctgggccctggcctcctaacggggctgctgtctggggcggtagctgggggggcgctctcccccctgcccgcgactcggagcacccccacccctcccctgccgggccaggccgggcggcgttgttggcgggggccccggtggaggcccggcctgggcggcgcccgccatgaatgggctgtcgctgagtgagctctgctgcctcttctgctgcccgccctgccccggccgcatcgctgccaagctcgccttcctgccgccggaggccacctactccctggtgcctgagcccgagccggggcctggtggggccggggccgcccccttggggaccctgagagcctcctcgggcgcacccgggcgctggaagctgcacctgacggagcgtgccgacttccagtacagccagcgcgagctggacaccatcgaggtcttccccaccaagagcgcccgcggcaaccgcgtctcctgcatgtatgttcgctgcgtgcctggtgccaggtacacggtcctcttctcgcacggcaatgccgtggacctgggccagatgagcagcttctacattggcctgggctcccgcctccactgcaacatcttctcctacgactactccggctacggtgccagctcgggcaggccttccgagaggaacctctatgccgacatcgacgccgcctggcaggccctgcgcaccaggtacggcatcagcccggacagcatcatcctgtacgggcagagcatcggcacggtgcccaccgtggacctggcctcgcgctacgagtgtgccgcggtggtgctgcactcgccgctcacctcgggcatgcgcgtcgccttccccgacaccaagaagacctactgcttcgacgccttccctaacatcgagaaggtgtccaagatcacgtctcccgtgctcatcatccacggcacggaggacgaggtgatcgacttctcgcacgggctggcgctctacgagcgctgccccaaggcggtggagccgctgtgggtggagggcgccgggcacaacgacatcgagctctacagccagtacctggagcgcctgcgtcgcttcatctcccaggagctgcccagccagcgcgcctagcggcggccccaaccggccggacctcagcaataaggcggcccccggacctcaccccgcgccggcccccacccaggggctgcatgtggaccccccgggcggcccaggggaccccgccccgacccaggggctgtggacgatgtacaggcaacagagctacgcactcctttccttttggaagcaagaagaaaatacgtgaaaacggaaattaaagatttaaaattttagggctaaaa

SEQ ID NO: 72421 - DNA, 404 bp, Homo Sapiens
  misc_feature (1)..(1): n is a, c, g, or t
nggggggggattgtcatctcctttggggtgcgatggcttcaaatccaaactgaggctctccgggtggtaaggatgtgcgaggaggcctcttgaagaactccaggcctatcatgctgtctctccgctaaagcctgaggcccgaggtcagaggattcaggaaggctctgcagtcggcccaggagggcggggtcccgtggtggaggcggggagagggaaggaccgcacggagcaccaacccctgctcggccccgtaccaggaagcgctggggggcagaggagcggagttgaggcagaagccaggtgaggctggagtcctggggtaggcaggctgtcgctgccgctgccgctgcctgagatggaaatcgggggaggaagctcgcggaagaaacagcggagggtcgtgg

SEQ ID NO: 72422 - DNA, 632 bp, Homo Sapiens
  misc_feature (51)..(51): n is a, c, g, or t
  misc_feature (57)..(114): n is a, c, g, or t
tacgtggagttcacccgcatcctcaaacatggcgccaaggataaagacgantaggcnnnnnnnnnnnnnnnnnnnnnnnnnnnnnnnnnnnnnnnnnnnnnnnnnnnnnnnnnnccataccagctccctgcccatgaccctcgctcagggatccccctttgaggggttagggtcccagttcccagtggaagaaacaggccaggagaagtgcgtgccgagctgaggcagatgttcccacagtgaccccagagccctgggctatagtctctgacccctccaaggaaagaccaccttctggggacatgggctggagggcaggacctagaggcaccaagggaaggccccattccggggctgttccccgaggaggaagggaaggggctctgtgtgccccccaggaggaagaggccctgagtcctgggatcagacaccccttcacgtgtatccccacacaaatgcaagctcaccaaggtcccctctcagtccccttccctacaccctgaccggccactgccgcacacccacccagagcacgccacccgccatgggagtgtgctcaggagtcgcgggcagcgtggacatctgtcccagagggggcagaatctccaatagaggactgagcactgctaaaa

SEQ ID NO: 72423 - DNA, 912 bp, Homo Sapiens
  misc_feature (860)..(860): n is a, c, g, or t
cagtcgacggtaccggacatatgcccgggaattcggccattacggccgggggcacccagcgagcccaagcgccttctccgcaccagggaagccccacccaccagaagccaagatgtccagcaagcgggccaaagccaagaccaccaagaagcggccacagcgggccacatccaatgtcttcgcaatgtttgaccagtcccagatccaggagtttaaggaggctttcaacatgattgaccagaaccgtgatggcttcattgacaaggaggacctgcacgacatgctggcctcgctggggaagaaccccacagacgaatacctggagggcatgatgagcgaggccccggggcccatcaacttcaccatgttcctcaccatgtttggggagaagctgaacggcacggaccccgaggatgtgattcgcaacgcctttgcctgcttcgacgaggaagcctcaggtttcatccatgaggaccacctccgggagctgctcaccaccatgggtgaccgcttcacagatgaggaagtggacgagatgtaccgggaggcacccattgataagaaaggcaacttcaactacgtggagttcacccgcatcctcaaacatggcgccaaggataaagacgactaggccaccccaggcccctgacaccccagcccccgccagtcacccctccccgcacacacccgtccataccagctccctgcccatgaccctcgctcagggatccccctttgaggggttagggtcccagttcccagtggaagaaacaggccagggagaagtgcgtgccgagcttgaggcagatgttcccacagtgaccccagagccctgggcttattagtcttttgaccccttncaaaggaaaagaccaacttcttgggggacattgggcttggaagggcagggac

SEQ ID NO: 72424 - DNA, 378 bp, Homo Sapiens
ccctgttgaatggactaagttaatggcaactattctctaaggtggacaccacgcgtctcactacacaggaggtgccctgtaaatgattggcagagcctgcctggcctcatccatctcacccctgtccctgtcccagctcacccagcgaggccagcatgtcgtgcaggtcctccttgtcaatgaagccatcacggttctggtcaatcatgttgaaagcctccttaaactcctggatctgggactggtcaaacattgcgaagacattggatgtggcccgctgtggccgcttcttggtggtcttggctttggcccgcttgctggacatcttggcttctggtgggtggggcttccctggtgcggagaaggcgcttgagctcg

SEQ ID NO: 72425 - DNA, 1243 bp, Homo Sapiens
  misc_feature (636)..(680): n is a, c, g, or t
aggccaattccataagtggagttaaccgcatcctcaaaatgcgccaaggataaagacgactagcacacccaagccccctgacacccaagccccgccagtcacccctctccggcacacacccgtccataccagctccctgcccatgaccctcgctcagggatccccctttgaggggttagggtcccagttcccagtggaagaaacaggccaggagaagtgcgtgccgagctgaggcagatgttcccacagtgaccccagagccctgggctatagtctctgacccctccaaggaaagaccaccttctggggacatgggctggagggcaggacctagaggcaccaagggaaggccccattccggggctgttccccgaggaggaagggaaggggctctgtgtgccccccaggaggaagaggccctgagtcctgggatcagacaccccttcacgtgtatccccacacaaatgcaagctcaccaaggtcccctctcagtccccttccctacaccctgaccggccactgccgcacacccacccagagcacgccacccgccatgggagtgtgctcaggagtcgcgggcagcgtggacatctgtcccagagggggcagaatctccaatagaggactgagcactgnnnnnnnnnnnnnnnnnnnnnnnnnnnnnnnnnnnnnnnnnnnnncaagaggggggggccacgcactaatgaagatatctccccgccgaggaggggcgccacgagcttcatacgcggatcagccaagcttctgctgggagaacaagcggggcgcccactataataggaggaggtcctaattataatcgaacgatagagcgacgtgggcgcgcgcgaggtataatcacaaacgggttgagacacgggggcgaaaacaaggcgtgcgcccacgctgaggggccacccacttggggggtgaacgagagacaacactctatgaactccgagtgggggggcgcgagcaccaaatagcggtggggcaccccaaaatgactacctctcttgagacgaagagatattttaacagcgcctcttcatctgagggggaatacaatctatatacaccaattttctagacacaggatgggattattatctgcgtgtgggtcaatacaccaccagttgcgctggcgataattatgggtgctgggtggcctgaccttatgaaacatgatttgggctctactgccggggacattgcgtgtctttgttgtccaaacacattttct

SEQ ID NO: 72426 - DNA, 925 bp, Homo Sapiens
gcttagtcctctattggagattctgccccctttgggacagatgtccacgctgcccgcgactcctgagcacactcccatggcgggtggcgtgctctgggtgggtgtgcggcagtggccggtcagggtgtagggaaggggtgtctgatcccaggactcagggcctctttctcctggggggcacacagagccccttcccttcctcctcggggaacagccccggaatgggggccttcccttggtgcctttaggtcctgccctccagcccatgtccccagaaggtggtctttccatggaggggtcagagactatagcccagggctctggggtcactgtgggaacatctgcctcagctcggcacgcacttctcctggcctgtttcttccactgggaactgggaccctaacccctcaaagggggatccctgagcgagggtcatgggcagggagctggtatggacgcgtgtgtgcggggaggggtgactggcgggggctggggtgtcagggggctggggtggcctagtcgtctttatccttggcgccatgtttgaggatgcgggtgaactccacgtagttgaagttgcctttcttatcaatgggtgcctcccggtacatctcgtccacttcctcatctgtgaagcggtcacccatggtggtgagcagctcccggaggtggtcctcatggatgaaacccagcgaggccagcatgtcgtgcaggtcctccttgtcaatgaagccatcacggttctggtcaatcatgttgaaagcctccttaaactcctggatctgggactggtcaaacattgcgaagacattggatgtggcccgctgtggccgcttcttggtggtcttggctttggcccgcttgctggacatcttggcttctggtgggtggggcttccctggtgcggagaaggcgcttgggctcg

SEQ ID NO: 72427 - DNA, 695 bp, Homo Sapiens
  misc_feature (73)..(73): n is a, c, g, or t
  misc_feature (129)..(181): n is a, c, g, or t
  misc_feature (590)..(613): n is a, c, g, or t
gcttcacagatgaggaagtggacgagatgtaccgggaggcacccattgataagaaaggcaacttcaactacgntggagttcacccgcatcctcaaacatggcgccaaggataaagacgactaggccacnnnnnnnnnnnnnnnnnnnnnnnnnnnnnnnnnnnnnnnnnnnnnnnnnnnnngtccataccagctccctgcccatgaccctcgctcagggatccccctttgaggggttagggtcccagttcccagtggaagaaacaggccaggagaagtgcgtgccgagctgaggcagatgttcccacagtgaccccagagccctgggctatagtctctgacccctccaaggaaagaccaccttctggggacatgggctggagggcaggacctagaggcaccaagggaaggccccattccggggctgttccccgaggaggaagggaaggggctctgtgtgccccccaggaggaagaggccctgagtcctgggatcaaacaccccttcacgtgtatccccacacaaaagcaagctcaccaaggtcccctttcagtccccttccctacaccctgaccggccacttccgcacannnnnnnnnnnnnnnnnnnnnnnnatgggagtgtgctcaggagtcgcgggcagggtggacatttgtcccaaagggggcaaaatttcccataaagggctgagccctg

SEQ ID NO: 72428 - DNA, 1010 bp, Homo Sapiens
  misc_feature (523)..(569): n is a, c, g, or t
agatgtccagcaagcgggccaaagccaagaccaccaagaagcggccacagcgggccacatccaatgtcttcgcaatgtttgaccagtcccagatccaggagtttaaggaggctttcaacatgattgaccagaaccgtgatggcttcattgacaaggaggacctgcacgacatgctggcctcgctggggaagaaccccacagacgaatacctggagggcatgatgagcgaggccccggggcccatcaacttcaccatgttcctcaccatgtttggggagaagctgaacggcacggaccccgaggatgtgattcgcaacgcctttgcctgcttcgacgaggaagcctcaggtttcatccatgaggaccacctccgggagctgctcaccaccatgggtgaccgcttcacagatgaggaagtggacgagatgtaccgggaggcacccattgataagaaaggcaacttcaactacgtggagttcacccgcatcctcaaacatggcgccaaggataaagacgactaggnnnnnnnnnnnnnnnnnnnnnnnnnnnnnnnnnnnnnnnnnnnnnnngcacacacccgtccataccagctccctgcccatgaccctcgctcagggatccccctttgaggggttagggtcccagttcccagtggaagaaacaggccaggagaagtgcgtgccgagctgaggcagatgttcccacagtgaccccagagccctgggctatagtctctgacccctccaaggaaagaccaccttctggggacatgggctggagggcaggacctaaaggccccaagggagggcccattccggggctgttcccccaaggaggaaagggaatgggcctctgtgttgcccccccaggagggaaaagcccctgagtccctggggaaccgaaacaccccctttccggtggattccccaccccaaaatggccagcctccaccaaagggtgcccctctttcagaaccccccttttcccctaacaccccctggaacccgggc

SEQ ID NO: 72429 - DNA, 1051 bp, Homo Sapiens
  misc_feature (25)..(25): n is a, c, g, or t
  misc_feature (602)..(658): n is a, c, g, or t
  misc_feature (667)..(667): n is a, c, g, or t
  misc_feature (698)..(698): n is a, c, g, or t
  misc_feature (717)..(717): n is a, c, g, or t
cggtccggaattcccgggatcgccnttctccgcaccagggaagccccacccactcagaagccaagatgtccagcaagcgagtgccaaagccaagaccaccaagaagcggccacagcggtgccatcatccaatgtcttcgcaatgtttgaccacgtcccagatccaggagtttaagcgaggctttcaacatgattgaccagtaaccgtgatggcttcattgacaaggaggacctgcacgactatgctggcctcgctggggaagaaccccacagacgaatacctggagggcatgatgagcgaggccccggggcccatcaacttcacctagtgttcctcaccatgtctggggagaagctgaacggctacggacccctgaggatgtgattcgctaacgcctttgcctgcttcgacgaggaagcctcaggtttcatccatgaggaccacctccgggagctgcttcaccaccatgggtgaccgcttcacagcatgaggaagtggacgagatgtaccggtgaggcacccattgataagaaaggctaacttcaagctacgtggagttcacccgcatcctcaaacatggcgccaaggataaaacggactannnnnnnnnnnnnnnnnnnnnnnnnnnnnnnnnnnnnnnnnnnnnnnnnnnnnnnnngcacacacnccgtccataccagcttccctgcccatgaccnctcgctcagggatcccccntttgaggggttagggtcccagttcccagtggaagaaacaggccagggagaagtgcgtgccgagctgaggcagatgttccccacagtgaccccagagcccctgggctatagtctctgacccctccaaagaaagacccacttctggggacatgggctggagggcaggacctagaggcacccagggaagccccaattccggggctgttcccccaggagggaagggaaagggcttcttggtggcccccccaggagaaaaaggccctggagtcctgggaatcaaaaaccccccttccggtggtatcccccacaccaaagggcaaggctcccccaggggt

SEQ ID NO: 72430 - DNA, 1066 bp, Homo Sapiens
  misc_feature (400)..(458): n is a, c, g, or t
  misc_feature (1054)..(1054): n is a, c, g, or t
ggggccccctgggggaaggtgtgccatttgttggggggggtaaccccggaagagggggttttttattcccccgggttctaagggcccttttcccttttgggggggcccacaaagagccccttttccctttctttctgggggaaccagccccggaaatggggccctccccctggggccctttaggtcctgccttccaggcccaattcccccaggaaggtggtttttccttggaggggtccagagattatagcccaggggttctggggtccatgtgggaacatctgcctaagctcgggcacgcacttctcctggcctgtttctttccattggaactggggcccctaacccctcaaagggggatccctgagcgagggtcatggcaggggagctggtatggacnnnnnnnnnnnnnnnnnnnnnnnnnnnnnnnnnnnnnnnnnnnnnnnnnnnnnnnnnnnctagttcgtctttatccttggcgccatgtttgaggatgcgggtgaactccacgtagttgaagttgcctttcttatcaatgggtgcctcccggtacatctcgtccacttcctcatctgtgaagcggtcacccatggtggtgagcagctcccggaggtggtcctcatggatgaaacctgaggcttcctcgtcgaagcaggcaaaggcgttgcgaatcacatcctcggggtccgtgccgttcagcttctccccaaacatggtgaggaacatggtgaagttgatgggccccggggcctcgctcatcatgccctccaggtattcgtctgtggggttcttccccagcgaggccagcatgtcgtgcaggtcctccttgtcaatgaagccatcacggttctggtcaatcatgttgaaagcctccttaaactcctggatctgggactggtcaaacattgcgaagacattggatgtggcccgctgtggccgcttcttggtggtcttggctttggcccgcttgctggacatcttggcttctggtgggtggggcttccctggtgcggagaaggcgcttgggctcgctgggtgcgtggaactgggccgnccgtcgggtctg

SEQ ID NO: 72431 - DNA, 1560 bp, Homo Sapiens
  misc_feature (1448)..(1482): n is a, c, g, or t
tttttttaagtatttaaagagatttattaaatcatcttatcacaaagatggaaacatatacaaactagaaacatgcaaccatcatcttccacagtcaagtcacaatgtcaaatatttttcttgcctctgcagatgaaaagttcagatcttatacccaactacttactcaccccgaatatttaagtcagtcttcctgaaagtactcagggtagcaagtaacaaaatgcaaacgattatataaagaaagtgcagttaaaaaggaaactatgtggcaagtaccctctttcccttcccaccccccaattaaaggcaaacaatggcactttgctcttgcttaacctagattgtcttcaaaaactattaaaatgtaaaagacttaacacaaaaacataaagacgtttaacagatgtcaaaaagctccttagtgtttgaaaataaatgcttaaacaaaagacaacatattttatatcaaacaagtttgaagagccctgaattgcagcattctgtaacataaacaaacaaaaagctggtataggatttattgtcaaaggcagaatttcttcaggcaggtaagtaaggaggtggtggttctttttcaggcattttcacggccatttcataggttggcaaaacgtactgaggaggtgcttcaaaggcagggtacacagcaatctccggcacgtttcggttgttgatgtatttatagcagttccaaacacagttaattagataagccttaaaaatgatgaataaggcaaagaacacaagaacaatgaacaggaggcagctggagtccaaggccaggaggtcatctttgtagggaaaatcaggtagttgatccagatattctttgattcttggcaaataggtgagagaactaatagcaaccaggcaactgaggacgaagtcaaaaagtcggtaacagaagaatggaatcagccaacccacttgataagaaattgctccataaaccagcattgaactgattataaacataagaacagagacggcaaaaagaacacaggcattatcagccattctctcagacgaatagtaattaccgatgacttcatactgaatgttgacagctggcatggagtttggatgagtcacttccacagtcagcaaaattgccatcaataggtttactaccatgtaccaggtccccaggatgatcgtcccggtgcggacatggcaacagccgcagcaccgggtgctgtagaaccggtcactgcggttccgcttgaaactcatggacaccatcgtaacaggcgggcctccttcttggccgggcccctgacaaacgttctccacccgcagccaaactcaaacggctgtttcacggcctccaaaacccaacgacgcgtcttcaaacccgcccccggctcgtgccccacccggaccgtaatggccgaattcccgggcatatgtccgctaccgtcgactgnnnnnnnnnnnnnnnnnnnnnnnnnnnnnnnnnnncggccgcttcctcgctcactacttcgctgcgctcgtcgttcggctgctagagctagcccctatagtgaatacaagtct

SEQ ID NO: 72432 - DNA, 1011 bp, Homo Sapiens
  misc_feature (46)..(84): n is a, c, g, or t
  misc_feature (88)..(122): n is a, c, g, or t
tgatagactcactaattagaggccgcttaaagactcggctgtagtnnnnnnnnnnnnnnnnnnnnnnnnnnnnnnnnnnnnnnnccgnnnnnnnnnnnnnnnnnnnnnnnnnnnnnnnnnnncagtcgacggtaccggacatatgcccgggaattcggccattacggccgggggcgtcgttgggtttggaggccgtgaaacagccgtttgagtttggctgcgggtggagaacgtttgtcaggggcccggccaagaaggaggcccgcctgttacgatggtgtccatgagtttcaagcggaaccgcagtgaccggttctacagcacccggtgctgcggctgttgccatgtccgcaccgggacgatcatcctggggacctggtacatggtagtaaacctattgatggcaattttgctgactgtggaagtgactcatccaaactccatgccagctgtcaacattcagtatgaagtcatcggtaattactattcgtctgagagaatggctgataatgcctgtgttctttttgccgtctctgttcttatgtttataatcagttcaatgctggtttatggagcaatttcttatcaagtgggttggctgattccattcttctgttaccgactttttgacttcgtcctcagttgcctggttgctattagttctctcacctatttgccaagaatcaaagaatatctggatcaactacctgattttccctacaaagatgacctcctggccttggactccaggctgcctcctgttcattgttctttgtgttcttttgccttattcatcattttttaaggcttatctaattaactgtgtttggaactgctataaatacatcaacaacgaaagtgccggagattgtgtgtaccctggctttgaagcacctcctcaggtaagtttggcaagctatgaaatggcgtgaaaatgctgaaaagaacacatcttattacctgctgaaaatttggtttggattaatctaaccagtttggtggtttgtcgag

SEQ ID NO: 72433 - DNA, 1276 bp, Homo Sapiens
  misc_feature (83)..(117): n is a, c, g, or t
taactgtatagactcactatagggcgctcccttagtagccgaacgaccgagcgcagcgaagttgtgagcgaggaagcggccgnnnnnnnnnnnnnnnnnnnnnnnnnnnnnnnnnnncagtcgacggtaccggacatatgcccgggaattcggccattacggccgggggcgggttgaagacgcgtcgttgggttttggaggccgtgaaacagccgtttgagtttggctgcgggtggagaacgtttgtcaggggcccggccaagaaggaggcccgcctgttacgatggtgtccatgagtttcaagcggaaccgcagtgaccggttctacagcacccggtgctgcggctgttgccatgtccgcaccgggacgatcatcctggggacctggtacatggtagtaaacctattgatggcaattttgctgactgtggaagtgactcatccaaactccatgccagctgtcaacattcagtatgaagtcatcggtaattactattcgtctgagagaatggctgataatgcctgtgttctttttgccgtctctgttcttatgtttataatcagttcaatgctggtttatggagcaatttcttatcaagtgggttggctgattccattcttctgttaccgactttttgacttcgtcctcagttgcctggttgctattagttctctcacctatttgccaagaatcaaagaatatctggatcaactacctgattttccctacaaagatgacctcctggccttggactccagctgcctcctgttcattgttcttgtgttctttgccttattcatcatttttaaggcttatctaattaactgtgtttggaactgctataaatacatcaacaaccgaaacgtgccggagattgctgtgtaccctgcctttgaagcacctcctcagtacgttttgccaacctatgaaatggccgtgaaaatgcctgaaaaagaaccaacaactccttacttacctgcctgaagaaattctgcctttgacaataaatcctataccagcttttggttcgtttatgttacagaaatgctgcaattcagggctcttcaaactggtctgatataccatatgtgtcataagtaaaagcatttattttcacaccactaaggagctttttggaccatctggtcacacgtccttacgttacgcagtcacgtcctttaccactttaataggttgttgagcacaatctaaggtaaggcacagagccaaggtgccactggttgccctttaaatggggggtggcacaggcgcaca

SEQ ID NO: 72434 - DNA, 1029 bp, Homo Sapiens
aaaactacggctaggtacgaggctgggtgtgaattcggcacgaggcgagcgcggtcgcggaagtatcgcggcttacatatctcgcagccaggcgggtcctgggagaggcgcgagccaggcctggtcggcgcccgcggagaaaagaagcagtcaagcccatgaactacaaccccggttgccgctttctcctctcctaaccgttaagtgcgctaagggccatggctgaggtgcacgtgatcgggcagatcataggggccagcggtttctcggaaagtagcctcttctgcaagtggggcattcacacaggggcggcatggaagctcctgtcaggcgtgcgggagggccaaacgcaagtggacaccccgcagataggggacatggcttactggtcccaccccatcgacctgcacttcgccaccaaaggtcttcaaggctggccccggctccatttccaggtgtggtcccaggacagctttggccgctgccagcttgcaggctatggattttgccatgtgcccagtagcccgggcacccaccagctggcctgccccacgtggcggcccctgggcagttggcgagaacagttggcacgggctttcgtgggtggtgggccgcagctgctgcatggggacaccatctacagtggggccgaccgctatcgcctgcacacagctgctggtggcaccgtgcacctggagatcggcctgctgctccgcaacttcgaccgctacggcgtggagtgctgagggactctgcctccaacgtcaccaccatccacaccccggacacccagtgatgggggaggatggcacagtggtcaagagcacagactctagagactgtcagagctgaccccagctaaggcatggcaccgcttctgtcctttctaggacctcggggtccctctgggcccagtttccctatctgtaaattggggacagtaaatgtatggggtcgcagggtgttgagtgacaggaggctgcttagccacatgggaggtgctcagtaaaggagagcaattcttacagg

SEQ ID NO: 72435 - DNA, 1502 bp, Homo Sapiens
ggattccagagagcgtgtgtggctgcagcctgcaccgttgctgcccgctgcccaggacgcggggtgggggacaggagccagagtggtgcctcctgcagaccaatctggggccccaaggtggggggccctacagagatgctccgaggcatgtacctcactcgcaacgggaacctgcagaggcgacacacgatgaaggaagccaaggacatgaagaacaagctggggatcttcagacggcggaatgagtcccctggagcccctcccgcgggcaaggcagacaaaatgatgaagtcattcaagcccacctcagaggaagccctcaagtggggcgagtccttggagaagctgctggttcacaaatacgggttagcagtgttccaagccttccttcgcactgagttcagtgaggagaatctggagttctggttggcttgtgaggacttcaagaaggtcaagtcacagtccaagatggcatccaaggccaagaagatctttgctgaatacatcgcgatccaggcatgcaaggaggtcaacctggactcctacacgcgggagcacaccaaggacaacctgcagagcgtcacgcggggctgcttcgacctggcacagaagcgcatcttcgggctcatggaaaaggactcgtaccctcgctttctccgttctgacctctacctggaccttattaaccagaagaagatgagtcccccgctttaggggccactggagtcgagctcagcgttcacaccaggcgggctgggtcccctgcccacctgcctccctgccccctgtgacggagggggcaagcaagccccccagaggccgtgtctctggacagacggatagacatacggaagcgaggcctggaccaagagaggcccaggctactggaggagtagaaggatgggccccgtggggtccccactgccccggtacgagggggcccaagaccctggcaggtcaggggccctggccaagccagatctggagctgctgctccctgctgcggagaccgcggaggcttcgcgttgaccaagttccttaaagaactggctgatggggcaggaggtccaggcctgggctctcgggccctcctagagggccattggagcttgcagctcagacccccactttgagttttatttatttaaatagtagttggatgcttggcacgtcgtcctgtaataggaaacccttgcctcatcagttttcctgatttacaagtgcaatattttagccaatgccttgggagaagctgccatgcaaaggtggacaccattctccagcttcaggggatatgctcgtcccgggcaccggtggcaggcagctggccttctggactaaggcagcctggggggacactgcagtctggctacacacagagatctggcaccccctgggtggagtgtccctcgggggctttgggaaagcatggcaccctcagaccacacagtagccaagttctggagcaaataaaaggcctgtgttatttcttgttcttgaca

SEQ ID NO: 72436 - DNA, 770 bp, Homo Sapiens
tagtcactgtgaatatttcacattcagcctccatgcagtagagatttgagtttaatttcatgtccatgtgactttcatgtttcctatctcatagctcatgctactacataagccaaaacatgtatctcatcattggaagtaagatcagggctgatattcacctgggatagacagtattggtgaactactcatttactacagtgtctcagccttgataaagggcagtggattgcctgttgttcggtgttgtgaatagcacctctgaataagattagagtgtttcttaattcatttcaaactctaaaattagattaatggtggtgctaagaaagagtattaattactttgggaatggtcaaaattaacattaaaaacattttagacaaaaagtttcattgtacattcaaagaaaatgtaagtttggaagtactaaaagactattttatacttgttgattaatcggaatgtttgttgtatgccttcattttccatttcacttatatgtgtatgtccatatatgttaattttcattgtagcaaagctaatggaaataaagctaatgctctagttgaaagaaaaggaaaactcctgaaatcctagaatgtcttgttatttttagctgactgtaaaatattatgaacagtctttgtgtattgtgcttaatgcttttgtaagaaacagaatttgaaatatttcatccttgtcatgctcaaaattttgttacatgcttgttattcagagtataataaagttttgtacaggcctaaaaa

SEQ ID NO: 72437 - DNA, 685 bp, Homo Sapiens
  misc_feature (85)..(85): n is a, c, g, or t
aagtactttcatactgaaatcaaatcatttttactgtgtaaattgtattcttaacattttgtattttgtaggattgatcttattntgagacaagggttgtaaaatgtattgctctcagaattcatccccttcttagtattaggtcattcttcatctgtataatttttattaactttgagattcttatacagaaaatagttgcaagggtaaggtaattaactttagatcccttcatttctaaagcaattattgagtgcttaaaatttaaggttgttttagagtggagtttgtgagtaaaagaggagcccagggagacagattgcaagtagtaggttgcaatcttttagattcagcttgtaataatctttgagccacaccaaaaggaatgccaagggctctctaaatttagccagtaggaagctactgctctcctggcaaggattaattggcacattctgttaagatatccctcatgacagttgccctttcaaagcaggaggaagaaaaggaagaaagaaaaactgtttcatcatttctgttagggtaggaaatgaatcatagggtaaaatggatgagtagatagaagtctctcatttaaaaagtgtcttttgcaatcttgatgtaatgcactttttataaggacttgagatctcaaataaaatttctgtaaagaatttccaaaaaa

SEQ ID NO: 72438 - DNA, 1893 bp, Homo Sapiens
  misc_feature (1815)..(1834): n is a, c, g, or t
ggtccaaggaagcgaggcctgggtggcgaattcggcacgaggagttgggcaagcaccagtacctgcaccggcaccggcaccatgagtctgaggatgaatgcgcactcgatttggaccttgtgactgatctggttctgcacatcgatgctcgcggggaaccaggtgggatcctgtgcttcctgcctgggtggcaggagatcaaaggagtgcagcagcgcctccaggaggccctgggcatgcacgagagcaagtacctcatcctgccagtgcactccaacatccccatgatggatcagaaggccatattccagcagcctccagttggggtgcgcaagattgtcttggccaccaacattgctgagacttccatcacaatcaatgacatcgtgcatgtggtggacagtgggctgcacaaggaagaacgctatgacctgaagaccaaggtgtcctgcctggagacagtgtgggtatcaagagccaatgtgatccagcgccggggccgggcgggccgctgccagtccggctttgcctaccacttgttccctcgaagccggctggagaaaatggtccctttccaagtgccagagatcctgcgcacacctcttgagaacctggtgctgcaagcgaaaatccacatgcctgagaagacggcggtggagttcctgtccaaggctgtggacagtccaaacatcaaggcagtggacgaggctgtgatcttgctccaggagatcggggtgctggaccagcgggagtacctgactaccctggggcagcgcctggctcacatctccaccgacccccggttggccaaggccattgtgttggctgccatcttccgttgcctgcacccactactggtggtcgtttcctgcctcacccgggaccccttcagcagcagcctacagaaccgggcagaggtggacaaggtgaaagcactgttgagccatgacagcggcagtgaccacctggcctttgtgcgggctgtcgccggctgggaggaggtgctgcgttggcaggaccgcagctcccgggagaattacctggaggaaaacctgctgtacgcacccagcctgcgcttcatccacggactcatcaagcagttctcagagaacatttatgaggccttcctggtggggaagccctcggactgcaccctggcctccgcccagtgcaacgagtacagtgaggaggaggagctggtgaagggcgtgctgatggccggcctctaccccaacctcatccaggtgaggcagggcaaggtcacccggcaggggaagttcaagcccaacagcgtcacatataggaccaaatcaggcaacatcctgctgcacaagtcgaccattaacagggaggccacacggttacggagccgatggctgacgtatttcatggcagtcaagtccaatggcagcgtcttcgtccgggactcctctcaggtgcacccgctagctgtgctgctgctgaccgacggggacgtgcacatccgtgatgacgggcgccgggccaccatctcactgagcgacagtgacctgctgcggctggagggtgactcgcgtaccgtgcggctgctgaaggagctgcggcgggccctgggccgcatggtggagcggagcctgcgcagcgagctggctgcacttccccccagcgtacaggaggagcacgggcagctgcttgcgctactggcagagctgctgcgaggaccctgtggcagctttgatgtgcgcaagacagctgacgactgagccctgcttctgctggggctgtgtacagagtgcaaatgtttatttaaaataaagttctatttatcccttgtgnnnnnnnnnnnnnnnnnnnncctgagcaggcggccgcaagcttattccctttagttgagggttaattttagcttggcac

SEQ ID NO: 72439 - DNA, 1004 bp, Homo Sapiens
  misc_feature (744)..(744): n is a, c, g, or t
  misc_feature (851)..(851): n is a, c, g, or t
  misc_feature (864)..(865): n is a, c, g, or t
  misc_feature (920)..(920): n is a, c, g, or t
  misc_feature (973)..(973): n is a, c, g, or t
  misc_feature (978)..(978): n is a, c, g, or t
tgggaagaccacgcgcatcccccagctgttgctggagcgctatgtgaccgagggccgaggtgcccgctgcaatgttatcatcacccaacctcgccgcatctctgctgtgtctgtggcacagcgggtcagccacgaactgggcccctccctgcgccggaatgtgggcttccaggtgcggttggaaagtaagcccccatcccgaggcggggccctgctcttctgcactgtgggtatcctgctgcgtaagctgcagagcaaccccagcctggagggcgtgagccacgtcatcgtggatgaggtgcatgagcgggacgtgaacacagactttctgctgatcctgctcaagggcctgcagcggctcaacccggccctgcggctggtgctcatgagtgccacaggggacaatgagcgcttctcccgatactttggtggctgccccgtcatcaaggtgcctggcttcatgtacccagtcaaggagcactacctagaggacatcctggccaagttgggcaagcaccagtacctgcaccggcaccggcaccatgagtctgaggatgaatgcgcactcgatttggaccttgtgactgatctggttctgcacatcgatgctcgcggggaaccaggtgggatcctgtgcttcctgcctgggtggcaggagatcaaaggagtgcagcagcgcctccaggaggccctgggcatgcacgagagcaagtacctcatcctgccagtgcactccaacatccnccatgaatggatcagaaggccatattccagcagccctccagttgggggtgcgcaaagaattgtcttggccaccaacattgctgagacttccatcacaatcaatgacnatcctggcaagtnngggggaacagtgggcttgcacaagggaagaacgctatgacctgaaagaccaaggntgtcctggcctggaagaacagtggtggggtatcaaagaaggccaatggtgatnccaancgccccggggggcccggggcgggggc

SEQ ID NO: 72440 - DNA, 1222 bp, Homo Sapiens
  misc_feature (22)..(22): n is a, c, g, or t
ggcactgtactatgaaccagtngttcaaaaaaggcaggctggtacgcgtcggaatcccgggatatcgtcgacccacgcgtcgggcggggatacagcctggaaggtgcgtgtggggctgggtctcggagtgggagacgtggagtgcaggctggagcgaccgtgtctggggagccgagccccgcttctcgctgcggtgagcccggactggggcacgcactgcgcagactccccgctgcagtgggcggagctcccacaggccccgccccctcctcccaccctcgttcagcctgtccagacagaagctggggcccagcggaggtagcagcagacgcctgagagcgaggccgaggcccctcagggtttggagaccctgacacacccaccttctcacctgggctctgcgtatcccccagccttgagggaagatgaagcctaaactgatgtaccaggagctgaaggtgcctgcagaggagcccgccaatgagctgcccatgaatgagattgaggcgtggaaggctgcggaaaagaaagcccgctgggtcctgctggtcctcattctggcggttgtgggcttcggagccctgatgactcagctgtttctatgggaatacggcgacttgcatctctttgggcccaaccagcgcccagccccctgctatgacccttgcgaagcagtgctggtggaaagcattcctgagggcctggacttccccaatgcctccacggggaacccttccaccagccaggcctggctgggcctgctcgccggtgcgcacagcagcctggacatcgcctccttctactggaccctcaccaacaatgacacccacacgcaggagccctctgcccagcagggtgaggaggtcctccggcagctgcagaccctggcaccaaagggcgtgaacgtccgcatcgctgtgagcaagcccagcgggccccagccacaggcggacctgcaggctctgctgcagagcggtgcccaggtccgcatggtggacatgcagaagctgacccatggcgtcctgcataccaagttcctgggtgggtggaccagacccacttctacctgggcagtgccaacatggactggcgttcactgaccccaggtcaaggaacctggggcgtggtcatgtacaactgcagctgcctgggctcgagaacctgacccaggatcttttgaaggccctacctggtttcctggggcccaggccagcaagcctcc

SEQ ID NO: 72441 - DNA, 2183 bp, Homo Sapiens
caaataggctaggtcgaggctggggtttaatcggcacgaggggtcgtgtggggctgggtctcggagtgggagacgtggagtgcaggctggagcgaccgtgtctggggagccgagccccgcttctcgctgcggtgagcccggactggggcacgcactgcgcagactccccgctgcagtgggcggagctcccacaggccccgccccctcctcccaccctcgttcagcctgtccagacagaagctggggcccagcggaggtagcagcagacgcctgagagcgaggccgaggcccctcagggaacaccccacacagtgcccacttttgttctgccagtttggagaccctgacacacccaccttctcacctgggctctgcgtatcccccagccttgagggaagatgaagcctaaactgatgtaccaggagctgaaggtgcctgcagaggagcccgccaatgagctgcccatgaatgagattgaggcgtggaaggctgcggaaaagaaagcccgctgggtcctgctggtcctcattctggcggttgtgggcttcggagccctgatgactcagctgtttctatgggaatacggcgacttgcatctctttgggcccaaccagcgcccagccccctgctatgacccttgcgaagcagtgctggtggaaagcattcctgagggcctggacttccccaatgcctccacggggaacccttccaccagccaggcctggctgggcctgctcgccggtgcgcacagcagcctggacatcgcctccttctactggaccctcaccaacaatgacacccacacgcaggagccctctgcccagcagggtgaggaggtcctccggcagctgcagaccctggcaccaaagggcgtgaacgtccgcatcgctgtgagcaagcccagcgggccccagccacaggcggacctgcaggctctgctgcagagcggtgcccaggtccgcatggtggacatgcagaagctgacccatggcgtcctgcataccaagttctgggtggtggaccagacccacttctacctgggcagtgccaacatggactggcgttcactgacccaggtcaaggagctgggcgtggtcatgtacaactgcagctgcctggctcgagacctgaccaagatctttgaggcctactggttcctgggccaggcaggcagctccatcccatcaacttggccccggttctatgacacccgctacaaccaagagacaccaatggagatctgcctcaatggaacccctgctctggcctacctggcgagtgcgcccccacccctgtgtccaagtggccgcactccagacctgaaggctctactcaacgtggtggacaatgcccggagtttcatctacgtcgctgtcatgaactacctgcccactctggagttctcccaccctcacaggttctggcctgccattgacgatgggctgcggcgggccacctacgagcgtggcgtcaaggtgcgcctgctcatcagctgctggggacactcggagccatccatgcgggccttcctgctctctctggctgccctgcgtgacaaccatacccactctgacatccaggtgaaactctttgtggtccccgcggatgaggcccaggctcgaatcccatatgcccgtgtcaaccacaacaagtacatggtgactgaacgcgccacctacatcggaacctccaactggtctggcaactacttcacggagacggcgggcacctcgctgctggtgacgcagaatgggaggggcggcctgcggagccagctggaggccattttcctgagggactgggactccccttacagccatgaccttgacacctcagctgacagcgtgggcaacgcctgccgcctgctctgaggcccgatccagtgggcaggccaaggcctgctgggcccccgcggacccaggtgctctgggtcacggtccctgtccccgcgcccccgcttctgtctgccccattgtggctcctcaggctctctcccctgctctcccacctctacctccacccccaccggcctgacgctgtggccccgggacccagcagagctgggggagggatcagcccccaaagaaatgggggtgcatgctgggcctggccccctggcccacccccactttccagggcaaaaagggcccagggttataataagtaaataacttgtctgtaaa

SEQ ID NO: 72442 - DNA, 1521 bp, Homo Sapiens
  misc_feature (1057)..(1057): n is a, c, g, or t
  misc_feature (1405)..(1420): n is a, c, g, or t
ctggaaggtgcgtgtggggctgggtctcggagtgggagacgtggagtgcaggtaatgcatgtccatggtacacaaattcacaaggtttgtaaatgagaaaagacgtgaggttcctttgttctttacctgtggcctccctgccctacacggggactctagggtggaatgtagcaaagcccatccaccagccatgtactacccccctaacccggccaggctggagcgaccgtgtctggggagccgagccccgcttctcgctgcggtgagcccggactggggcacgcactgcgcagactccccgctgcagtgggcggagctcccacaggccccgccccctcctcccaccctcgttcagcctgtccagacagagctggggcccgcggaggtagcagcagacgcctgagagcgaggccgaggcccctcagggtttggagaccctgacacacccaccttctcacctgggctctgcgtatcccccagccttgagggaagatgaagcctaaactgatgtaccaggagctgaaggtgcctgcagaggagcccgccaatgagctgcccatgaatgagattgaggctgtggaaggctgcggaaaagaaagcccgctgggtcctgctggtcctcattctggcggatgtgggcttcgagagccctgatgactcagctgtatctatgggaatacaggagactttgcatctctttgggccccaaacagagacccagacccctgctatgacccttgcgaagcagtgctggtggaaagcattcctgaaggcctggacttccccaatgcctccacggggaaaccttccaccagccaggcctggctgggcctgctcgccggtgcgcacagcagcctggacatcgcctccttctactggaccctcaccaacaatgacacccacacgcaggagccctctgcccagcagggtgaggaggtcctccggcagctgcagaccctggcaccaaagggcgtgaacgtccgcatcgctgtgagcaagccccagcgggccccagccacaggcggacctgcaggctctgctgcagagcggtgcccangtccccatgttggacatgcagaagctgacccatggcgtcctgcataccaaagttctgggtggtggaccagaccccactttctacctgggcagtgccaacatggactgccgttcactgaccccagtcaaggacttgggcgtggggcatggacaactgcagctggcttggctccagacctgaccaaaaactttgaggcctacgggtttccggggcccaggcagggaagctccctcccatcaatttggcccccggttcaatgaaccccccccttccaaccagaaaccccccaatgggggattttgccctcaaatggaaacccctggttctgggccaaaccgggggagaggnnnnnnnnnnnnnnnntttgtccccagaggtgcccccacctcccaaaccttaaaggctttttttccaaaccgtggggggaaacaatgccccccgaaatttcaactcgactcgctttg

SEQ ID NO: 72443 - DNA, 585 bp, Homo Sapiens
gtgcgtctactttcagtctgagggtgccttgatgctggctcatcacacattgagtatcttgggcattatcatggcccttgtgcttggggagtctggcacagaggtcaatgcagtcctctttggaagtgagcttaccaaccccttgctacagatgcgctggtttctccgggaaacagggcactatcacagtttcactggagatgtagtggacttcctctttgtggctctgttcacaggagtgaggattggtgtgggagcttgcctccttttctgtgaaatggtctcccccacgcctaagtggtttgtgaaggctgggggagtagcgatgtatgctgtgtcttggtgtttcatgtttagcatctggcgctttgcatggaggaagagcatcaagaagtaccatgcttggagaagcaggcggagtgaggaacggcagctgaaacacaacggacatctcaaaatacactagccaaggcttgctccagattatggattgggttaagtcagccatgggaaccaggttggaaatatgactgttacataattacacttataacaaacttaggtttcaataaagggctaaatgta

SEQ ID NO: 72444 - DNA, 889 bp, Homo Sapiens
  misc_feature (16)..(16): n is a, c, g, or t
  misc_feature (32)..(32): n is a, c, g, or t
  misc_feature (85)..(85): n is a, c, g, or t
  misc_feature (757)..(776): n is a, c, g, or t
aacccagttgcgttgngagagggttgggagcnagcagagcatgggtgacagtgggagcacacgacttccttggagcctgggcctntgcgggtcccaggtggtcaggcagctggagcagaagtggaaatggcttaagatgctcatagcccagccccggctgtgtctactccaggccaagcctgggctgcagtccttgctatgttccccccagggccctggggggagggatcagggtgctgggggtttcctaggacaggggtcttcccccttgagacaccaagctctggctctagaagagctctctcctggagtggggagtctggaggggactgggtgggtgcaggtaaagccagattctctctggaagggaattttctatgaatggatgatttccaggctcagggtgggctgtgtgttagttctgagcaaatccctcaccaagacccttccctcccaagccctcaaagaaatgaggcaaagcccttccctgcaagaccccttgtggatgtttttgcatctacctgatttttagccccacccagggagactttataccccatgatcctgccccaccgttgctgttgtctgccagctgggtctagcatcacagggaagggggggatttatactcatggaaagactactgatcctaccggaaaccaacctgtttactgtactgttgtaaatatcatgccctttatatcctgtatattggcttcttttaaataaagtgaaatgtcttagaactgatggtgcnnnnnnnnnnnnnnnnnnnnaaacagaagatgaatctggtgttgggggaggggtaggaggacggaaggccacagaaaccctcaaactcattagttaattagccataaaataggggatttcataggccagcaag

SEQ ID NO: 72445 - DNA, 1036 bp, Homo Sapiens
  misc_feature (84)..(118): n is a, c, g, or t
cgccaaacgttaataccatatatggcgcatccgtattagcgaacgacgagcgcagcgagactaagttagcgaggaagcggccgnnnnnnnnnnnnnnnnnnnnnnnnnnnnnnnnnnncagtcgacggtaccggacatatgcccgggaattcggccattacggccggggtaattgcttagatatgaggggagtaagaatatgaggaatctgtgataattcacaggtttgtaacttgggcaacccagtgtgccatccactgaaatttgtaatactgaaggggaggagtaggtgaaatagacaaagatgagtttattatatgcatcttttaaaaggttcaaaaacaaacacttgggtgttgtaaagtcatcaccctttgtggggcacaaacggaagaggttggctgagaaggggctgtggcagtagcaacaggtgaagaatagggccttcgtgaacacagacacgtggacaggctgagtaagtagagcctgcaaagaatactgaagatgacagcagaggtagaagccaagctaaaggattatggtcataacaattgagagaagtgaatgtttcaagaagggagggtaacatagtgccagttgctgcagtgaagtaacattagaggaaaccttagaagtacttgagagttcttcacgcatctaggttcattgatgatcactaggggaggcgtttcaatggagtgcatacgttagagcagcttgttacttatctcagtgagaggtgaaggtttggaaatcagcagtctggacattctgagagatggctatgaaagaaaaagacagtggacgagtaagaattcagttgcaagaataaggctcaagatagttttaaatttttaagagggcttactccagttacaggagggaaggaattaagtataggtacaggaaaatgaactaggaagggcagaagcacaggtaggtagttgaagaagttcatcatcatagttcatagttttaatttttttatgaggtggaatcaagcttatgttttgggagaagggactggactaaaatt

SEQ ID NO: 72446 - DNA, 1005 bp, Homo Sapiens
aaggtagcgaggcctgggtggcgatttcggcacgaggcccccatgttttattattgggggtgctggtggtgagccgtgtgtgcgtgtccctgctctgctgcccgcctggctgctctgtctgctgccccctccccccaggtgggtccccctgcttttcacctatctactcctgagcttccccaacaggagcaggtttgaggggccaggcctcttggaggcccctcctgcttcgttgggttctgcttccttcccttcttagctggctcaggggcttctatgggatcctggaagttccttagggacttgcccagggtcccagggccacccacacttcatctgctccctcataggccccacctccacgtcccggctgggccccagaccccagcttcctgccctccaccgggagtctgcatggttgggagtcctgggtggaggggcctttgtgaggctggacccggctcagggcaggtggaggagctgggcctcccacagggtgcccgggcagtgccatcctggtgggggagggcagccttcaaacgtgtggggtctacagtcctcaggtctaggcagggctgccggttctccacctccccatccgccccaggccccctgcctgtgcctgccttgcaccccctctgcttgggccacggtgtctctgcattgcctgcctttttgccttcacctcttttcttccccgccccctgcacattcggggtctcagcccccaggctgtgagctccttgggggcaggccctcaataaatgtgaactgctgctgccaagaaaaacaagaaagaaaaaccaaacacgcgagcgcagacaacgagcaaggactagaacagaagaaggaacatgcacaagacagactcaacaggatacggggggggcgccatgagaaagactccagcgaaggggccaacaataagcgcccgacgcgagatgagaagcagagaggggccacaaaggagagcggcccacaaacaccgaggcagagacgccaacg

SEQ ID NO: 72447 - DNA, 1483 bp, Homo Sapiens
  misc_feature (963)..(994): n is a, c, g, or t
  misc_feature (1208)..(1208): n is a, c, g, or t
taggaatataaacagtggtataaaaagcaggctgtaccggtccggaattcccgggatatcgtcgacccacgcgtccggacttaatgactgacctgaagtctgagatctctggagacctggcaaggctgataggggctcatgatgccaccggcccattacgatgccaaggcagttgaagaaggccatggagggagccggcacagatgaaaaggctcttattgaaatcctggccactcggaccaatgctgaaatccgggccatcaatgaggcctataaggaggactatcacaagtccctggaggatgctctgagctcagacacatctggccacttcaggaggatcctcatttctctggccacggggcatcgtgaggagggaggagaaaacctggaccaggcacgggaagatgcccaggtggctgctgagatcttggaaatagcagacacacccagtgggagacaaaacttcctttggagacacgtttcatgacgatcctgtgtacccggagctatccgcacctccggagagtcttccaggagttcatcaagatgaccaactatgacgtggagcacaccatcaagaaggagatgtctggggatgtcagggatgcatttgtggccattgttcaaagtgtcaagaacaagcctctcttctttgccgacaaactttacaaatccatgaagggtgctggcacagatgagaagactctgaccaggatcatggtatcccgcagtgagattgacctgctcaacatccggagggaattcattgagaaatatgacaagtctctccaccaagccattgagggtgacacctccggagacttcctgaaggccttgctggctctctgtggtggtgaggactagggccacagctttggcgggcacttctgccaagaaatggttatcagcaccagccgccatggccaagcctgattgttccagctccagagactaaggaannnnnnnnnnnnnnnnnnnnnnnnnnnnnnnnctcttatcttcagtggagcttaggaaacgctcccactcccacgggccatcgagggcccagcacggctgagcggctgaaaaaccgtagccatagatcctgtccacctccactcccctctgaccctcaggctttcccagcttcctccccttgctacagcctctgccctggtttgggctatgtcagatccaaaaacatcctgaacctctgtctgccngagtgccatggcctgctagacgccaaacatgtggggccccctcgggcgctcgaaaagttttctacacatttctttttggaggcccggaccccggtaggttaaggggaacaggggcgcataggtggttcccgtaggagaatccccggggccctgacctaacggccttgggaattccccgccggagtagaaagaatggccctgggcgcgggaaccgggagctggtgccgaaagatatcccccaaattgggcgggcctcgcggcgcgcgtgaccgggg

SEQ ID NO: 72448 - DNA, 693 bp, Homo Sapiens
  misc_feature (242)..(263): n is a, c, g, or t
  misc_feature (618)..(627): n is a, c, g, or t
ttataattagctaacatgactagaaaacacatgacttaggtggagagttagctttcttttctagtttgtgtatgacttgccatttgtgacgtatacaccaaaagatctggtgttttagacttctgccattcacttggcatttaaatctctctttgcttatgctgttaacgagtatgccataggataggacaaattcagtaaacaggaaaacttgtccatatttgcatagacatttgtagggnnnnnnnnnnnnnnnnnnnnnnagaacttcaccattggcttaagaatgtagttcccaaaacaattttttcttgcaaagtactttccttacacctcttggctacagggtgggccaaattaaacatatatgtattttcatttaaatgtatgtgcagtttggtttatcatcttaagatggtggggctgccccggtgctacttcatctgtgtacacaaacaccaatgcatggtctgtattgctaccaaaacatttactgtatatatgtttataacatgtattatgtatatatgtaatgggtgccaggccaggtatatattttttatttagaagtgtttcacttttccaagttttctttatagtgttatgcttattttcaannnnnnnnnncctgattctgtctggtacttagaattgtagtgtcttcatcatcaattaaagaaaactgtctaaatg

SEQ ID NO: 72449 - DNA, 677 bp, Homo Sapiens
ccaaatatactaagacaacacccaatatagttaaaattactatgcatgttctactttatattaagttctagtgtacgttgtataatgcttacatcaaataaaaggtaaggttaatttacataaaacatgtttaggtaggataattgtaaaaattatttaatagagaaattggtaaaattgtggctttgcatagaggcaggagaaagaaaagagcaaggcactagtgagaaaaattgctatggagaatattgagaatagatacaaggagacctacaggtttacaacattaatattggccaatacttgattggacagtttaaatttttcaacctgaaaggcctttgtgccccaaagtttggtaaggagattttgtaaaaacaaacaacaatagcaataaaaaatcagggaagattaagagatttcataaggagcaagaatttataggtaatacttaaaaggtataggtatgattactattttggtgaataataggcacatggtagactgaaattcggcaacagctactgtgcaaataagcatatctgtgattatggcttatatctggttggggacccctgttgtaagccattctttttagtacaggttaagctccatttctcaatcacagttctgttattttcatctgtgggaaataatgaattctgtttcagatttta

SEQ ID NO: 72450 - DNA, 735 bp, Homo Sapiens
  misc_feature (647)..(647): n is a, c, g, or t
actaaggcacatgacgtagaaatattgaggtacaaaatgcaaatttctgcataagatttttaagatattcattttggaaaatgaaggtgaacatcatctcccagaatattcagcttttagcttgttttttcttttggaccagttcaaccagcaacttgtacctagcgatacagtcttccttgctcttggacgggacacatctggctattttgtcccagcggtcagaggatccccttgggtactgctgcaacgccagttccagaagtttctgttgattttgagtccacggctcctctgcagaccgagctctctcttttctcaggctctcctcgtcgctggactcgttttgttctgctatgtcaaagtccttctgccgcttggctctggacttctcctctggctccggcttcgctgtagcctccagcagcctggctggcttccgcctccgaggccgggcatcagtggccccggtctcctgctcaccggagtctccctcctgctcctcctccgctgccaccccctctgcgtcctctcgctgggtgatcatgtcaccggagtctccctcctgctcctcctccgctgccaccccctctgcgtcctctcgctgggtgatcatgtcatcgggcaaggtggtggccgttttgatngggctggaattctgaactgtcgatttgagttcggagagtctaccattcctggggagcaggtcactgaatcttcagttgcttggctttg

SEQ ID NO: 72451 - DNA, 976 bp, Homo Sapiens
  misc_feature (190)..(190): n is a, c, g, or t
  misc_feature (232)..(232): n is a, c, g, or t
ccatatgatgtatctgcacccagtacatttctcgtctatgtgtggattgacgtacatcaccagaacgttgactgtacgattatcgatcattaggattgcctcgagcagaatcgcacgagtatctgactccatagagaaatgagacaaatgatgatgttggaaacaggaccgaacacagaaaaacagcacntgatggacagagagaccctcagccaactgacaagagtatgtntagttcccaggagggactccaggtcgatgggaaaagatgcccacgaattgggtcgatctgtgacagatgtgacaaccaaagccaagcaactgaaggattcagtgacctgctccccaggaatggttagactctccgaactcaaatcgacagttcagaattccaggcccatcaaaacggccaccaccttgcccgatgacatgatcacccagcgagaggacgcagagggggtggcagcggaggaggagcaggagggagactccggtgagcaggagaccggggccactgatgcccggcctcggaggcggaagccagccaggctgctggaggctacagcgaagccggagccagaggagaagtccagagccaagcggcagaaggactttgacatagcagaacaaaacgagtccagcgacgaggagagcctgagaaaagagagagctcggtctgcagaggagccgtggactcaaaatcaacagaaacttctggaactggcgttgcagcagtacccaaggggatcctctgaccgctgggacaaaatagccagatgtgtcccgtccaagagcaaggaagactgtatcgctaggtacaagttgctggttgaactggtccaaaagaaaaaacaagctaaaagctgaatattctgggagatgatgttcaccttcattttccaaaatgaatatcttaaaaatcttatgcagaaatttgcattttgtacctcaatatttctacgtcatgtgccttagt

SEQ ID NO: 72452 - DNA, 1368 bp, Homo Sapiens
  misc_feature (43)..(77): n is a, c, g, or t
  misc_feature (237)..(250): n is a, c, g, or t
  misc_feature (1061)..(1070): n is a, c, g, or t
gaacgaccgagcgcagcgagtttgtgagcgaggaagcggccgnnnnnnnnnnnnnnnnnnnnnnnnnnnnnnnnnnncagtcgacggtaccggacatatgcccgggaattcggccattacggccggggtctaaaaaactccaacgttgtaattacaactctacattcatttacttacttgacatactgccacaaagtagtttttgagttcattaaaaattccaaaggcattagttgnnnnnnnnnnnnnnagtgttttgttttttagttaacttttatagacattttagtaacttgctaaagattcaggggattctatgaaaccccgaatttagaaacatctggtctacctcagttaaatgttgactgcttagaaatatagctgaagtgatcaccacagccataaaattgtttaagaaagatttatataatgtttacaaatctggaatcaaggattttagctgaaatcctttaagagatattagagcaagtatttaattcaggtattttcaagttttaaaacttaacctgtttacctactaaaaataaaatagctagtttttttctgcatataaaagttcattgaaatgatatgcccttatttgcaatacttttcccataaagttttaagtgtgaaagaattgtaatttactagatatgtttggtatgggatattttgttaggcaagttttcttttttcttcttaaattgcaataggcttccaaaaagagtataattgtttcagaacaaattaactcttggcattatacgtctccctttttctttacagtattagtaaaaagaaaaattgtacactttctgattttaacttcactaatgtaattactctctcaagaagcttttaaaatttaaattaccatcacacaaccttttttatagtaaagccaacatttgttctctcaccaaaccccatgccaaattcatcatgaagaaagctcagcataagtaattcaaatactgcttataattttagaggggggtagaatttagtaaatattccagccggtcgttttatgcacaaggcttcagtcagaacatagnnnnnnnnnncattctgtgaatgaaatattgtatgttcagattttataaaagacatttttaaaagcccaatttacagccgtatattttcttatgatgtaatttatgaaaaagatgtctgtactaacaggtgctgtaacactactgttgttggattttattgtttggtgataaatgtatacaatatttctaagggaaactatgtactgtgatgtaaaagtctgggcaaaatgtatataatcctgtatataattatgtatttgattataattactgattgtaaagatttaataaaatatgttactaaacc

SEQ ID NO: 72453 - DNA, 1413 bp, Homo Sapiens
  misc_feature (457)..(458): n is a, c, g, or t
  misc_feature (665)..(671): n is a, c, g, or t
  misc_feature (674)..(674): n is a, c, g, or t
  misc_feature (697)..(749): n is a, c, g, or t
  misc_feature (790)..(790): n is a, c, g, or t
  misc_feature (795)..(810): n is a, c, g, or t
  misc_feature (812)..(812): n is a, c, g, or t
  misc_feature (826)..(839): n is a, c, g, or t
  misc_feature (968)..(988): n is a, c, g, or t
  misc_feature (997)..(1005): n is a, c, g, or t
  misc_feature (1080)..(1088): n is a, c, g, or t
  misc_feature (1278)..(1278): n is a, c, g, or t
  misc_feature (1307)..(1322): n is a, c, g, or t
tggcacagtcagggaatcctggaagaggtgcagagagagccaagggaggcaaggcctccagtccatcttccccacaggatccacctgatggctggccgagtaccccagggagctgatcgaatagcagtcaaggctgagatggaggccgtttttctggagaacctgaggcatgcagctggggttttggctcaggaggacctcgtgggactgctggagcccatcaacacccgcatcactgacccccagtacttcctggacacgccccagcaggcggcagccatccttacagaaggtaggaagacccaacctccaattacaaatggacatattccactggcagatcatggatgggaacctgacaggaaacatccgggagttcctgcccattgttgggcatgtgcaggtggcacaggtcccaggccgaggggagcccagcagccccggagagctgaatttnncccctatctgtttcaactgctggaagatgaaggctacaaaggcttcgtgggctgagacacagtagagggcttgagttggctacgttcatactgggataggcggggccacccagaggctggccagtgagggcccgcacaccacccacgtgcctccagacagcgagtgacatcccatctcctcctctgcattaaagatgacctgctgannnnnnnacnaaaaaccgcaaccaaacaacccnnnnnnnnnnnnnnnnnnnnnnnnnnnnnnnnnnnnnnnnnnnnnnnnnnnnnccaccccagacaccaacaaaaacacacaaaacactttcacnaaccnnnnnnnnnnnnnnnnanccccttggcgccgnnnnnnnnnnnnnnaaaaaaccttttctaacccttttttgtgggcgcggggggccccccaaggggaaaggcgccaacggggccaaattttgttttccccaagaaaaaacccgcggggcacgagaaaaagggggttggggcctnnnnnnnnnnnnnnnnnnnnnccgcccccnnnnnnnnnaaaaccggaggggtgtgtttgaagaacaaaaaacctacgaagagggggcgctcccgggggagggttccctctccnnnnnnnnncgttttacaacagcgggaggggggagctccctccagggcgggagcccctcccgagaataataacacaaataaactcaccgcccccccgccggcccggcgggcgcaaatatatctttgtgtaagagaagaagagagggggtgtgggtaaatattctctcttataaaactcctccctcctccgccgccccgnaggggggggaagacacccctccccacaannnnnnnnnnnnnnnncggaacaccccgtgactcgccccccccgcggggttattattacgcgccccctcggttgggccccgccttggagagagaaaaacaatctttg

SEQ ID NO: 72454 - DNA, 709 bp, Homo Sapiens
  misc_feature (625)..(663): n is a, c, g, or t
ggatggcagtactactacggttctaaggtagcgaggcctgggtggcgaattcggcacgaggccaagagaagggggaaatggggctgggggccgtccccgggagacaggcggcttccgagagggactggagcaggccgtgctggtatgccaaatgccctgggtctgtcccaggatccacctgatggctggccgagtaccccagggagctgatcgaatagcagtcaaggctgagatggaggccgtttttctggagaacctgaggcatgcagctggggttttggctcaggaggacctcgtgtggactgctggagcccatcaatacccgctatcactgacccccagtacttcctggacacgccccagcaggcggcagccatcttacagaaggtaggaagacccaacctccaattacaaatggacatattccactggcagatcatggatgggaacctgacaggaaacatccgggagttcctgcccattgttgggcatgtgcaggtggcacaggtcccaggccgaggggagcccagcagccccggagagctgaatttcccctatctgtttcaactgctggaagatgaaggctacaaaggcttcgtgggctgtgagtatcagcctcgaggcnnnnnnnnnnnnnnnnnnnnnnnnnnnnnnnnnnnnnnncatggtcatagctgtttcctgacccagctttcttgtacaaagtggt

SEQ ID NO: 72455 - DNA, 712 bp, Homo Sapiens
tttggatcccgcggactccgcccggcccggcctccccaggcatggcgccgctgcgcttctccgccaatctgtcctggctattccccgagctccccggcctccccgcgcgggtgcgggccgcgggcagctcgggcttcgaggccgtcgaggtggcctggccgtacgcggagacgcctgaggcgctggcgcgcgccgcgcgagaagcggggctgcggcttgtactgatcaacacgcccccgggagaccaagagaagggggaaatggggctgggggccgtccccgggagacaggcggccttccgagagggactggagcaggccgtgcggatccacctgatggctggccgagtaccccagggagctgatcgaatagcagtcaacgctgagatggaggccgtttttctggagaacctgaggcatgcagctggggttttggctcacgaggacctcgggggactgctggagcccatcaacacccgcatcactgatccccagtacttcctggacacgccccagcaggcggcagccatcttacagaaggtaggaagacccacctccaattacaaatggacatattccactggcagatcatggatgggaacctgacaggaaacatccgggagttcctggccattgttgggcatgtgcaggtggcacaggtcccaggccgaggggagccagcagccccggagagctgaatttccctatctgtt

SEQ ID NO: 72456 - DNA, 1479 bp, Homo Sapiens
cgttctctctgcaggagacaagagaagggggaaatggggctgggggccgtccccgggagacaggcggcttccgagagggactggagcaggccgtgcggtatgccaaagccctgggctgtcccaggtaccccgctccaccccacccccacccctgtgtacccatgaccctgatgcaggttcagggagtcgaggactgccagatctgagacgctcagaagtctgagcccactggtttatctctgcctctgcggtcctgtgtcctttgtaaattgccttttgtattttatctgtcttatgccactctgtttgccactctttcatgctcaccccatgctgggatcccatgctgggagctcagtctgcctaggcagataggagagtaaatatatacagtgatgcatttgaggacaggcctattccaggaagctgtgggagcagggtaggcaccgtaaccctgtctggatcagagaaagctgcttacaggtagtgatgcttggactgtcttcaaggagtgggcattgcttgatgggcaggaagttgagtgttccttgcaagggtgctgtggcaagaggaggcctggtgtatttggcagcgttcctgaggctggacatgtatgtagcctgttgggatggggaggcctggaatgtctgcttggagctggatgtggctaagatcaggggatgatgggaggaggtggacggctcaaagtggggctgattcaaatgtcaaatcctgcagaggccaaacaggctcagaaggaactggcaagaggggatcactactggtcaatggtgggggcagaaaacagatgggaaaaggctaagtagatgcgaggagaggaagtagagacagcagcatggaatacctgagaagggcaagcaaaggtcaggacaatttttaaaggtgagaatttagcaggttacaggttgcggagaaggaccgagggaaggaaaggttttggaaagtactggaagcaggaggcggtgggtggacactgagatgtctgggagagggcttgcccctcagccatcactgaagtgtctctgaaagtgctgggatacctgggcatcgtgacccaggtgccatggactggagacctggggagacggacgagggctggcacagtcagggaatcctggaagaggtgcagagagagccaagggaggcaaggcctccagtccatcttccccacaggatccacctgatggctggccgagtaccccagggagctgatcgaatagcagccaaggctgagatggaggccgtttttctggaagaacctgaggcatgcagctggggttctggctcgaggtgagaaatggtggaaactacacacgtacttacatgtcgtctgtgggtgtgcggagaagggggtgcacagtggggacagcacgtgaggctgccagcctaggtctagaggaacaggtgagggccttgaccagtgactgactgatggggcacaacctgacatttcatcct

SEQ ID NO: 72457 - DNA, 1070 bp, Homo Sapiens
  misc_feature (25)..(25): n is a, c, g, or t
  misc_feature (48)..(49): n is a, c, g, or t
  misc_feature (52)..(52): n is a, c, g, or t
  misc_feature (55)..(55): n is a, c, g, or t
  misc_feature (65)..(65): n is a, c, g, or t
  misc_feature (67)..(67): n is a, c, g, or t
  misc_feature (69)..(69): n is a, c, g, or t
  misc_feature (78)..(78): n is a, c, g, or t
  misc_feature (83)..(84): n is a, c, g, or t
  misc_feature (87)..(87): n is a, c, g, or t
  misc_feature (89)..(89): n is a, c, g, or t
  misc_feature (97)..(98): n is a, c, g, or t
  misc_feature (106)..(106): n is a, c, g, or t
  misc_feature (128)..(128): n is a, c, g, or t
  misc_feature (172)..(172): n is a, c, g, or t
  misc_feature (187)..(187): n is a, c, g, or t
  misc_feature (259)..(259): n is a, c, g, or t
  misc_feature (277)..(277): n is a, c, g, or t
  misc_feature (346)..(347): n is a, c, g, or t
ttttcagttgtagttatatgtgttnaacatgggtgttttgtttgtttnnctntgnaaagacagcntnanggagagctnaattnntgntnaaatattnngggcatgnttgtgcactgctgttgtgagantcagcatatgaaatgacatcatggttagtcattgtactgcagcntagggggctacacgnttgctgtgtgagtggagagatgcagtgagccagttgtcattattctaaaaaatgtactacttcactttgtcnccaaagattatataatgntcataatccaccatgaaaacagcattggccaaaggtactgaggctgcttaaaatattcaagtctgcttnntaatttttaagtgaatttagtttgaaaagcatgataatacaggcctctcaggctgagtgctactttggtaaagttcccagttttcctgccttctgtgacaggatgaatgaggtgggtatggacagtggaggcagctggaatggcaagtgcagaaaataggaacagttctatacagtgctctcatttactaataacataatgccttctaaataatttttttgggaaactacattatcacaaaattatacaaatttttttacaagtatttacatactgtatctgaaaacagactttaaagtcacaagattataaatgtacatatgtattctcacattctgaaaaataacattctcagaatccacagaaaatatacttagttactactgaagataatttttgaaatgtaaaaattagatttaaatagtatattttaaatgacagaactataattacagagatcagatcagataggtaaactgcaagatagataggatgaaacttttggcctactgtattacttacagagtttttttgtgtgtggtttttaaaactgttaaggcaagaagtgtcaaatgctttagagttaaataacagatcactgatttcaaagacttggtgtatagtgttaaaaattaaagcttaaaaggtggttagaaaagtggattaatgcaaaaggggtaataaagactgcaacattctcaggaccaaattaaactgctaaaa

SEQ ID NO: 72458 - DNA, 914 bp, Homo Sapiens
  misc_feature (236)..(250): n is a, c, g, or t
ggatctatctgaagtgtctaatttttcaagtttgtaagtttattatgtggttttaacattgggtgtttttgttttgtttttactatgaaaagacagcttaaggaagagctaaattctgttaaaatatttggggcatgtttgtgcactgctgttgtgaggatcagcatatgaaattgacatcatggttagtcatggtactgcagcttagggggctacaggaccaaattaaactgctnnnnnnnnnnnnnnngttcattgacttgcttagtcgtatactcaaatgatgataaacctacatgtgcaaaggctcacgtttaagattgtcaagccagcagtctactgttgtgttgccattgcttttccattgggagaagaaagaattaaccagtcattaaaccatttggtaagttgcactttgctgtgctgatcccacaggaaaggcttgaaacacgagaagcagcaaagacagagcacacaagtgcataaggctgttgtcttcggcttgggtgaaatgacagttcctcttcattctaaaggtttactccattgaatttaaggcatttgttcattccagtgttgagatgctttgcatctctgcagaagaaatttattttaaattgtttaaatatctggaaatacttttagctatcatttataaagatagttttgttctcagtttcactataaattatagaacaaatgggaaacaagggtttaatttagttcagccattttacaaggaaataataaaatactaaaatctgattgttttttgctatttaatagccactgcccagacacatatttaagagtttaatctttcagttgctatggcttatgaacaagctaaggttgaccataaaacatttgttggatgacgtggtttaaaatgatcaccacaaaaagggaccaca

SEQ ID NO: 72459 - DNA, 1093 bp, Homo Sapiens
ggtaccggtccggaattcccgggatggcgattggacttggtgggtcccgggccagggcgggcgccgccatgggtaacctgttcggccgcaagaagcagagccgcgtcacggagcaggacaaggccatcctgcaactgaagcagcagcgggacaagctgaggcagtaccagaagaggatcgcccagcagctggagcgcgagcgcgccctggcccggcagctgctgcgggacggcaggaaggaacgggccaagctgctgctcaagaagaagcgataccaggagcagctcctggacaggacggagaaccagatcagcagcctggaggccatggttcagagtattgagttcacccagatcgaaatgaaagtgatggaggggctgcagtttggaaatgagtgtctgaacaagatgcaccaggtgatgtccattgaagaggtggagaggatcctggacgagacgcaggaggccgtggagtaccagcggcaaatagacgagctcctggcaggaagcttcactcaggaggatgaagacgccatcctggaggagctgagcgcaatcactcaggaacaaatagagctgccagaggttccctccgagccccttcctgagaagatcccagaaaacgtccctgtcaaggccaggcccaggcaggcggagctggtggcagcttcgtaacgtggcctcgtcttgtgggactcacggggatgccccagggactgtggcccacagagagtttgggtcacggccagcccctgaccgggttccctggagcccagtgcgcacggtgctgagcagagctgcagccacgcaggcgcattgcaggaggactccagagcgtctcctggagaccttgagcctgaacgcactcaggcgccactggcctgctctcagtccggattaactctcgaccgagcccccttctggccggttgggggctccccccgtgggcccgaggccaggccccacgcccccgggtgctgttcccctggagtcccagcccccgcgtgggttcgcgctccgtttgtggagggagaaaaccccccagaaacttgggggggcccccccggggttttccgtcgtgggttcccatgact

SEQ ID NO: 72460 - DNA, 848 bp, Homo Sapiens
agatagagtcctttctctccaggtgtagggttggcgtctctcacatcacgatctcgtgtcctgcttcaggagaaaatgagaagatccttcctaggttttatgcctgcctcaggggagaagggcaaggggaagctgaactagatgcagagcacgcccagaaggtcctggaaatggagcacacccagcaaatgaagctgaaggagcggcagaagttttttgaggaagccttccagcaggacatggagcagtacctgtccactggctacctgcagattgcagagcggcgagagcccataggcagcatgtcatccatggaagtgaacgtggacatgctggagcagatggacctgatggacatatcggaccaggaggccctggacgtcttcctgaactctggaggagaagagaacactgtgctgtcccccgccttagggcctgaatccagtacctgtcagaatgagattaccctccaggttccaaatccctcagaattaagagccaagccaccttcttcttcctccacctgcaccgactcggccacccgggacatcagtgagggtggggagtcccccgttgttcagtccgatgaggaggaagttcaggtggacactgccctggccacatcacacactgacagagaggccactccggatggtggtgaggacagcgactcttaaattgggacatgggcgttgtctggccacactggaatccagttttggctgtatgcggaattccacctggaaagccaggttgttttatagaggttcttgatttttacataattgccaataatgtgtgagaaacttaaagaacagctaacaataaagtgtgaggacggtaaactg

SEQ ID NO: 72461 - DNA, 907 bp, Homo Sapiens
  misc_feature (799)..(799): n is a, c, g, or t
gggaggggctggggttgcggcgcggcggcgaggaccagaccggggcctgaggagaggagaccggcggcggcggcaatgctggagacccttcgcgagcggctgctgagcgtgcagcaggatttcacctccgggctgaagactttaagtgacaagtcaagagaagcaaaagtgaaaagcaaacccaggactgttccatttttgccaaagtactctgctggattagaattacttagcaggtatgaggatacatgggctgcacttcacagaagagccaaagactgtgcaagtgctggagagctggtggatagcgaggtggtcatgctttctgcgcactgggagaagaaaaagacaagcctcgtggagctgcaagagcagctccagcagctcccagctttaatcgcagacttacaatccatgacagcaaatctgactcatttagaggcgacttttgaggaggtagagaacaacctgctgcatctggaagacttatgtgggcagtgtgaattagaaagatgcaaacatatgcagtcccagcaactggagaattacaagaaaaataagaggaaggaacttgaaaccttcaaagctgaactagatgcagagcacgcccagaaggtcctggaaatggagcacacccagcaaatgaagctgaaggagcggcagaagttttttgaggaagccttccagcaggacatggagcagtacctgtccactggctacctgcagattgcagagcggcgagagcccataggcagcatgtcaatccatgggaagtgaaccgtggacctgctgggagcanaatgggacctggatgggacatatcgggaccaaggaagggcccctggaaccgcctttcctggaaactcccggggaggggaaaaagaagaaaacacctgggggggcttgg

SEQ ID NO: 72462 - DNA, 1088 bp, Homo Sapiens
gcagtaactctacggtttaaggtagcgaggcctgggtggcgaattcggcacgaggccagcccgggtagctgctgcagcctacgctgcctcggccactgcctgccgcgtgcggagccggagcccgagcctgagtggcgccgggcccgacgtggggctcctgggccgcggcggcgggcgggcgatgctccagaggcctgaccagccatggaggccgaggcaggcggcctggaggagctgacggacgaggagatggcggcgctaggcaaggaagagctagtgcggcgcctgcggcgggaggaggcggcgcgcctggcggcactggtgcagcgcggccgcctcatgcaggaggtgaatcggcagctgcagggccacctgggcgagatccgcgagctcaagcagctcaaccggcgtctgcaggcagagaaccgtgagctgcgcgacctctgctgcttcctggactcggagcgccagcgcgggcggcgcgccgcacgccagtggcagctcttcgggacccaagcatcccgggccgtgcgcgaggacctgggcggctgttggcagaagctggccgagctggagggccgccaggaggagctgctgcgggagaacctagcgcttaaggagctctgcctggcgctgggcgaagaatggggcccccgcggcggccccagcggcgccgggggatcaggagccgggccagcacccgagcttgccttgcccccgtgcgggccccgcgacctaggcgatggaagctccagcactggcagcgtgggcagtccggatcagttgcccctggcctgttcccccgatgattgaaggcactgcttcctccacgccgacgcccgcccggattgctccccgagccccgggaccgctgtggacctcgggacctggacgccgtcctggctgcgcaggaggggccgctggcatggactaagaaatcctgacaccaagaagggcccctcgctcttgctggcagggcagcagggggactgaaggctggagcggagggacttgctgggggttggattgggggtaataaacccggacggaagcggaaaaccccaaacccccaaccagaccaaacatgt

SEQ ID NO: 72463 - DNA, 489 bp, Homo Sapiens
ccaggcgcgccgcctcctcccgccgcaggcgccgcactagctcttccttgcctagcgccgccatctcctcgtccgtcagctcctccaggccgcctgcctcggcctccatggctggtcaggcctctggagcatcgcccgcccgccgccgcggcccaggagccccacgtcgggcccggcgccactcaggctcgggctccggctccgcaagcggcaggcagtggccgaggcagcgtaggctgcagcagctacccgggctgggcacgcggcggggcgcgcgccggggcggggccgcatgtcgttatggaaggacagccaatccggtgaaacgtccccggaaaggggcggggcctgagctcaggggccgcccccctcgttccccacccactccgggtgttactgatcctcgatgtcaaggaacccgcgcgtcatcgccctccacatcggtctcaacccgaaactaggagcttcgaacctccaagtaccggatcg

SEQ ID NO: 72464 - DNA, 570 bp, Homo Sapiens
  misc_feature (231)..(231): n is a, c, g, or t
  misc_feature (442)..(442): n is a, c, g, or t
gatcccacctgccgtaggcacatggaggaggagcccagagttgggcactggcaaatgtctccgtccctcccatgctccttggcttctgaagggtgaagctcctttggctgggccaagaaggatctagtctgcccactacattctcaaaccaagaggacttggaggaaaagagctgctataacatcatatgcagaggaagcttctacgcgctagagaggatccaaggggccnacaactggaccatgtgaacaagccatcctgaactgccattcagctaccacactggacttctgcagggcagccatccgtggatgatggaagccaccatattgacttggggtataggcccaaactgccttcgtttggtccagggccatcgtgggtgatgacgattgctctcttgcactcaaggacatttgatgctggtagtatggattatgangatggactagcccctgccccagcccagctctcacattcccctttgttttttcccataccaactgcttctaccctcccctattacatacatctttcaatgtccaaaaagttacaaagtttatatgaaaa

SEQ ID NO: 72465 - DNA, 646 bp, Homo Sapiens
  misc_feature (615)..(615): n is a, c, g, or t
atgaccaaggtttctccgcctccatgatcgtactggagacaccttcaggtggaagggggagaatgtggccacaacccgaggtggcagaggtcttcgaggccctagattttcttcaggaggtgaacgtctatggagtcactgtgccagggcatgaaggcagggctggaatggcagccctagttctgccgtcccccccaacgctttggaccttatgcagctctacacccacgtgtctgagaacttgccaccttatgcccggccccgattcctcaggctccaggagtctttggccaccacagagaccttcaaacagcagaaagttcggatggcaaatgagggcttcgaccccagcaccctgtctgacccactgtacgttctggaccaggctgtaggtgcctacctgcccctcacaactgcccggtacagcgccctcctggcaggaaaccttcgaatctgagaacttccacacctgaggcacctgagagaggaactctgtggggtgggggccgttgcaggtgtactgggctgtcagggatcttttctataccagaactgcggtcactattttgtaataaatgtggctggagctgatccagctgtctctgacagtaaaanaccccgaaaacccaacattcccccccctggt

SEQ ID NO: 72466 - DNA, 432 bp, Homo Sapiens
ggcacgaggaagacttgctccttaacaaaattcaggcaactcccctgaaccacgtgggcagagtccccttccctccaaatccctgaccctcctgtccccaggagtctttggccaccacagagaccttcaaacagcagaaagttcggatggcaaatgagggcttcgaccccagcaccctgtctgacccactgtacgttctggaccaggctgtaggtgcctacctgcccctcacaactgcccggtacagcgccctcctggcaggaaaccttcgaatctgagaacttccacacctgaggcacctgagagaggaactctgtggggtgggggccgttgcaggtgtactgggctgtcagggatcttttctataccagaactgcggtcactattttgtaataaatgtggctggagctgatccagctgtctctgacctac

SEQ ID NO: 72467 - DNA, 674 bp, Homo Sapiens
  misc_feature (49)..(49): n is a, c, g, or t
  misc_feature (79)..(79): n is a, c, g, or t
  misc_feature (92)..(92): n is a, c, g, or t
gcaaaagccatctgcccgcttcccccaccagcggaggaagaagaggagngagatggatgatgggctgcttgagggaggnccgcagcgatccnaacacatatgtgatcaagctgttcgaccggagcgtggacttggcccagttcagcgagaacacgccactgtacccaatctgccgcgcctggatgcgcaacagcccctctgtgcgcgagcgtgaatgctctcccagctcacccctgcccccgctgcctgaggatgaggagggatcagaggtaaccaacagcaagagtcgtgatgtgtacaagctgccgccacccacacccccggggccacccggagatgcctgcagatcccgcatcccatctccactgcagcctgagatgcagggcacccctgacgatgagccctctgagcccgagccctcaccctccacactcatctatcgcaacatgcagcgctggaaacgcatccgccagaggtgagcgtcccccagcctgcttgcccctcgtagggccctttgcaactgctgagtctcccctctgcctccccaggtggaaggaggcctctcatcggaaccagcttcgttactcagaaagcatgaagatcctacgagagatgtacgaacgacagtgatgttcccaggtccccccacaccagtaaacatcccccagctccac

SEQ ID NO: 72468 - DNA, 753 bp, Homo Sapiens
gacccagcgggtagacaaggtccccaggacagacatataggacccttcagacatataggactgtcagaaatggacagagcttcctaggtggcacagacgtgaccccctagacaggattccctgaggcaggcagacgcgactccctgggctgacaggtgtagatggagtctctgggctggataggagaagacaggggtccctggggcaggcacacttgacccgctggctggttgaggtgtctgcccttcatacatgcctcctgtctgagtcccttagcgagcccctcatgccatttgttgctgggaaaggcaggagggatgaatgtggattcccagcccctctgctttgactctcttgggcctggcatggggcccttgtgtccccagggctcagacgtaaccaacagcaagagtcgtgatgtgtacaagctgccgccacccacacccccggggccacccggagatgcctgcagatcccgcatcccatctccactgcagcctgagatgcagggcacccctgacgatgagccctctgagcccgagccctcaccctccacactcatctatcgcaacatgcagcgctggaaacgcatccgccagaggtggaaggaggcctctcatcggaaccagcttcgttactcagaaagacatgaagatcctacgagagatgtacgaacgacagtgatgttcccaggtccccccacaccagtaaacatcccccagctccacaaaaaaaacctgagcaggcggccgc

SEQ ID NO: 72469 - DNA, 904 bp, Homo Sapiens
ccgtggcccacgaagctcatctttgaactgtccccgccttctcccgccttgacttgtgaccctaggccctttggggcgcctctgacccagctagccagatcccggacccaaaccatgttccctgtgaaggtgaaagtggagaaatcagagctggagatggccaaagcccggaaccaacgggatgctgtcttcaagtgtctcctggagaagagtcacatggacaaggaggcgtctggatgaggaagctgggaaaacaccctaagacacccacaataagggactgctcaatcgcagccactggcaaaaggccatctgcccgcttcccccaccagcggaggaagaagaggagggagatggatgatgggctggctgagggagggccgcagcgatccaacacatatgtgatcaagctgttcgaccggagcgtggacttggcccagttcagcgagaacacgccactgtacccaatctgccgcgcctggatgcgcaacagcccctctgtgcgcgagcgtgaatgctctcccagctcacccctgcccccgctgcctgaggatgaggagggctcagaggtaaccaacagcaagagtcgtgatgtgtacaagctgccgccacccacacccccggggccacccggagatgcctgcagatcccgcatcccatctccactgcagcctgagatgcagggcacccctgacgatgagccctctgagcccgagccctcaccctccacactcatctatcgcaacatgcagcgctggaaacgcatccgccagaggtggaaggaggcctctcatcggaaccagcttcgttactcagaaagcatgaagatcctacgagagatgtacgaacgacagtgatgttcccaggtccccccacaccagtaaacatcccccagctccaaaaa

SEQ ID NO: 72470 - DNA, 693 bp, Homo Sapiens
gtacagctgctaccaggggagcgagagctgactatcccagcctcggctaatgtattctacgccatggatggagcttcacacgatttcctcctgcggcagcggcgaaggtcctctactgctacacctggcgtcaccagtggcccgtctgcctcaggaactcctccgagtgagggaggagggggctcctttcccaggatcaaggccacagggaggaagattgcacgggcactgttctgaggaggaagccccgttggcttacagaagtcatggtgttcataccagatgtgggtagccatcctgaatggtggcaattatatcacattgagacagaaattcagaaagggagccagccaccctggggcagtgaagtgccactggtttaccagacagctgagaaatccagccctgtgggaactggtgtcttataaccaagttggatacctgtgtatagcttcccaccttccatgagtgcagcacacaggtagtgctggaaaaacgcatcagtttctgattcttggccatatcctaacatgcaagggccaagcaaaggcttcaaggctctgagccccagggcagaggggaatggcaaaatgtaggtcctcgcaggagctcttcttcccactctgggggtttctatcactgtgacaacactaagataataaaccaaaacactacccgggggagggaagaagg

SEQ ID NO: 72471 - DNA, 579 bp, Homo Sapiens
gcacgaggggaacgtctgaggttatcaataagctcctagtccagacgccatgggtcatttcacagaggaggacaaggctactatcacaagcctgtggggcaaggtgaatgtggaagatgctggaggagaaaccctgggaaggctcctggttgtctacccatggacccagaggttctttgacagctttggcaacctgtcctctgcctctgccatcatgggcaaccccaaagtcaaggcacatggcaagaaggtgctgacttccttgggagatgccataaagcacctggatgatctcaagggcacctttgcccagctgagtgaactgcactgtgacaagctgcatgtggatcctgagaacttcaagctcctgggaaatgtgctggtgaccgttttggcaatccatttcggcaaagaattcacccctgaggtgcaggcttcctggcagaagatggtgactggagtggccagtgccctgtcctccagataccactgagctcactgcccatgatgcagagctttcaaggataggctttattctgcaagcaatcaaataataaatctattctgctaagagatcac

SEQ ID NO: 72472 - DNA, 508 bp, Homo Sapiens
  misc_feature (40)..(40): n is a, c, g, or t
  misc_feature (44)..(44): n is a, c, g, or t
  misc_feature (48)..(48): n is a, c, g, or t
  misc_feature (51)..(51): n is a, c, g, or t
  misc_feature (70)..(70): n is a, c, g, or t
  misc_feature (117)..(117): n is a, c, g, or t
  misc_feature (126)..(127): n is a, c, g, or t
  misc_feature (268)..(297): n is a, c, g, or t
tgccaggaagcttgcaccttcaggggtgaattctttgccngaantggnttnccaaaacggtcaccagcanatttcccaggagcttgaagttctcaggatccacatgcagcttgtcanagtcagtcnnctcagcctggcaaaaggtcccttgagatcatccaggtgctttatgcatctcccaaggaaggagtcaccttcttgccatgtgccttgactttggggttgcccatgatggcagaggcagaggacaggttgccaaagctgtcannnnnnnnnnnnnnnnnnnnnnnnnnnnnncaggagctttccagggttctcctccagcatcttccacattcaccttgccccacaggcttgtgatagtagccttgtccctccctctgtgaaatgacccatggcgtctggactaggagcttattgataacctcagacgttccagaagcgagtgtgtggaactgctgaagggtgcttccttttattcttcatccctagccagccgccggcccct

SEQ ID NO: 72473 - DNA, 585 bp, Homo Sapiens
  misc_feature (83)..(169): n is a, c, g, or t
  misc_feature (285)..(334): n is a, c, g, or t
ggaacgtctgaggttatcaataagctcctagtccagacgccatgggtcatttcacagaggaggacaaggctactatcacaagnnnnnnnnnnnnnnnnnnnnnnnnnnnnnnnnnnnnnnnnnnnnnnnnnnnnnnnnnnnnnnnnnnnnnnnnnnnnnnnnnnnnnnntgacagctttggcaacctgtcctctgcctctgccatcatgggcaaccccaaagtcaaggcacatggcaagaaggtgctgacttccttgggagatgccataaagcacctggatgatnnnnnnnnnnnnnnnnnnnnnnnnnnnnnnnnnnnnnnnnnnnnnnnnnntgtggatcctgagaacttcaagctcctgggaaatgtgctggtgaccgttttggcaatccatttcggcaaagaattcacccctgaggtgcaggcttcctggcagaagatggtgactgcagtggccagtgccctgtcctccagataccactgagcctcttgcccatgattcagagctttcaaggataggctttattctgcaagcaatcaaataataaatctattctgctgagagatcaaagcaaaaaacacac

SEQ ID NO: 72474 - DNA, 573 bp, Homo Sapiens
  misc_feature (84)..(170): n is a, c, g, or t
  misc_feature (286)..(335): n is a, c, g, or t
ggaacgtctgaggttatcaataagctcctagtccagacgccatgggtcatttcacaggaggaggacaaggctactatcacaagnnnnnnnnnnnnnnnnnnnnnnnnnnnnnnnnnnnnnnnnnnnnnnnnnnnnnnnnnnnnnnnnnnnnnnnnnnnnnnnnnnnnnnntgacagctttggcaacctgtcctctgcctctgccatcatgggcaaccccaaagtcaaggcacatggcaagaaggtgctgacttccttgggagatgccataaagcacctggatgatnnnnnnnnnnnnnnnnnnnnnnnnnnnnnnnnnnnnnnnnnnnnnnnnnntgtggatcctgagaacttcaagctcctgggaaatgtgctggtgaccgttttggcaatccatttcggcaaagaattcacccctgaggtgcaggcttcctggcagaagatggtgactggagtggccagtgccctgtcctccagataccactgagctcactgcccatgatgcagagctttcaaggataggctttattctgcaagcaatacaaataataaatctattctgctaagagatcac

SEQ ID NO: 72475 - DNA, 1016 bp, Homo Sapiens
  misc_feature (956)..(974): n is a, c, g, or t
ggtgggggcattcttctaggaatgaggggcatcagcccaccccaggcacctcagtggggttccgggccacctcaggactccaagaggctgtgtggagccaccactcctagccacagctgccatgataagtccttccatgaaggactgaggagggagagtgggggtccagggctggtgctgctcttccctcagctctgccggggctctaaggtccctctatttatttctcaaccctggctggcctctcaccaggagttaaggctgaatgccttccacgtgatggaggaaaaggccaactctgtcctggtcttgctgtggcaccccatcgccccacagctcgtaccttctcaccagattcccctgaatccaaactcgtggtgcaaacctctaccttttttacaaaaagatcttattgttaatttattgtttctggcacttgggcaaaccctgtagttaatactcctcccacactagacactgggtttcaggaggagggagactgccctgctttggtcccagagaggccctctgcagataggcgtggcccctcttcagaggacactaccctagggcactttctctttgaggtggagagacccataaagccttgaccacatcactccatatggggaggagaaggatccctgtcaccttctcctctcttcacggggcccttttgcagccctaggcctcatctgtgggaagggagtccctggctcatactgcccccaccacagctccttgccctggccagaactgctgtcgaagaaaatcaggccggaaggccaagaaggcgctaagggggatgggagggcaggttttccaggctggagtcggttccacccactcgcctgtccacaggcttccttgtaagcaagtcagcagcacagctactcacgctgccatctggacttattttatgtcaatctgtttataaataaaaaccaatatagatnnnnnnnnnnnnnnnnnnncctgagcaggcggccgcaagcttattccctttagtgaggtta

SEQ ID NO: 72476 - DNA, 1869 bp, Homo Sapiens
  misc_feature (12)..(12): n is a, c, g, or t
  misc_feature (155)..(155): n is a, c, g, or t
  misc_feature (160)..(160): n is a, c, g, or t
  misc_feature (181)..(340): n is a, c, g, or t
  misc_feature (525)..(549): n is a, c, g, or t
  misc_feature (1014)..(1032): n is a, c, g, or t
  misc_feature (1074)..(1699): n is a, c, g, or t
  misc_feature (1746)..(1746): n is a, c, g, or t
ttctggtatccngatcttgatacgtatcgccttgatgagtgtccgtccgcaccgaacgacgagcgcgcgatcatgagcaggagcgagagcgccatacgcaacccctctcccgcgcgtgccgatcattatgcagctgcacgacagttccgactggnaagcnggcatgagcgcacgcaataannnnnnnnnnnnnnnnnnnnnnnnnnnnnnnnnnnnnnnnnnnnnnnnnnnnnnnnnnnnnnnnnnnnnnnnnnnnnnnnnnnnnnnnnnnnnnnnnnnnnnnnnnnnnnnnnnnnnnnnnnnnnnnnnnnnnnnnnnnnnnnnnnnnnnnnnnnnnnnnaagaattcggcacgaggttattcttcaactaaatctaccaatcaaggaacaaattataagtaaaaatagttgattgaccttttaattcagtgtggttattctagatttagaataccagtactccagtttaatggttactttctatacttttattttctcattctcctaaaaagaaggaagaaggnnnnnnnnnnnnnnnnnnnnnnnnnccaatcatctgtttttaaacaatcgtttttgagcagatagctattcattccagattttcgtgtacccattctgtttcaggagctcttctaggtaaagctgagatcacaggaacagcaggtgacaggcctagctatagttaggaatacacaagccgtaaaatcgagtccttacagccataccacaaggtacgtccatttggactacaagaagagcttcctttaaagttcctatttcagcataaagaggctgtccttttttttgaggaatagtttggaccttgtgcctcctgtgggaggctgaggactgcaagaggagagctagcagatatgcctgttcacccctctctggtacttgtggcttgctagtatgtttttatgataatctcgggcattgtttgcattgtgtttattaatagggttttgtttttattgtttccttttttacagtaaaggctgaatgacatnnnnnnnnnnnnnnnnnnngcctacagccgcggccgctccaaccctcgtgccgaattcttnnnnnnnnnnnnnnnnnnnnnnnnnnnnnnnnnnnnnnnnnnnnnnnnnnnnnnnnnnnnnnnnnnnnnnnnnnnnnnnnnnnnnnnnnnnnnnnnnnnnnnnnnnnnnnnnnnnnnnnnnnnnnnnnnnnnnnnnnnnnnnnnnnnnnnnnnnnnnnnnnnnnnnnnnnnnnnnnnnnnnnnnnnnnnnnnnnnnnnnnnnnnnnnnnnnnnnnnnnnnnnnnnnnnnnnnnnnnnnnnnnnnnnnnnnnnnnnnnnnnnnnnnnnnnnnnnnnnnnnnnnnnnnnnnnnnnnnnnnnnnnnnnnnnnnnnnnnnnnnnnnnnnnnnnnnnnnnnnnnnnnnnnnnnnnnnnnnnnnnnnnnnnnnnnnnnnnnnnnnnnnnnnnnnnnnnnnnnnnnnnnnnnnnnnnnnnnnnnnnnnnnnnnnnnnnnnnnnnnnnnnnnnnnnnnnnnnnnnnnnnnnnnnnnnnnnnnnnnnnnnnnnnnnnnnnnnnnnnnnnnnnnnnnnnnnnnnnnnnnnnnnnnnnnnnnnnnnnnnnnnnnnnnnnnnnnnnnnnnnnnnnnnnnnnnnnnnnnnnnnnnnnnnnnnnnnnnnnnnnnnnnnnnnnnnnnnnnnnnnnnnnnnnccgtggcgcttctcatagctcagcctgtagtatctcaattcggtatngtccttcctccaatttggctgtgttactaacccccgttaacccaacgttgtgcttatccggtactatctctgagtcacccggtagacatatttatgccctgggccatcactggtatagatatg

SEQ ID NO: 72477 - DNA, 1059 bp, Homo Sapiens
cgagagcgcgcagagtccagactggcggcaggcccgaggggccgacccgcagcgtccctggtctctccagccctcactcggaaccgcacggtacaggtgaaagggggcagacccctcatcatgctttccaggcatctgccacttcccaggaattgtctccctggataaacaaggcgaagtccctggctgtgcagaagcagtagctgtgtggtggcacagtcaggaaaactcgggggccctgttgacagtgacaataccctcccctcccttgggctggacccctctctacagctaggagccaatggcagaagacaaaaccaaaccgagtgagttggaccaagggaagtatgatgctgatgacaacgtgaagatcatctgcctgggagacagcgcagtgggcaaatccaaactcatggagagatttctcatggatggctttcagccacagcagctgtccacgtacgccctgaccctgtacaagcacacagccacggtagatggaaggaccatccttgtggacttttgggacacggcaggccaggagcggttccagagcatgcatgcctcctactaccacaaggcccacgcctgcatcatggtgtttgatgtacagaggaaagtcacctataggaacctgagcacctggtatacagagcttcgggagttcaggccagagatcccatgcatcgtggtggccaataaaattgatgacataaacgtgacccaaaaaagagctttcaacttttgccaaagaagttctccctgcccctgtatttcgtctcggctggcttgatggtaccaattgttgtgaacggtgtggttgactgcagagctcttcaatgatgcaattcgattagctgtgtcttacaaacagaactcccaggacttcatggatgagatttttcaggagctcgagaacttcagcttggagcaggaagaggaggacgtgccagaccaggaacagagcagcagcatcgagaccccatcagaggaggcggcctctccccacagctgaggggccggggctagggtaaaggctgaattacataaacattgaaa

SEQ ID NO: 72478 - DNA, 1386 bp, Homo Sapiens
  misc_feature (677)..(735): n is a, c, g, or t
aacttacggctaggtagcgaggcctgggtgttgaattcggcacgaggcacaatgaggggagctacctggcacatacgcagtggaagaagcaccagaccaacctggcccggcgagcagccaaggaggccaatggaggcccctgcccagcccgcgcctgagaaggtcaaggtggaggtgaagaagtttgtgaagatcggccgcccgggctacaaagtgaccaagcagagagactcggagatgggccagcagagcctcctcttccagattgactaccctgagatcgccgagggcatcatgccacgtcaccgcttcatgtctgcgtacgagcagaggatcgagcctccggaccggcgctggcagtacctgctcatggccgccgagccctacgagaccattgccttcaaggtgccgagcagagagatcgacaaggcggagggcaagttctggacacactggaaccgggagaccaagcagttcttcctccagttccactttaagatggagaagcccccggctccacccagcctccctgctggcccccctggggtgaagcggcctccacccccgctgatgaacggtctgccccctcggccaccgctgcctgagtctttgccaccgcccccgccaggaggcctgcctctgccacccatgccccccacagggcctgcgccctcagnnnnnnnnnnnnnnnnnnnnnnnnnnnnnnnnnnnnnnnnnnnnnnnnnnnnnnnnnnngtggtgcatccccctgcatctggggtccatcccccagctcctggcgtccaccccccagctcctggcgtccatcccccagcccctggggtccacccaccaacctctggggtccaccccccagctcctggagtccaccctccagcccccggggttcacccaccagcccccggagtccacccaccagcccctggggttcacccaccagccccaggggtccatcctcccccatcagcgggggttcacccccaggccccgggggtgcacccagcagcccccgccgttcaccctcaggccccaggggtgcacccaccagccccagggatgcaccctcaggccccgggggtccacccccaacctcccggggtccatccgtcggctcctggggtccaccctcagcctccgggagttcacccctcaaatcctggggtgcaccccccaactcccatgcccccaatgctgaggcccccacttccctccgaaggcccagggaacatacctccccctcccccaaccaactgagaagctgctccctcccccagcaagcccagcgccaggtgctcttgccttttcccactgagagaaggctgctcttttgtactgccccccgctcattaaacagcctcccccagccctgagtgcactgatgtccgc

SEQ ID NO: 72479 - DNA, 984 bp, Homo Sapiens
  misc_feature (847)..(855): n is a, c, g, or t
tagcgaggcctgggtggcgaattcggcacgaggggcgaaacgaggaggagataacgcggccttgggctctggtgtctcccagtctgctaaagccctaaggccatcaccatggacttccagcatcgccccgggggcaagaccgggagcgggggcgtggcctcctcctccgagagcaaccgtgaccgcagggagcgcctccggcagctggccctggagaccatcgacatcaacaaggacccgtacttcatgaagaaccacctgggctcctatgaatgcaaactctgcctgacacttcacaacaatgaggggagctacctggcacatacgcaggggaagaagcaccagaccaacctggcccggcgagcagccaaggaggccaaggaggcccctgcccagcccgcgcctgagaaggtcaaggtggaggtgaagaagtttgtgaagatcggccgcccgggctacaaagtgaccaagcagagagactcggagatgggccagcagagcctcctcttccagattgactaccctgagatcgccgagggcatcatgccacgtcaccgcttcatgtctgcgtacgagcagaggatcgagcctccggaccggcgctggcagtacctgctcatggccgccgagccctacgagaccattgccttcaaggtgccgagcagagagatcgacaaggcggagggcaagttctggacacactggaaccgggagaccaagcagttcttcctccagttccactttaaagatgggagaaaccccccggctccacccaaaccctccctggctggccccccctgggggtgaaagcggccctccaaccccccgtttgaagaaacggttctgnnnnnnnnnggaccaccggctggcctgaagcttctttgccccgcgcccctcggaacggaaagggctggccctcgtgtcaaaccatgggcccaaccccaaaggggcgctggggccccttccagggaggtccgcgtgcgg

SEQ ID NO: 72480 - DNA, 1057 bp, Homo Sapiens
  misc_feature (980)..(998): n is a, c, g, or t
taactgcctggggaggtttcctgtcccttcaggatggatgaccaacagatggggcacctaggtccagtggggctgctcccgatctactgtttcttcctccaggagcaaggcatctagctcctccagccgctgctggagcagggggcccacatcagggctgggggccacattgggaggaacagtcctgccccctgcagcccggaccccacgggacggtcttcgtgatcgaggaaggctgctgtcccgaaattccacagcccgccggagcttccttgagctggtgaaaatcagagtcccattgcgctcccggggttcctcaaagatggtctcaaaggtcctcctggttgtgggtgattggtaattcttgttggtgtaaatttcttccaagctgaactccttcttgttcaacctgattggtcgaggcagtcccattggtgtaaggtttagctgaggacgggctggtgttctgcgtattctgaatcgagaaacctttcccatggtcttggtctcaggttctgaaagcacctggtcctttgaggctcttggctccttccctttggttgaacccaacctgggttctgctggttcggagaaggaagtggatgccgtggacgagcaagatgtggtgagagaaggggaggctcccactcctccgagagggaagacctcgttccggagacagggccgagggggtggcggggctcgggccatttccccaccacccacagtgtgccgccgcggccgtggtcggcttggttgggctggagcaggtggccaggtgcaggtacctgggccagggggccccagatcagggcaggagtagcttcggcccagagagggcttagggagaagtgctggggtattgtggtcctgagttcgccactggcggattgggggccgggggctgacagacgcagtgccctcagcagccccagactgctcggcctctgagatggcgatcttcaactccagcttcattnnnnnnnnnnnnnnnnnnncctcgtgccgaattcgccacccaggcctcgctaccttagaccgtagtagttactgccgg

SEQ ID NO: 72481 - DNA, 211 bp, Homo Sapiens
caatgagaaggattttaagcatccagaatcaattttaaaatctccaatttgctttatatgtaggtttatggactgcttaactgctactcattttttccttcatttatcaatagtgaaatatgaaattaaaataatgactatttgtggcaaaattagggactatgtagcatattaacaactttataaataaaagaataaatcaactcaaaaa

SEQ ID NO: 72482 - DNA, 708 bp, Homo Sapiens
tgcaggaagattgtggaggcatctcccagcccatctggctggtgagtgacacacggagagtgtctgacatccagtggtttcgggaggcctatggggccgtgacgcagacggtccgcgttgtagcgttggagcagagccgacagcagcggggctgggtgttcacgccaggggtggacgatgctgagtcagaatgtggcctggacaacttcggggactttgactgggtcatcgagaaccatggagttgaacagcgcctggaggagcagttggagaacctgatagaatttatccgctccagactttagtcactaggttctaggagtgagctggggcctgctgaggtgggggtggggctgactctgcaaaatgggggtgtcccccgatcctggccgaggtgaggaacagacagggggggtctagattctgagggggttggtggatattgggcaaggcaggaaacctctggagacctcattttctccatggggaagacagccatgctcttcaggaggagactccaagggcaaaggagggtgtcttggctgtgcttgaaggcgaaaccctgccatatccccagtgccagtcccctcagcctgtggtggccttgcatcctgactggatgttctcagccccttgttctgggcaagaacccagagctccccagtgtggatactaataaacctcttggagcacactctcagaaaaaaa

SEQ ID NO: 72483 - DNA, 937 bp, Homo Sapiens
actagcggcccagtattctagaacttagtgataaagtctgaccggataattcatcagttctccaacgctcctccaggcgctgttcaactccatgtttctggatgaccccagtcaaagtccccgaagttgtccaggccacattctgactcagcatcgtccacccctggcgtgaacacccagccccgctgctgtcggctctgctccaacgctacaacgcggaccgtctgcgtcacggccccataggcctcccgaaaccactggatgtcagacactctccgtgtgtcactcaccagccagatgggctgggagatgccctccacaatcttcctgcaaaagaagcctgggtcagcctggcgtttctcctctccccagcggatcatgtccttccgaaaggcctccttgtaggtgctggtgtccaggagtctctggaagttcaagccatgctcctgagcatactgttccttgagtggaccagagagccggaggacagcacagacatcagctccaagtctgctctgcagcgcctcggtcacgaagtccttcccggatttcctcttgccgctgaacagcagtaccagccgcggggcgcctcccagcggggccatggggccgccacgcctcgcgatgcctgaagctgacacttctccctacccctaaaatcgggacaccgcgcggaatggacgcggccactaagcggagcggcaacaaggagcaatcgcgcccctcctcgccgtagctgcgaacagggctgaccgcccgcgaccgtgccctcagctcatgtccaaacagatatggggagaaaagggtgagacacgcggagagaaaggcggttccttcacagagcagcctcccctcgtgaagctcccccacccgaacttcacttagaacagtccagcccctcgtgccgaattcgaccacccaggcctcgtacctagcc

SEQ ID NO: 72484 - DNA, 695 bp, Homo Sapiens
ggcgcactgggcatggacatatagaacagtgtaaaaaagcaggctggtacggtccggaattcccgggatatcgtcgacccacgcgtcgggaggctatggggccgtgacgcagacggtccgcgtgtagcgttggagcagagccgacagcagcggggctgggtgttcacgccagggtggacgatgctgagtcagaatgtggcctggacaacttcggggactttgactgggtcatcgagaaccatggagttgaacagcgcctggaggagcagttggagaacctgatagaatttatccgctccagactttagtcactaggttctaggagtgagctggggcctgctgaggtgggggtggggctgactctgcaaaatgggggtgtcccccgatcctggccgaggtgaggaacagacagggggggtctagattctgagggggtggtggatatgggcaaggcaggaaacctctggagacctcattttctccatggggaagacagccatgctcttcaggaggagactccaagggcaaaggagggtgtcttggctgtgcttgaaggcgaaaccctgccatatccccagtgccagtcccctcagcctgtggtggccttgcattctgactggatgttctcagccccttgttctgggcaagaacccagagctccccagtgtggatactaataaacctcttgggagcac

SEQ ID NO: 72485 - DNA, 627 bp, Homo Sapiens
aatttccgagttgactgtttcaatgtcactaactaacggatattaattataagtctgtctatgcttaaaaaaatattagaacggcagcaagaacccccgtaacctgtgcccttggcccccccagcctctcccaacttgttccaccagagcacattctgcaagaagaactgacacgcacagcctctgctgggagcacagctggtcgtgtggcacaggtccccgggcctggcatgggcgtcccctggggggtcgacccggtcgtgggctgtctggcaggagaggggctgggcggcaggtgacaggacagacgaggatgagggaggggatgggctgggcctgccggctgtcacgggagggctcaggttcagacccgcatctgggcagacctccttctggagagcttggaccgtatggtcccggccaggagggggttgaaggcgtacagccagtcatgcatgtccttgtcgctggcggcctgcagcaggatgccgcggtgttccgtgcacaccgcgaatgtgttgggtgtcttgagcatagcctgctggtcctcactgtactccacctgggcacgtggcaggtttgagcacgaaccgctccacggtgtccttgtcgctgttgtacatgtag

SEQ ID NO: 72486 - DNA, 1261 bp, Homo Sapiens
  misc_feature (75)..(75): n is a, c, g, or t
gagacagggatgcgcacatgtggtcccgatggcgccactcttcgatgtgtcatgtccagcagaaagcccagctcntcactgaccgcgcagcctttcagaaaatcgatgagaagggctcacttcagtggaccggatcacccgcttggaaaagggcaagatctatcggcagggaaacctgtttgacttcttacgcttgacggaatggcgtggcccccgcgtgctctacttcggggaccacctctatagtgatctggcggatctcatgctgcggcacggctggcgcacaggcgccatcatccccgagctggagcgtgagatccgcatcatcaacacggagcagtacatgcactcgctgacgtggcagcaggcgctcacggggctgctggagcgcatgcagacctatcaggacgcggagtcgaggcaggtgctggctgcctggatgaaagagcggcaggagctgaggtgcatcaccaaggccctgttcaatgcgcagttcggcagcatcttccgcaccttccacaaccccacctacttctcaaggcgcctcgtgcgcttctctgacctctacatggcctccctcagctgcctgctcaactaccgcgtggacttcaccttctacccacgccgtacgccgctgcagcacgaggcacccctctggatggaccagctctgcaccggctgcatgaagacccccttccttggtgacatggcccacatccgctgagggcacctttattgtctgggacaggccctcagcccctcctgccccatccacccagacaagcaataaaagtggtctcctccctgtgcatgcttctgctttcagccccagcctcgtcacttgactgtgaggatcctctgggtgtcagggaagtcctcctccagcagtgagtcatcgaagggttcacaaaaggtgtcgctgccaaagacagggttggggacagagaccagggtggggttggtcccttcttgccacggtgagaagtcgtcatcagcatcatcttccgcctggaaggcagagaagccaaagcccatgggcttgccttcgggcacggaggtagagagctccggccaccaagccaagcagtgctccagcggcaagcacagcccccacgcctgccgccacaggtggggcttcaggcgccagcactgcctgaggctgtgggggtgccaagaaggggctggccatatcatggatgatgccattgaatgccatgatgtcccacacaatgatacggctaaccacgactgtgcctgaggc

SEQ ID NO: 72487 - DNA, 1119 bp, Homo Sapiens
  misc_feature (816)..(816): n is a, c, g, or t
cctacaggggcctccagcctgtgccagacgaggaggtgattgacgctgtatgggggtacccagcacatcccactataccagatgagtggcttctatggcaagggtccctccattaagcagttcatggacatcttctcgctaccggagatggctctgctgtcctgtgtggtggactactttctgggccacagcctggagtttgaccaagcacatctctacaaggacgtgacggacgccatccgagacgtgcatgtgaagggcctcatgtaccagtggatcgagcaggacatggagaagtacatcctgagaggggatgagacgtttgctgtcctgagccgcctggtggcccatgggaaacagctgttcctcatcaccaacagtcctttcagcttcgtagacaaggggatgcggcacatggtgggtcccgattggcgccagctcttcgatgtggtcattgtccaggcagacaagcccagcttcttcactgaccggcgcaagcctttcagaaaactcgatgagaagggctcacttcagtgggaccggatcacccgcttggaaaagggcaagatctatcggcagggaaacctgtttgacttcttacgcttgacggaatggcgtggcccccgcgtgctctacttcggggaccacctctatagtgatctggcggatctcatgctgcggcacggctggcgcacaggcgccatcatccccgagctggagcgtgagatccgcatcatcaacacggagcagtacatgcactcgctgacgtggcagcaggcgctcacggggctgctggagcgcatgcagacctatcangacgcggagtcgaggcaagtgctggctgcctggatgaaagagcggcaggagctgaggtgcatcaccaagcccctgtttcatgcgcagttcggcagcatcttccgcaccttccacaaccccaccctacttctcaaagcgccctcttgcgcttctctgaactcctaccttgccctcccctcagcttgcctggttcaactaaccgcggggggaacttcaccctttctaccccaacccccttacggcccggctggcagacaaccaaggggcccccccctttctgggaagggggacccaccccctccc

SEQ ID NO: 72488 - DNA, 1423 bp, Homo Sapiens
  misc_feature (461)..(518): n is a, c, g, or t
  misc_feature (927)..(939): n is a, c, g, or t
ttaattgctcttaggtctatctctgtagaatgtctccaagattgaagaagaagctgagcagttgaaaaatgctaatctctttgacttagtcagaaaaaaacagaggataattaagatactagtcatgaaaagtgattcattcttttttgtcattccataagcttgctgaatagtgtaccggtaatatattgtatttccaccgtactctgtgaatctaattattattctttaagtgttgatatataatatacataaatatgtaagctaaacatataactatatgttttaagaagaaaacatctacgaaaggtaaaaagagatgatcagttggttgtttacttgctagaaaccattgttttattgcaaacgaaggaaaaatgaagagattataaaagtcagctaatgaagtaagatacgtagtaaagtcaggactattcaaaaagtaagaaagaaaatttggnnnnnnnnnnnnnnnnnnnnnnnnnnnnnnnnnnnnnnnnnnnnnnnnnnnnnnnnnntatgtgcttgaaagtaaaatacttacaatagtagcttaactatttcactctttaaataaaaatactaaagaagttcgtatatcctggaataacatgtcatcttcaaaatatttttattttctaatatttttaataataaacattttatagtgttaaagctgtatttttcttaataaataaaggacattacaaatatttctttaaggaagttcaaaaggatgtcgtcttgttaacattggaacgaatataaatcttcaaaatacaattaatatatactgttttgtggaaacttagcctcatactattctttaatgctcttcaaatttaaactaacccttacattccatgtgatgtgatgtaggcttataagatgctaaaatctataggtttcggaagtgaaagattctannnnnnnnnnnnnggtacataatgggaatttcattccagattatattttatttacatattaatttcacagaatattaatatttcttaacttcttaaagcatgctagcgttttatgtatatgtacacatatattcagacagggtaattttatctgctgcctaacattgtactaaaatattgctttatctgtttttaattacaaaatgctaatgatttcttaaattatagtttaaagacaattggcccaggaagcaaatcccctgcctttagtatgaaccactataagtaaccttacaaatagagttaatccaagacaatattaacaaactgtgctttgtctttaataaaagggataggattaacaaacatattgatggcataacctattcagctatgtccttatttttgcaataatgtaacctcaaatattggattgttgaaccaacaatggctgtgttaaagaagattaaataaaccgaaaaataaaaagcatgaaa

SEQ ID NO: 72489 - DNA, 867 bp, Homo Sapiens
gcatagtaactatgaccagctggtaaaaaaagcaggctggtacggtccggaattcccgggatatcgtcgacccacgcgtcgggctgacgggggcccgtgctgctgggagctctacgcacaagaggccgccggggtcacggacaggaacctcagcccaggctgctggcctttctccttcgcaggagtcccccaaaatccacacagcgactcgagcagccttccactcagccagaggagggtcgggctcccccgcctgctctcggtggtggcgtctggcccttcctgccgtttccaaggcctccggaagcaccaacccagttctcagttacctcctctggccggaaggcctcacgttgtcctccagagctgctctgggcccagggctggctccgtgaccacctgatggacgtgctgggcagcatgggctcccaaggcagcatccccagctgctctcccaccccaccccagctgcccggcggctgggcccacgagggctctggggacacttccataggaaaggggcctggcactttgtgattgccacgtgtttcctgttaagccgcctgcccccagtgcaaatctctgtgttttgctctctcctgaacaaaaatgtaaaccgacgccggaaagcaaatggtatcgaatacctttcttgcccataagggtttttacaaagaacgtgtctcactaggaactaggacactcatcggcccgagaccaactcctggataaaaggaataaggagaatcgtgtttgtaacgagttacaggattgtttctttcctggattttaaacttttgttaaattgtgaaattatggaggagttttatagaaacaaaaaagtgaaataaagtcagatgggaaagc

SEQ ID NO: 72490 - DNA, 1374 bp, Homo Sapiens
  misc_feature (670)..(683): n is a, c, g, or t
  misc_feature (716)..(743): n is a, c, g, or t
  misc_feature (912)..(912): n is a, c, g, or t
tgcaacggaacatggctgcatcaaatattggcatctctcacaggcaaaagactgcaaacccagattgccagcaagggccacatctcccataagaaccaagtcagcgtctctgtcaccagccgctgccacccatcagtcacaaatctatgggcgctcccagactgtagccatgcagggtcctgcacggactttaacgatgcaaagaggcatgaacatgagtgtgaacctgatgccagcgccagcctacaatgtcaactctgtgaacatgaacatgaacactctcaacgccatgaatgggtacagcatgtcccagccaatgatgaacagtggctaccacagcaatcatggctatatgaatcaaacgccccaataccctatgcagatgcagatgggcatgatgggcacccagccatatgcccagcagccaatgcagaccccaccccacggtaacatgatgtacacggcccccggacatcacggctacatgaacacaggcatgtccaaacagtctctcaatggctcctacatgagaaggtagacaacgtgggcagtccacaaaacctacggggcatcactattggattgatctgcacaaatacctttgaagagtacgatttcaaaaccagcaattggtgtgaatgcaaaaacatttgttggcaccatttatttnnnnnnnnnnnnnngctgtatgcagcagaaagccttatacaagttgnnnnnnnnnnnnnnnnnnnnnnnnnnnngggtaccttcatttctgtacttttatataaaattctctgcaaaggaaggcctctcttgtggactacaatttggaggcagccacttgttgtgcctgcttctgttaaacaatgtggatatcaagcccccccaaattatctgttttaatattgaacctagagcttttttttncccttccctgtccactccatgtaaatgcctttagcatttcagttattgtatattttgtttaaggtgacacttcagcatgccgctaatgtctttgttagtgacagtgcatttggtagtactgtacaacgtgttgtgctaacagtaagccatttcttaagtttttggccttgattagggtgccctaatttgagggtttaaaaaaaaactatatttctgtcaattataaaactgtaacagagctataaaagctattcccatgtggttagtcaaaagggttttattgctaaatgtttggtgtaaagttgagacccttttccattttggtgacagatttctttggggaaaaaaggcagctttctgttttataaatgcagacttctgtttattgaatgaagcatatctcagtgtttatctgtcaggttttgaaacatttcatatatgtccaaatacttgggaggattt

SEQ ID NO: 72491 - DNA, 1171 bp, Homo Sapiens
  misc_feature (1110)..(1130): n is a, c, g, or t
aaataggggctaggtacgaggccgggtgttgaattcggcacgaggcttcaacatggccgaagcaagtagcgccaatctaggcagcggctgtgaggaaaaaaggcatgaggggtcgtcttcggaatctgtgccacccggcactaccatttcgagggtgaagctcctcgacaccatggtggacacttttcttcagaagctggtcgccgccggcagctaccagagattcactgactgctataagtgcttctaccagttgcagcctgcgatgacacagcaaatctatgacaagtttatagctcagttgcagacatctatccgggaggaaatctctgacatcaaagaggaggggaacctagaagctgtcttgaatgccttggataaaattgtggaagaaggcaaagtccgcaaagagccagcctggcgccccagcgggatcccagagaaggatctgcacagtgttatggcaccctacttcctgcagcaacgggacaccctgcggcgccatgtgcagaaacaggaggccgagaaccagcagctggcagatgccgtcctggcagggcggaggcaggtggaggagctgcagctacaggtccaggcccagcagcaggcctggcaggctctacacagagaacagagggagctggttgctgtgctgagggagcctgagtgaggagaccgccagccccagaagcagagggcagtcaaggtcaagagcctgtggtccagcatgcctggcctgggcgggctacctctgagaacggctgaaatggtgcccagtccatcagcagtgatggaatttgctggaggactaggccagagcaagcctcactgccactgtgcctttggggcacccttggggttggacatacaccccctttagattcctctgtttcttctacctggataattcttggccatgttctctcttctctaggttcaggtcagctctgcccctccgcccccctcctgctggttccccagcccttttccctggccctggcttggagaatctgttttcaatctccactgattgcccccttgctggccagcccaggggcctttaccatgttctctccacatccgtaaataaacttccttcactacactgtnnnnnnnnnnnnnnnnnnnnncctgagcaggcggccgcaagcttattcccttgtagtgaggg

SEQ ID NO: 72492 - DNA, 1151 bp, Homo Sapiens
  misc_feature (42)..(86): n is a, c, g, or t
  misc_feature (90)..(124): n is a, c, g, or t
aaaagatcgtatagactcatatagggcgctcagcgtcgtcannnnnnnnnnnnnnnnnnnnnnnnnnnnnnnnnnnnnnnnnnnnnccgnnnnnnnnnnnnnnnnnnnnnnnnnnnnnnnnnnncagtcgacggtaccggacatatgcccgggaattcggccattacggccgggggaggttcaacttcaacatggccgaagcaagtagcgccaatctaggcagcggctgtgaggaaaaaaggcatgaggggtcgtcttcggaatctgtgccacccggcactaccatttcgagggtgaagctcctcgacaccatggtggacacttttcttcagaagctggtcgccgccggcagctaccagagattcactgactgctataagtgcttctaccagttgcagcctgcgatgacacagcaaatctatgacaagtttatagctcagttgcagacatctatccgggaggaaatctctgacatcaaagaggaggggaacctagaagctgtcttgaatgccttggataaaattgtggaagaaggcaaagtccgcaaagagccagcctggcgccccagcgggatcccagagaaggatctgcacagtgttatggcaccctacttcctgcagcaacgggacaccctgcggcgccatgtgcagaaacaggaggccgagaaccagcagctggcagatgccgtcctggcagggcggaggcaggtggaggagctgcagctacaggtccaggcccagcagcaggcctggcaggtgcgaagcccagcggtgcagagtccagcaaaggtgcagcctttgtgtccaagcaggagggcagcgaggtagtgaagagacccaggcgctacctgtatcaatggctgggagccccagtcccctacccggatcccctggagcccaggagggaggtgtgtgagctcaatccggactgtgacgagttggctgaccacatcggctttcaggaggcctatcggcgcttctacggcccggtctagggtgtcgctctgctggcctggccggcaaccccagttctgctcctctccaggcacccttctttcctcttccccttgcccttgccctgacctcccagccctatggatgtggggtccccatcatcccagctgctcccaaataaactccagaagaggaaaa

SEQ ID NO: 72493 - DNA, 948 bp, Homo Sapiens
  misc_feature (741)..(741): n is a, c, g, or t
  misc_feature (840)..(840): n is a, c, g, or t
  misc_feature (892)..(892): n is a, c, g, or t
  misc_feature (900)..(900): n is a, c, g, or t
gagcgaggcctgggtggcgaattcggcacgagggcaagtagcgccaatctaggcagcggctgtgaggaaaaaaggcatgaggggtcgacttcggaatctgtgccacccggcactaccatttcgagggtgaagctcctcgacaccatggtggacacttttcttcagaagctggtcgccgccggcagctctccactccttcattgggacggaagtgctggtccccgcctgccctctggtggacagtctgtgaaacaggccttcagttgggcggcgtgcaggttaccacaggggaggaagctaccagagattcactgactgctataagtgcttctaccagttgcagcctgcgatgacacagcaaatctatgacaagtttatagctcagttgcagacatctatccgggaggaaatctctgacatcaaagaggaggggaacctagaagctgtcttgaatgccttggataaaattgtggaagaaggcaaagtccgcaaagagccagcctggcgccccagcgggatcccagagaaggatctgcacagtgttatggcaccctacttcctgcagcaacgggacaccctgcggcgccatgtgcagaaacaggaggccgagaaccagcagctggcagatgccgtcctggcagggcggaggcaggtggaggagctgcagctacaggtccaggcccagcagcaggcctggcaggctctacacagagaacagagggagctggttgctgtgctganggagcctgagtgaggagaccgccagccccagaagcagagggcagtcaaggtcaagagcctgtggtccagcatgcctggcctgggcgggctacctctganaaacggctgaaatggtgcccagtccatcagcaggtgatgggattttgctggnaggactangccagaagcaggcctcactggccactgttgccttttgggggccaccct

SEQ ID NO: 72494 - DNA, 1051 bp, Homo Sapiens
  misc_feature (49)..(49): n is a, c, g, or t
  misc_feature (82)..(82): n is a, c, g, or t
  misc_feature (130)..(130): n is a, c, g, or t
  misc_feature (154)..(156): n is a, c, g, or t
  misc_feature (162)..(162): n is a, c, g, or t
  misc_feature (165)..(165): n is a, c, g, or t
  misc_feature (201)..(201): n is a, c, g, or t
  misc_feature (230)..(230): n is a, c, g, or t
  misc_feature (299)..(308): n is a, c, g, or t
  misc_feature (329)..(329): n is a, c, g, or t
  misc_feature (988)..(1009): n is a, c, g, or t
tgcaatcagatgcagctgtcaacattgttcagtgtatccttgctgcctngcgctaaaagtgaatacgatctttcatagtacngaaaagcattgacaaatccataccatcatgtaaacctctcacacaganggatacagagactactcagttgtnnnaagacntantacaaaaaccctacagctacatatcccttgatgtcnaaactagacacttcctactaagatcaganacatgccaaggaccacccacaccactgcttttcagcattgtactggaagtgctatataatgcagtgttnnnnnnnnnngaaataaaatgcacatagatntgaaaggatgaaatacaactttgttcacaagtaacatgattgtctttgtagagaattctaaataacaaaaaccctgctgacattaataagcaattacagcaggattgcaggatacagtcctcaggtagatgataaaaaggaattggacatcaagtcattaaaagacacggagaaaccctaaatgcttattgttaagtgaaaaccaatctgaaaaggctttctatgttgtatgattgcaattatatgacattctgggagaggcaaaactatcgagcgagtcaaaggaccagtggttgctgagagttgaggggaaaggagggatggcaggtaggtgatttttaggacagtgaaagtactctgtagggtactgtaatttgtcaaaatgcagagaatggaaaacagtgaacggaaaacacagagtaaaccctagtgtcaactctggacttcagttaataacagtgtaccactattggctcatcaattgtaacaaatgaaccataatgatgcaagatgttaataattggggagcctgtggaggatgggagggttaaaggtttatatgagaattctctgtactttttgctcaatttttctgtaaccctaaagctgctctaaaaaatgaagtgtattaagtaaataaataagtaaataaccaaccnnnnnnnnnnnnnnnnnnnnnngcctacagccgcggccgcaagcttattccctttagttgaggt

SEQ ID NO: 72495 - DNA, 873 bp, Homo Sapiens
caagtcagatcctttattctctttaatcttctgagattttctcaatcagtctttgaatgaaaatgatctgaaaatcactggatgtatgaggacaatttagaaggagctaagttggctggcgcctgccccctgccgcagcacccgccgcctctacgcacaagcccagaagctgcgaaaacacagcagccacctcttcacagccaccatccctctgaatggcacgagtgacacctggtaccaggagctcaaggccatcattcgagagcagcagacgcggcccatctggacggcggaagatcagctggatggctccttggaggacaacctagacctccctcaccacggcctggccgacagctccgctgacctcagctgcgacagccgcgttaacagcgactacgagacggacggcgagggcggcgcgtacacggatggcgagggctacacagacggcgagggggggccctacacggatgtggatgatgagcccccggctccagccctggcccggtcctcggagcccgtgcaggcagatgagtcccagagcccgagggatcgtgggagaatctcggctcatcagggggcccaggtggacagccgccacccccagggacagtggcgacaggacagcatgcgaacctatgaacgggaagccctgaagaaaaagtttacgcgagtccatgatgcggagtcctccgatgaagacggctatgactggggtccggccactgacctgtgacctctcgaaggctgccagctggtccgtcctccttctccctccctggggctgggactcagtttcccatacagaacccacaaccttacctccctccgcctggtctttaataaacagagtattttcacagcaaaaaa

SEQ ID NO: 72496 - DNA, 1181 bp, Homo Sapiens
gaagaaaaccaacccaaaccagtgaattttttagaacctttagaagggtgtctttattcaggttttactgtaatggtaaggattgactcaagagacagtattagtaaatttattgtgtatggatcaaaagtgaataatgtatgaatgagagctgtaagaaggatttttattttgttataatttagttaccattttcagtgttatttcaaaggttctttgaagaattttggggcagggcatcagattagagttttaaaatttgagtattttggatatcagtgttcctcatgaagatatacatggatattcaattttgatggcttccagatttgtaagattgtatgttgtatataccattctattaagaaacatgtccactgtgctttcaaacatagataaagcatgataaagattattatttaagatatacttgtatttatacctcagatattcttttgggttttgtacctcaaggcttttttcttcttattgtaaatacactttacgtgaatacagtctaagtgaagaaaataaataaaaggaagaggtttataacttgctctatatctgtacagattataatcaataagtgcactattattaaatgtttaaagtaagggaaaagtctgggctgccttccttaatattgcatctcactcccacccttaaaaccacagattgcaaagcatagcattttagcatcaactacaatcaaaagagcgatttgctgaaggaaaaatcggactgcaaatcattccaaggccaaactgcaactgagccacccactcccaaacaggaaaccctggtgaaggttcaggaagcacggagattctctccaacaaaggtccagttaggaaacgacgctgagaggatgacgacaacgtgcaacagcagaaagatgcttgcaagcagagtcagggtcaccagtgaatgccacaaaagttctctttcccactgtttaatttgacaagagaagaatttgaaggatatgaacattttcaagaactctgctgaggtcacttagagcgccatcacaacttatttgtgtgactaattgcctagattgtaagctctttgagggcagggcttgtctcttacacatctttataatcccctgcagcggctttcagtattttgtacttgtaggcacctaataaatttattatttgctataaaaaaaa

SEQ ID NO: 72497 - DNA, 723 bp, Homo Sapiens
aagaggaagaatgatttaccaggcggcaggctctccttctcggaataaaatttggatcgggccaggaaaattaccaggggaagagagagattgcctaaaaaaggaacaggagattccaaaaaaagtaattctagtccctcaagagacagaaaacctcatgatcacaaagccacttatgatactaaacggccaaatgaagagacaaaatctgtagataaaaatccttgtaaggatcgtgagaagcatgtattagaagcaaggaacaataaagagtcaagtggcaataaactactttatatacttaacccaccagagacacaggttgaaaaagagcaaattactgggcaaattgacaagagtactgtcaagcctaaaccccagttaagtcattcctctagactttcctctgacttaactagagaaactgatgaagctgcttttgaaccagactataatgaaagtgacagtgaaagtaatgtttctgtaaaagaagaggaatcttcaggaaacatttctaaggacctgaaagataaaatagtggagaaagcaaaagagagcctggacacagcagcagttgtccaggtgggcataagcaggaatcagagccacagcagccccagcgtcagccccagcagaagccacagtccttctggaagccagacccgaagccacagtagcagtgccagctcagcagaaagtcaggacagcaagaagaagaagaaa

SEQ ID NO: 72498 - DNA, 950 bp, Homo Sapiens
agcatggaatatgaaccaagttggttacaaaaaagcaggctggtccggtcggaattcccgggatatcgtcgacccacgcgtccggtgcttagtgattgcggtttcggtcgctctcccgtgtttcccgggctgggtatttgcctcgcaccatggcgcccaagggcaaagtgggcacgagagggaagaagcagatatttgaagagaacagagagactctgaagttctacctgcggatcatactgggggccaatgccatttactgccttgtgacgttggtcttcttttactcatctgcctcattttgggcctggttggccctgggctttagtctggcagtgtatggggccagctaccactctatgagctcgatggcacgagcagcgttctctgaggatggggccctgatggatggtggcatggacctcaacatggagcagggcatggcagagcaccttaaggatgtgatcctactgacagccatcgtgcaggtgctcagctgcttctctctctatgtctggtccttctggcttctggctccaggccgggccctttacctcctgtgggtgaatgtgctgggcccctggttcactgcagacagtggcaccccagcaccagagcacaatgagaaacggcagcgccgacaggagcggcggcagatgaagcggttatagccattgacattgtggccacaggccactggccctgggtggctctgtcagggtgcacagcccctcatgcctggagcaatgagggtctagtccaggggccaaaagcagtctgaggtattgggtatacttatactctatagggtcgttgaataaatggcttagaatgtgaaaaaaacaaccaaccaaaacaacacagacggcccgcagggcgaaagcaggacaagaaagaaaaagcagaaagaagccggcaaatggccataaaatttttgtagaacagggaac

SEQ ID NO: 72499 - DNA, 833 bp, Homo Sapiens
  misc_feature (15)..(15): n is a, c, g, or t
tcaggattgcctggngacagtaggagcatggcaggagctggggcaggtgcatagcagtgcagtgggaaggaacagaggagatcttagaattttgaggaaaatctgagacttgagacctggattctaacagaccaactgcatgtgtgtctgtaggtctcagtttccacattcatacagtgagggtgttaagtcaggtagctggagacttcccatcgcctctgacacttttggaggtgatatgatacagcccccgaccaaaccaggctttgtggggggtgagagaatacagacacaagtggcaggattcagatggaagcttcgcaaggctgggggccgaggaccacccacttctctttcccagccctagttctgggttccccagtggggcaaggggtggtggaggcagtgcccatgctgggctgagcctgcagtttttgtgagctctgggcttgtctccatgggaacaggggtgccttcttagtgagctcatttcacacagatcgagggggtatgcgtgggggagttgtgagtgagctcagctccttcaggcctggcctctcccagaacagagtgaagcccctgccctggacccctgctcccttctacccttgagggccaccaatggaagagcccgcccttcattctgcagctcctgcggccaggctgagctctgcccccaactttgttttctctcatgttctcaatacactctgcctcaaatccgtcttgctctttctttcttccgtgctgctaggggtcagggtccttcctcctgcctgattctagctgggaagtgtggtggcctgtcaattattggtgtgaagtgtggtgtg

SEQ ID NO: 72500 - DNA, 754 bp, Homo Sapiens
  misc_feature (15)..(15): n is a, c, g, or t
  misc_feature (23)..(23): n is a, c, g, or t
ggcagaaatgcaganacagtccntaaagcaagaggaggaccgtcccaagagacgaggaccggcctatgtcatggaactgcccaaactaaagctttcgggagtggtcagactgtcgtcttactccagccccacgctgcagtccgtgcttggatctggaacaaatggaagagtgccggtgctgagacccttgaagtgcatccctgcgagcaagaagacagatccgcagaaggaccttaagcctgccccgcagcagtgtcgcctgcccaccatagtgcggaaaggcggaagataactgagcagcaccgtcgtctcgacttcggaggcaacaccaagcccgaccgggccaggcctgggtgatctgctgctgagacgccacggagggctggggatgcgcctgcgtccgtttcgcgctggccggggctctgggtgctgccctgcgccctgccgcacccgcggcccgcgcagctgcctaggatgttctgggctaatatacttgtaaaaccaccgcattctagggttttctttcattttcgttaagaatttggggcaggaaatactttgtaactttgtatatgaatcaaaacaaacgagcaggcatttctgtgatgtgttgggcgtggttggaaggtgggttctgcgtgtcccttcccagcgctgctggtcagtcgtggagcgccatcatgtcttaccagtgacgctgctgacacccctgacttttattaaagaataagctgtcgttacagtattgcatttt

SEQ ID NO: 72501 - DNA, 685 bp, Homo Sapiens
ctgataatgggtatcagttatgtaagtccctggatcatattcacagaaatggaatatttcacagagatgtaaaaccagaaaatatactaataaaggatgtcctgaaattaggggactttggctcctgccggagtgtctattccaagcagccgtacacggaatacatctccacccgctggtaccgggccccggagtgtctcctcactgatgggttctacacgtacaagatggacctgtggagcgccggctgtgtgttctacgagatcgccagtctgcagcccctctttcctggagtaaatgaactggaccaaatctcaaaaatccacgatgtcatcggcacacccgctcagaagatcctcaccaagttcaaacagtaagtattgtgttctgagagtggatgtggacccactcccctgctaggacctgcagcagggcaagcccctccctgtgcctccctcaaacccctctcaggagctcctttggctgactacaggggttcaagttcacttgagggccagtgagtggctgctcagacagagcccatcactttaagtggtctcaaaggtgagctcttccttgagcatcacagaaagatttgtcacaggctttctgagggctggggagtcaggctgtgttccctgagtaatttaaacaggacttagaagcctttgggtggaaacgttcc

SEQ ID NO: 72502 - DNA, 1379 bp, Homo Sapiens
caggacacaacatggcggcgggatctctaacgctctccttcgagggaccaccacggagatcctagtgcgggaccccgcctcagggaagtggaaagcaggggacaaccttcctgcttctttcttttccgtccagtgtcggcaaggggttgtcaccggcttccgcatccaagatgaagaactataaagcaattggcaaaataggagagggaacgttttctgaagttatgaagatgcaaagcctgagagatggaaactactatgcatgtaaacaaatgaagcagcgctttgaaagggagaagatacccattatcagaaaaaaaattatgcactatatgtaccagttatgtaagtccctggatcatattcacatcaggatgtcctgaaattaggggactttggctcctgccggagtgtctattccaagcagccgtacacggaatacatctccacccgctggtaccgggccccggagtgtctcctcactgatgggttctacacgtacaagatggacctgtggagcgccggctgtgtgttctacgagatcgccagtctgcagcccctctttcctggagtaaatgaactggaccaaatctcaaaaatccacgatgtcatcggcacacccgctcagaagatcctcaccaagttcaaacaggatcaggaatacctctactaacaaccaatttgtccccacaatgcctctccctcctgcacgcaatggtggcctatgatcccgatgagagaatcgccgcccaccaggccctgcagcacccctacttccaagaacagagaaacagtccctaaagcaagaggaggaccgtcccaagagacgaggaccggcctatgtcatggaactgcccaaactaaagctttcgggagtggtcagactgttcgtcttactcccagccccacgctgcagtccgtgcttggatctggaacaaatggaagagtgccggtgctgagacccttgaagtgcatccctgcgagcaagaaggtagcgcggaaccagcttctctgacggcgctgctcttcgacccagcccaggccgccactgaattttgtgtctgtaatttttctttgacagacagatccgcagaaggaccttaagcctgccccgcagcagtgtcgcctgcccaccatagtgcggaaaggcggaagataactgagcagcaccgtcgtctcgacttcggaggcaacaccaagcccgaccgggccaggcctgggtgatctgctgctgagacgccacggagggctggggatgcgcctgcgtccgtttcgcgctggccggggctctgggtgctgccctgcgccctgccgcacccgcggcccgcgcagctgcctaggatgttctgggctaatatacttgtaaaaccaccgcaaaa

SEQ ID NO: 72503 - DNA, 511 bp, Homo Sapiens
ctcatggcgttcaggcctgacggttgctagggtgacagggacacaacatggcggcgggatctctaacgctctccttcgagggaccaccacggagatcctagtgcgggaccccgcctcagggaagtggaaagcagggggacaaccttcctgcttctttcttttccgtccagtgtcggcaaggggttgtcaccggctgccgcatccaagatgaagaactataaagcaattggcaaaataggagagggaacgttttctgaagttatgaagatgcaaagcctgagagatggaaactactatgcatgtaaacaaatgaagcagcgctttgaaagtattgagcaagtcaacaacctacgagagatccaagcactgaggcgcctgaatccgcacccaaacattcttatgttgcatgaagtggtttttgacagaaaatctggttctcttgcactaatatgtgaacttatggacatgaatatttatgagctaatacgagggagaagatacccattatcag

SEQ ID NO: 72504 - DNA, 1011 bp, Homo Sapiens
gggtccagagagaggaacctgccccagaagaagaggagcccctgttgctacagagaccagagagagtacagacgctggaagagctagaagagctgggaaaagaagaatgttttcaaaataaggagcttcccagacctgtgttagaagggcagcagtcagagaggaccccaaataatcgccctgatgcccctaaggagaagaaaaagaaggagcaaatgatcgacctacagaacctcctaaccacacaatctccctccgtgaagtctttggcagttcccacaatagaggagctggaagatgaagaggagagaaaccataggcagatgataaaggaagcttgtgctggcgatgatgtcatcagagatttcttgaaagagaagagggaagctgtggaggcgagtaagccaaaggacgtggacctgacactacctggctggggcgagtggggtggtgtgggcctaaagcccagtgccaagaaaagacgccggtttctcattaaagcccctgagggtcctccaagaaaagataagaatttgccaaatgtgattatcaatgagaagcgcaacatccacgcagctgctcatcaggtacgagtgcttccatatccatttacccaccattggcaatttgaaaggaccatccagacccccataggatccacatggaacacccagagggctttccaaaagctgactactcccaaggtcgtcaccaagccaggccatatcattaaccccataaaagcagaagacgtgggctaccggtcttcctcaaggtcggacctgtctgtcatacagaggaatccaaaacgaatcaccacacgtcacaaaaaacagctgaagaaatgctctgtagattgagttgctggaggagtgacagccaggagccctgacttcacttcctttggtccagttttactctgatacagggtggattccaaaactggctcagtacattgcatgtagttaagccacattttaaaaataaaggcattttttaatctaaaaaaaa

SEQ ID NO: 72505 - DNA, 2182 bp, Homo Sapiens
gctaggtacgaggcctgggtgttaaattcggcacgaggggagccgcgggcgggagggcggacggaccgactgacggtagggacgggaggcgagcaagatggcgcagacgcagggcacccggaggaaagtctgttactactacgacggggatgttggaaattactattatggacaaggccacccaatgaagcctcaccgaatccgcatgactcataatttgctgctcaactatggtctctaccgaaaaatggaaatctatcgccctcacaaagccaatgctgaggagatgaccaagtaccacagcgatgactacattaaattcttgcgctccatccgtccagataacatgtcggagtacagcaagcagatgcagagattcaacgttggtgaggactgtccagtattcgatggcctgtttgagttctgtcagttgtctactggtggttctgtggcaagtgctgtgaaacttaataagcagcagacggacatcgctgtgaattgggctgggggcctgcaccatgcaaagaagtccgaggcatctggcttctgttacgtcaatgatatcgtcttggccatcctggaactgctaaagtatcaccagagggtgctgtacattgacattgatattcaccatggtgacggcgtggaagaggccttctacaccacggaccgggtcatgactgtgtcctttcataagtatggagagtacttcccaggaactggggacctacgggatatcggggctggcaaaggcaagtattatgctgttaactacccgctccgagacgggattgatgacgagtcctatgaggccattttcaagccggtcatgtccaaagtaatggagatgttccagcctagtgcggtggtcttacagtgtggctcagactccctatctggggatcggttaggttgcttcaatctaactatcaaaggacacgccaagtgtgtggaatttgtcaagagctttaacctgcctatgctgatgctgggaggcggtggttacaccattcgtaacgttgcccggtgctggacatatgagacagctgtggccctggatacggagatccctaatgagcttccatacaatgactactttgaatactttggaccagatttccaagctccacatcagtccttccaatatgactaaccagaacacgaatgagtaactggagaagatcaaacagcgactgtttgagaaccttagaatgctgccgcacgccctggggtccaaatgcaggcgattcctgaagacgccatccctgaggagagtggcgatgaggacgaagacgaccctgacaagcgcatctcgatctgctcctctgacaaacgaattgcctgtgaggaagagttctccgattctgaagaggagggagagggggcccgcaagaactctcccaacttcaaaaaagccaagagagtcaaaacagaggatgaaaaagagaaagacccagaggagaagaaagaagtcaccgaagaggagaaaaccaaggaggagaagccagaagccaaaggggtcaaggaggaggtcaagttggcctgaatggacctctccagctctggcttcctgctgagtccctcacgtttcttccccaacccctcagattttatattttctatttctctgtgtatttatataaaaatttattaaatataaatatccccagggacagaaaccaaggccccgagctcagggcagctgtgctgggtgagctcttccaggagccaccttgccacccattcttcccgttcttaactttgaaccataaagggtgccaggtctgggtgaaagggatacttttatgcaaccataagacaaactcctgaaatgccaagtgcctgcttagtagctttggaaaggtgcccttattgaacattctagaaggggtggctgggtcttcaaggatctcctgtttttttcaggctcctaaagtaacatcagccatttttagattggttctgttttcgtaccttcccactggcctcaagtgagccaagaaacactgcctgccctctgtctgtcttctcctaattctgcaggtggaggttgctagtctagtttcctttttgagatactattttcatttttgtgagcctctttgtaataaaatggtacatttctatgaaacaaatccaaaggaggaaaacttgacaaatagaattttttttggacaaattt

SEQ ID NO: 72506 - DNA, 674 bp, Homo Sapiens
  misc_feature (382)..(392): n is a, c, g, or t
caccccacccccaccatcaccaccatcaccatccaggcttgagagcccctggctacccctcttcaccagtgactaccgcctctggtactaccttgcggttgccaccactgcaacctgaggaggatgacgatgaggatgaagaagatgatgatgacttatctcagggctatgatagctcagaaagggacttctcactcattgatgatcctatgatgccagctaactcagactccagtgaagatgctgatgactgaagccccagcatgggccccattgcttgggcggctgctgtattttcatttactctggcccttggactatggaaacgtgggaggggcaggggagatgtggggaagtccaggactccaggaggtgaaaaggnnnnnnnnnnncaaatgtacctgattgctcccaattatgagaggattgggtgggcaggggaactcctaaaataatacatgaccacttcctcatttctggggaaggaaaggagactagagcagctggtgtgctcacccctccctagtcacctccattaaccacagactatgtagcgctggccctagcctctggcagagcctgttcctggccgaactgtggatacagctggagggtcaggaactgttaccttctttccccttggcattaataaatttaagttaatccttaaaaaa

SEQ ID NO: 72507 - DNA, 1341 bp, Homo Sapiens
  misc_feature (34)..(34): n is a, c, g, or t
ttacctgagagtgttaatgtatccaatgtagagntaatttgtgaatcaatggttctcctctgaggcattggtggcctaatttacagcccgatggagagagccctattaacagatagtgcttttaccaagcactgtgtttatatgtcttgcaaagcctttaaattgttcctctttgtttatgaagaaagatactaatagagtacttaatatactcagggattccttctaagtgtacttcataagatattctttacaaactgaagataatgaaatagttattttaatacctttaaatatcattctttgtatcttaaatctgtgaagtagaacaatttggtcttagctttacattttcagtaccaaagaaacaccacttaatcttctctcttgattgatttttaaagtttaaataccagtacttgagggaccaatattaccatcttaatctttattttattattcagaattatacagacctaatatcattttattcacatatgtcttactactttaaatcctaccaaagtaacctgggcttaagttttacttgaggatcatatgaattagccaaaagaatggctgactgttgcctttgctcttataaaatcaataagagaactctcctctttttttaaaaataaatctaaatgattatcttgaaaaagtattgttttccagtgtcacttgactcttgaataaaaataactgcagtgttcccccaaataatttaacacattgcaaatatgattcaagaatctggcctttttcatgcttggtactctcttctcttgctccattccttacaaagctccttcaaatatgctatgaaaattagagggaacatagtgcttaactctgctccatggattttacgaggaaaacaagctaaaataagttggaaacctgtccaggaacagagagaaggcacgattcatttcttaaaactacaatggaattcagaatttagctttgacctcacctagcaatctaaagtgttgaaaactggggagacctgtgggcatccccagcatgactctgcatatctgagcatatatctccttatagatcaattttatgtataaacccttagatcctaatccatacagaatagcactgatcaaatttaaatgcatgacttgattaaagacatcaatttcatagaagctggtggcaagaatatgtttaatatggcacttgatacctcctagatccataatgtaagtccaataggcagaaaagatggtaagttactatgtttcaatctgctatatctagaaaatctaaatttatttggaactttcaaaaatgtaaggtaatttagaatcggttgatgagaattga

SEQ ID NO: 72508 - DNA, 1122 bp, Homo Sapiens
ttgctaccaaacaaagcgagtgcgtgtataaaagacggcagtactataacggtcctaatgtagcgaggcctgggtggcgaattcggcacgaggtgcagctggaagatggcggcgtccgtggtctgtcgggccgctaccgccggggcacaagtgctattgcgcgcccgccgctcgccggccctgctgcggacgccagccttgcggagtacggcaaccttcgctcaggcgctccagttcgtgccggagacgcaggttagcctgctggacaacggcctgcgtgtggcctccgagcagtcctctcagcccacttgcacggtgggagtgtggattgatgttggcagccgttttgagactgagaagaataatggggcaggctactttttggagcatctggctttcaagggaacaaagaatcggcctggcagtgccctggagaaggaggtggagagcatgggggcccatcttaatgcctacagcacccgggagcacacagcttactacatcaaggcgctgtccaaggatctgccgaaagctgtggagctcctgggtgacattgtgcagaactgtagtctggaagactcacagattgagaaggaacgtgatgtgatcctgcgggagatgcaggagaatgatgcatctatgcgagatgtggtctttaactacctgcatgccacagcattccagggcacacctctagcccaggctgtggaggggcccagtgagaatgtcaggaagctgtctcgtgcagacttgaccgagtacctcagcacacattacaaggcccctcgaatggtggtggcagcagctggagggagtggagcaccaggcaactggtaagagcttcgcccagaagcaacctcggtggcatcccattggacatattgcagaggaacgctgtgcccatgcttacatccatggcggtcactgggcagggagaccggcaccgggaatgacgcataacctttggcccagcgtgccatgagccaaaagggccggcaggggcacccgggaccaggggctgctaagtgcaagacacaacggacgaagtaggcgcatggggggggacacgtgtacgcaggcgcaagcgggcggcacaagacgcacaggaccgaccagcgtgag

SEQ ID NO: 72509 - DNA, 962 bp, Homo Sapiens
  misc_feature (510)..(510): n is a, c, g, or t
cttgctggcacttccagccctttccggttgccccccggacctttcccaatgccacgtgggcaaaggtagaaccacatccacgtggccgaattccactccagtggaaccggcatggagtaaagattggcacagcgtcctctgccatatgtccatgggatgccacccgagttgctttctggcgaggtttaacagttgctggttgctccactcctcccagctgctgccagcaccattcgagggccttgtaaatgtgtcggaggtactcggtcaagtccgcacgagacagcttcctgacattctcactgggcccctccacagccggggctagaggggtgcccctggaatgctgtggcatgcaggtagttaaagaccacatctcgcatagatgcatcattctccggcatctcccgcaggatcacatcacgttccttctcaatcggtgagtctcccagactacagttctgcacaatgtcacccaggagctccacagctttcggcagatccttggancagcgccttgatgtagtaagctgtgtgctcccgggtgctgtaggcattaagatgggcccccatgctctccacctccttctccagggcactgccaggccgattctttgttcccttgaaagccagatgctccaaaaagtagcctgccccattattcttctcagtctcaaaacggctgccaacatcaatccacactcccaccgtgcaagtgggctgagaggactgctcggaggccacacgcaggccgttgtccagcaggctaacctgcgtctccggcacgaactggagcgcctgagcgaaggttgccgtactccgcaaggctggcgtccgcagcagggccggcgagcggcggccgcgcaatagcacttgtgccccggcggtagcggcccgacagaccacggacgccgccatcttccagctgcagtcggccctgttgcgccgcgccagcgtagccc

SEQ ID NO: 72510 - DNA, 925 bp, Homo Sapiens
  misc_feature (815)..(815): n is a, c, g, or t
ccggcagtaactactacggttctaaggtagcgaggcctgggtggcgaattcggcacgaggcctcgtgcggcagagggcggcgtccgtggtctgtcgggccgctaccgccggggcacaagtgctattgcgcgcccgccgctcgccggccctgctgcggacgccagccttgcggagtacggcaaccttcgctcaggcgctccagttcgtgccggagacgcaggttagcctgctggacaacggcctgcgtgtggcctccgagcagtcctctcagcccacttgcacggtgggagtgtggattgatgttggcagccgttttgagactgagaagaataatggggcaggctactttttggagcatctggctttcaagggaacaaagaatcggcctggcagtgccctggagaaggaggtggagagcatgggggcccatcttaatgcctacagcacccgggagcacacagcttactacatcaaggcgctgtccaaggatctgccgaaagctgtggagctcctgggtgacattgtgcagaactgtagtctggaagactcacagattgagaaggaacgtgatgtgatcctgcgggagatgcaggagaatgatgcatctatgcgagatgtggtctttaactacctgcatgccacagcattccagggcacacctctagcccaggctgtggaggggcccagtgagaatgtcaggaagctgtctcgtgcagacttgaccgagtacctcagcacacattacaaggcccctcgaatggtgctggcagccagctggaggagtggagcaccagcaactggtagacctcgcccanaaacaccctcggtggcatcccatggacatatgccaaaaggacgcttgggcccaactctttactccatgcccgcttcactgggcagtggagatcccggccaccgtggatgc

SEQ ID NO: 72511 - DNA, 2194 bp, Homo Sapiens
  misc_feature (1628)..(1658): n is a, c, g, or t
  misc_feature (1900)..(1900): n is a, c, g, or t
  misc_feature (2046)..(2054): n is a, c, g, or t
tggcagtactactcacggtttaaggtagcgaggcctgggtgttgaattcggcacgaggggaagatggcggcgtccgtggtctgtcgggccgctaccgccggggcacaagtgctattgcgcgcccgccgctcgccggccctgctgcggacgccagccttgcggagtacggcaaccttcgctcaggcgctccagttcgtgccggagacgcaggttagcctgctggacaacggcctgcgtgtggcctccgagcagtcctctcagcccacttgcacggtgggagtgtggattgatgttggcagccgttttgagactgagaagaataatggggcaggctactttttggagcatctggctttcaagggaacaaagaatcggcctggcagtgccctggagaaggaggtggagagcatgggggcccatcttaatgcctacagcacccgggagcacacagcttactacatcaaggcgctgtccaaggatctgccgaaagctgtggagctcctgggtgacattgtgcagaactgtagtctggaagactcacagattgagaaggaacgtgatgtgatcctgcgggagatgcaggagaatgatgcatctatgcgagatgtggtctttaactacctgcatgccacagcattccagggcacacctctagcccaggctgtggaggggcccagtgagaatgtcaggaagctgtctcgtgcagacttgaccgagtacctcagcacacattacaaggcccctcgaatggtgctggcagcagctggaggagtggagcaccagcaactgttagacctcgcccagaagcacctcggtggcatcccatggacatatgcagaggacgctgtgcccactcttactccatgccgcttcactggcagtgagatccgccaccgtgatgatgctctaccttttgcccacgtggccattgcagtagagggtcctggctgggccagcccggacaatgtggccttgcaagtggccaatgccatcatcggccactatgactgcacttatggtggtggcgtgcacctgtccagcccactggcttcaggtgctgtggccaacaagctatgccagagtttccagaccttcagcatctgctatgcagagacgggcttgctgggtgcacactttgtctgtgaccgaatgaaaatcgatgacatgatgttcgtcctgcaagggcagtggatgcgcctgtgtaccagtgccacggagagtgaggtggcccggggcaaaaacatcctcagaaatgccctggtatctcatctagatggcactactcctgtgtgtgaggacatcggacgcagcctcctgacctatggccgccgcatccccctggctgaatgggaaagccggattgcggaggtggatgccagtgtggtacgtgagatctgctccaagtacatctatgaccagtgcccagcagtggctggatatggccccattgagcagctcccagactacaaccggatccgtagcggcatgttctggctgcgcttctaggcgggaagcctatgtaagcaagagggcagggccggggtttgtggtcccccctccaccacaaacacagcacttcggctcctctaacctgtgccacaggtgaccaccaataaaatcctctgctnnnnnnnnnnnnnnnnnnnnnnnnnnnnnnncttgtcgggccgccctccggccctcaaaaaagctttcacaaacccattccgttttggcgccgcggggccccggtaaggctaaggtgaaacactggcaacaataggctggtttctcctaaggaagaatcccttgtggccactgagcataagtgagcttttgggaatattcctctcaccccaatttaaaacaaaaacacgacccccccgggccggggggcaaaacacccgagagcccgggtttnttctgtgcaaaacaccacaaaatttccccccaaagaaatggtgggagaagggtttttttcgtgagggaagggggggtctccccatttcttttacacgcggggcgggggaaattatccttaatattcttcgcaaaccccagagggtnnnnnnnnntctcccccaaatatacccccccgcagaaaggccctttttctcaaaattaaaattccgcacaaaaattatttgaagggcgagagaaaccgccgggggcccgatatgggggcgcccagaaattcacacagtccgcgatgaac

SEQ ID NO: 72512 - DNA, 558 bp, Homo Sapiens
gcacgaggctcactcccaagccaccatttgagagggaggggtgttggtgccctgacagggactgggcagggtgtccaaacttggggcttcccaggcacctgcagtgtgaacactgcttggctggctcaagattagggccgcggagggggctgtgcacataccagttacttaagcagccacgagtgtcccccatgccttggtgcgggtcctggaggcctcttgggggtgggacctttgggcagggtttgcccactgacacgcccgccatggggcactggctgcatggggctccttggaccctgtagacccagcagaccccgcctgtgtcaggccagctgcccgaaggcacttggctgtggtcccaggggacggctctgctggcacactcaggagcctggccgcggggactgcagggagggtgcctggacccgtggggttgcttcattgagataaagcacacttatcacatagcacaaaggacgtgccatggtgctttcccccaaaagttgtgttgcttttatcagttttctaacttaataaaaagagttgagaaaattc

SEQ ID NO: 72513 - DNA, 883 bp, Homo Sapiens
  misc_feature (56)..(56): n is a, c, g, or t
cccacaaagatgacatttgggatcaaactttatactaaaatgtttatcaaaattgntagtggatcagccattccctgagcaagttaatttttccccacggacccacaccccaacacatttagttcattcttcctcccacttgtgctctgtaaagagttacacctggcaagatttatttcggcccttcatcaatgaatgcattttccatacagaagagacatcaggggtgtgggtaaaattgtgtgtgtgcctccttgaccgtggacaatcactagactcagtgctctgagaaaatctgctatttctgttgaatgggtcagtcttaaagctttaaaattcacataggtggagtttcccatctgaagatttctttacaaggactttgctaagttcatctcagggttatctgagccttgaccaagtttatcctaagggaataccactttgctccctgtgcatagtttaggaactgtagtcctaggaggaaacagctttaaatattggtagtgagttgtctaagatcaggactgttttgatatctgaccttgttatatgcggagagtaaatgcaaaaatgctaagagtaatgcatcatgtattgaatattaagtgtcactgaagcaatgtttgtgttgactagaaacgtaagatgacttgtgtagcacctctttataagcacacagctcatcttaatattttccatttttattagaggaagtaggacagagttgtgtttttctttataaacaaatgataaactagcttttttaaaaagtgactgttagaacttttttagctctgagtagtggtccctttttaaactcctggaaacatttttgttaccaaataaatcatgttttatggtactcagccatccaaaagtg

SEQ ID NO: 72514 - DNA, 1099 bp, Homo Sapiens
  misc_feature (920)..(969): n is a, c, g, or t
ctagaaatgcttcatctcactggtacttgtttatttatgtgtatttgtgttctatttaggttccagatgtggaatctcgtgaagacttaattaaaaatcactacatggcaaggatagtggaacttacgtctcagttgcagctggctgacagtaagtcagtgcatttttatgccgagtgccgagcactgtctaaaagactggccttggctgaaaagtctaaggaagcattgacagaagaaatgaaacttgccagtcagaacatcagcagacttcaggatgagctgacaactaccaagaggagttacgaggatcagttaagtatgatgagtgaccacctgtgcagcatgaatgagacattatctaaacagagagaagagatgacacactaaagatgtccagtaaggtatgtgaggggaattctaaaaagaacaagagtcgatagttgtgaaatagctggttggcgactgttctttccagacctgctcctgctgcacagagccgcagggctgagaccacgtccatgctggctgccttcaggaagctaaagtattgttggacctagtaaactagtcagtgttggaaacggccttgaaatatttaaaacatatttgtaaccagtgaggcaaatacagaagttgatgtcggcagtaaatggaaaaacaatacgtatgtcatggatattgtaggtttccttattgctgtttttactgtgcactttttaaaattaggttttaatttcagtatgtaagaacaaatattttgtatactttcaaactcaattatatggtaatcgatatggtatctatggaatagatatatgtttctggaaaaaaatgcttaaattgtcaaacgtgtcattactttcttattatagttgaaggcattctccagaatcctttttaaaagatttgttcatattnnnnnnnnnnnnnnnnnnnnnnnnnnnnnnnnnnnnnnnnnnnnnnnnnngagggagagggagccctccaaacttcagatcctgtgggtttagtatcattatcttcagctctttgataccctgtgttagagtaatagctaaaggaagttcatgtcaataaattcatacttatatcacaaa

SEQ ID NO: 72515 - DNA, 1043 bp, Homo Sapiens
  misc_feature (73)..(107): n is a, c, g, or t
gatgataactatataggcgctagcgttttttcgaacgacgagcgcacgagtcaatgagcgaggaagcggccgnnnnnnnnnnnnnnnnnnnnnnnnnnnnnnnnnnncagtcgacggtaccggacatatgcccgggaattcggccattacggccggggggagggctgcagacacgaggacgactacagctaccagggtcacatgcagtcctgcaacttctcagcagagaaggccaaggtctacatcaatgactccgtggagctgagccagaacgagcagaagctggcagcctggctggccaagagaggcccaatctccgtggccatcaatgcctttggcatgcagttttaccgccacgggatctcccgccctctccggcccctctgcagcccttggctcattgaccatgcggtgttgcttgtgggctacggcaaccgctctgacgttcccttttgggccatcaagaacagctggggcactgactggggtgagaagggttactactacttgcatcgcgggtccggggcctgtggcgtgaacaccatggccagctcggcggtggtggactgaagaggggcccccagctcgggacctggtgctgatcagagtggctgctgccccagcctgacatgtgtccaggcccctccccgggaggtacagctggcagagggaaaggcactgggtacctcagggtgagcagagggcactgggctggggcacagcccctgcttccctgcaccccattcccaccctgaagttctgcacctgcacctttgttgaattgtggtagcttaggaggatgtcggggtgaagggtggtatcttggcagttgaagctggggcaagaactctgggcttgggtaatgagcaggaagaaaattttctgatcttaagcccagctctgttctgcccccgctttcctctgtttgatactataaattttctggttcccttggatttagggatagtgtccctctccatgtccaggaaacttgtaaccacccttttctaacagcaataaagaggtgtccaagaacaccgaaa

SEQ ID NO: 72516 - DNA, 730 bp, Homo Sapiens
  misc_feature (558)..(566): n is a, c, g, or t
acccaaccagagggacctggagtttcaggaaggggatataatcctggtgtaatcaaaggtgaatgaagaatggctggaaggggagtgcaaagggaaggtgggcattttcccccaaagtttttgttgaagactgcgcaactacagatttggaaagcactcggagagaagtctaggatgtttcacaaactacaaagctgaagaaaatgaagccctattacttgtttgtaagatttagcacccttctgctgtatactgtactgagacattacagtttggaagtgttaactatttattccctgttaaaatttaacctactagacaatgatgtgagtacccaggatgatttcctggggcacagtgggtgaggagatggggacaggtgaatggaggagttaggggagaggaaaagtggatggaagtgtctggaaagggcacgagagagtcttccaggtactgatcctgtttcttgctctgagtgctagctagccagctgtgttcacactgtaaacattcatcaagctgtacatttggtgcacttttctgtgtcataccacaatnnnnnnnnncctatcatcttacaaaaacaagacacccaagtccaggcccaaggagtaagtacaaatattcctgtttctgaaccattactgtaattggctcttaaggcttgaagtaaccttataggttactcataaggcatatacaaataaacttgtttgttttcttttttcaa

SEQ ID NO: 72517 - DNA, 760 bp, Homo Sapiens
gcttcagggcttcaggctgcttctgctctgtgtctgcccaggctggctgagcgggtgatgggtggacagaagggctcaccaaggattgtggacatagggtaggccctggtaccacgggtttcaggctgttatcacttcccttgtaggaacatagccagaagcagatgagccagggtagagggctggcccctcctctcatcgtcccttcagtcttaaattgtctccagcgatgggaagaggccagggactgtaacccttgtgctgtgtattctctgagcctctgctcactctcagggccaagcagctcccaagccggggccctctcttggccaaaatctgaggagcagtctaggttacaggctttttggtaggtaggttctggctgcctgttaatgcagttaggccccctgattaggtacagtgagaaacaagctagaacaaccctggcccagaagactgtccactccagcaagatccagggatgatagccttgcagggccactgggagtttgtgcccaagcttctccctcttctctccccagggggcactgggactggtccctgccctcatccttagcctgggccttccccagaggtattaaagagaagtatgattcctctgtcttcagttcttttcaggggcatcctgcccatagtacccagttcccaaggggcccccagtcacgtggtgaagcctagcactcatgcagctcttagggaaccaaaaaccagcactgaaataaagctgaatgactgactg

SEQ ID NO: 72518 - DNA, 579 bp, Homo Sapiens
tccccagcatgggtcagtggtgtcctggcagtgaggctccgtgaggggctggcccttagaggaactggggtgggaggtggggcaggcctcacccttgggctttgctgccctgttgggtcagctacccatagtccatttttttagggcagtgggaacctctgcctccacttcctgctttagccccttccctttgctgccaggtattggggtaatatttcctccttttccaagaccaaggccaagaggctgggccaggcttcagttcaggcctgttgcttaactggggtcaccctgggatctgctgctctgggtctaagtctagacctttctgatccttgggtctgggttttttgaggaggggacatagtggcctctgggctgccatgtcaccacctgaacattccccaaacagagaaggaacccagcatctcagggccactgctccattgctctgggggctgggatgcctggctaagcaggggctgacagggtggcaggtgactttctagggatcagcacctgccctgtgttttgtaccttgaacctaagatatattaaacatctctcagaagagaaaaa

SEQ ID NO: 72519 - DNA, 674 bp, Homo Sapiens
tggttggtaaggcctaagatagggtttcatttatttctatactttttctgttttgtaaacacctgcatatttttatgtaaatctctaaatttaaaatattttaagtacatttatttttggtgttttattgtataaaaccttagacaatcaatcagtcagtctttactgacaggagcagcagctatctgtcttttgctgatctacaaataaatgaattgagaatttagtccatagaggtccctggctaccaaacacattctcctttgaattgttaaaattcagaacattcaaaataactgttttgctacaacccatgattattttcctgttgtgtttatttaaatttactttctctttagaagtgcacttatttctgaaaaatcttaatgaaacaaacgcttagaacaaatataaatatgagacacttgggactactagagatattttagatttttatgaaaaaaatgtgaggggatattgctgctttaaaaaggaataaagtaataaaaatatatctcagctatttttttaaagcaatataattcagcaattgtctagaaaagtaatcatgaggctactgagtttggtgttcagttactgagtttcaaaaatgttttggtggcatgaggacaaaatttcattgaaggtaagataagaataaaaactatgtttac

SEQ ID NO: 72520 - DNA, 2869 bp, Homo Sapiens
  misc_feature (2786)..(2810): n is a, c, g, or t
gctggaccggtccggaattcccgggatatcgtcgacccacgcgtccgcgaggcgacctggccgccggccgctcctccgcgcgctgttccgcacttgctgccctcgcccggcccggagcgccgctgccatgcggctggcgctgctctgggccctggggctcctgggcgcgggcagccctctgccttcctggccgctcccaaatataggtggcactgaggagcagcaggcagagtcagagaaggccccgagggagcccttggagccccaggtccttcaggacgatctcccaattagcctcaaaaaggtgcttcagaccagtctgcctgagcccctgaggatcaagttggagctggacggtgacagtcatatcctggagctgctacagaatagggagttggtcccaggccgcccaaccctggtgtggtaccagcccgatggcactcgggtggtcagtgagggacacactttggagaactgctgctaccagggaagagtgcggggatatgcaggctcctgggtgtccatctgcacctgctctgggctcagaggcttggtggtcctgaccccagagagaagctataccctggagcaggggcctggggaccttcagggtcctcccattatttcgcgaatccaagatctccacctgccaggccacacctgtgccctgagctggcgggaatctgtacacactcagacgccaccagagcaccccctgggacagcgccacattcgccggaggcgggatgtggtaacagagaccaagactgtggagttggtgattgtggctgatcactcggaggcccagaaataccgggacttccagcacctgctaaaccgcacactggaagtggccctcttgctggacacattcttccggcccctgaatgtacgagtggcactagtgggcctggaggcctggacccagcgtgacctggtggagatcagcccaaacccagctgtcaccctcgaaaacttcctccactggcgcagggcacatttgctgcctcgattgccccatgacagtgcccagctggtgactggtacttcattctctgggccctacggtgggcatggccattcagaactccatctgttctcctgacttctcaggaggtgtgaacatggaccactccaccagcatcctgggagtcgcctcctccatagcccatgagttgggccacagcctgggcctggaccatgatttgcctgggaatagctgcccctgtccaggtccagccccagccaagacctgcatcatggaggcctccacagacttcctaccaggcctgaacttcagcaactgcagccgacgggccctggagaaagccctcctggatggaatgggcagctgcctcttcgaacggctgcctagcctaccccctatggctgctttctgcggaaatatgtttgtggagccgggcgagcagtgtgactgtggcttcctggatgactgcgtcgatccctgctgtgattctttgacctgccagctgaggccaggtgcacagtgtgcatctgacggaccctgttgtcaaaattgccagctgcgcccgtctggctggcagtgtcgtcctaccagaggggattgtgacttgcctgaattctgcccaggagacagctcccagtgtccccctgatgtcagcctaggggatggcgagccctgcgctggcgggcaagctgtgtgcatgcacgggcgttgtgcctcctatgcccagcagtgccagtcactttggggacctggagcccagcccgctgcgccactttgcctccagacagctaatactcggggaaatgcttttgggagctgtgggcgcaaccccagtggcagttatgtgtcctgcacccctagagatgccatttgtgggcagctccagtgccagacaggtaggacccagcctctgctgggctccatccgggatctactctgggagacaatagatgtgaatgggactgagctgaactgcagctgggtgcacctggacctgggcagtgatgtggcccagcccctcctgactctgcctggcacagcctgtggccctggcctggtgtgtatagaccatcgatgccagcgtgtggatctcctgggggcacaggaatgtcgaagcaaatgccatggacatggggtctgtgacagcaacaggcactgctactgtgaggagggctgggcaccccctgactgcaccactcagctcaaagcaaccagctccctgaccacagggctgctcctcagcctcctggtcttattggtcctggtgatgcttggtgccagctactggtaccgtgcccgcctgcaccagcgactctgccagctcaagggacccacctgccagtacagtctcaggggccagccaagcccccacccccaaggaagccactgcctgccgacccccagggccggtgcccatcgggtgacctgcccggcccaggggctggaatcccgccccctagtggtaccctccagaccagcgccaccgcctccgacagtgtcctcgctctacctctgacctctccggaggttccgctgcctccaagccggacttagggcttcaagaggcgggcgtgcccctctgggagtcccctaccatggactgaaggccccagaagactggcggtggtcttaagactccggggcaccgccacgccgctggtcaagcaacactctgcggacctgccggcgtagttgcagcgggggcttggggaggggctgggggttggacgggattgaggaaggtccgcacagcctgtctctgctcagttgcaataaacgtgacatcttgggagcgttnnnnnnnnnnnnnnnnnnnnnnnnncctgagcaggcggccgcaagcttattcccttgtagtgagggttaattttagcttggcac

SEQ ID NO: 72521 - DNA, 890 bp, Homo Sapiens
  misc_feature (11)..(11): n is a, c, g, or t
  misc_feature (103)..(103): n is a, c, g, or t
  misc_feature (172)..(172): n is a, c, g, or t
  misc_feature (192)..(192): n is a, c, g, or t
gccttcaagtncatggttagggggactcccagaggggccacgcccggccttctttggaagccctaagtcccggcttggaggccagcggaaacctccggagganggttcagaggtagagcgaggacactgtcggagggcggtggcgctggtctggagggtaccactaggggcngggattccagccccctgggnccgggcaggtcacccgatgggccaccggccctggggggtcggcaggcagtggcttccttgggggtgggggcttggctggcccctgagatttagtgcctcgtgccagcagggccctctgcggaggtcctggccgttcagagggaccagattgggctgccctgtactggcaggtgggtcccttgagctggcagagtcgctggtgcaggcgggcacggtaccagtagctggcaccaagcatcaccaggaccaataagaccaggaggctgaggagcagccctgtggtcagggagctggttgctttgagctgagtggtgcagtcagggggtgcccagccctcctcacagtagcagtgcctgttgctgtcacagaccccatgtccatggcatttgcttcgacattcctgtgcccccaggagatccacacgctggcatcgatggtctatacacaccaggccagggccacaggctgtgccaggcagagtcaggaggggctgggccacatcactgcccaggtccaggtgcacccagctgcagttcagctcagtcccattcacatctattgtctcccagagtagatcccggatggagcccagcagaggctgggtcctacctgtctggcactggagctgcccacaaatggcatctctaggggtgcaggacacataactgccactggggttgcgcccacagctcccaaaa

SEQ ID NO: 72522 - DNA, 1142 bp, Homo Sapiens
cccagcagtgccagtcactttggggacctggagcccagcccgctgcgccactttgcctccagaccgctaatactcggggaaatgcttttgggagctgtgggcgcaaccccagtggcagttatgtgtcctgcacccctagagatgccatttgtgggcagctccagtgccagacaggtaggacccagcctctgctgggctccatccgggatctactctgggagacaatagatgtgaatgggactgagctgaactgcagctgggtgcacctggacctgggcagtgatgtggcccagcccctcctgactctgcctggcacagcctgtggccctggcctggtgtgtatagaccatcgatgccagcgtgtggatctcctgggggcacaggaatgtcgaagcaaatgccatggacatggggtctgtgacagcaacaggcactgctactgtgaggagggctgggcaccccctgactgcaccactcagctcaaagcaaccagctccctgaccacagggctgctcctcagcctcctggtcttattggtcctggtgatgcttggtgccagctactggtaccgtgcccgcctgcaccagcgactctgccagctcaagggacccacctgccagtacagggcagcccaatctggtccctctgaacggccaggacctccgcagagggccctgctggcacgaggcactaagtctcaggggccagccaagcccccacccccaaggaagccactgcctgccgacccccagggccggtgcccatcgggtgacctgcccggcccaggggctggaatcccgcccctagtggtaccctccagaccagcgccaccgcctccgacagtgtcctcgctctacctctgacctctccggaggttccgctgcctccaagccggacttagggcttcaagaggcgggcgtgccctctggagtcccctaccatgactgaaggcgccagagactggcggtgtcttaagactccgggcaccgccacgcgctgtcaagcaacactctgcggacctgccggcgtagttgcagcgggggcttggggaggggctgggggttggacgggattgaggaaggtccgcacagcctgtctctgctcagttgcaataaacgtgacatcttgggagcgttaaaaaa

SEQ ID NO: 72523 - DNA, 657 bp, Homo Sapiens
  misc_feature (28)..(28): n is a, c, g, or t
agtacatgacaatttggctatgaaaatntgcaatgagatcttaacaagtccgtgctcgccagaaattcgagtctatacaaaagccttgagttctttagaactcagtagccatcttgcaaaagatcttctggttctattgaatgagattctggagcaagtaaaagataggacatgtctgagagctttggagaaaatcaagattcagttagaaaaaggaaataaagaatttggtgaccaagctgaagcagcacaggatgccaccttgactacaactactttccaaaatgaagatgaaaagaataaagaagtatatatgactccactcaggggtgtaaaagcaacccaagcatcaaagtctactcagctaaagactaacagaggacagagaaaagtgacagtttcagctaggacgaacaggaggtgtcagactgctgaagccgactctgaaagtgatcatgaagttccagaaccagaatcagaaatgaagatgagactaccaagacgagccaaaaccgcagcactagaaaaaagtaaacttaaccttgcccaatttctcaatgaagatctaagttaggaaagacgatggaggtggaatcctttaagattatgtccagttatttgctttaataaagaagaagttacccttgtcaaaatcag

SEQ ID NO: 72524 - DNA, 990 bp, Homo Sapiens
ttcagaaacaaaaaagttttatttataaataaactggttttaaagcttgtatctaaattcgtgtattttcaacatctatttagtgatcatgaagttccagaaccagaatcagaaatgaagatgagactaccaagacgagccaaaaccgcagcactagaaaaaagtaaacttaaccttgcccaatttctcaatgaagatctaagttaggaaagacgatggaggtggaatcctttaagattatgtccagttatttgctttaataaagaagaagttacccttgtcaaaatcagaacaaacctgatgtctttctgaagattttctgctgtgcgcttccacgttactttggcctgtattaaagcagtagagcagcatcagttattatagtccagaaaaagtctgcatcagtcagtcacacagatttatcacaatctgaggtgggcctaggaatctcatttttaaatagtctctccaagtgattcttatgaactctttatgtttaaaatcatgtcattatggaaaacttacaagtgtaactagctagtagcttgcatttgagaagcttatgacttagatgggcagaatcaacaaagatgaaaccgcctgaggacacatttaacaagtaacatttctagggaaaatgaaggaagtaccacaaactggctagaaaggagcttatcaatcaccagtgaggaagaccagtataacgttcaacaacagttattttgacaaaaacttattttgtgattcctacagtgaaaacatttttggtgatatctgcctgggaaatctctcttcctaaagtatttgtatatgggagtccttgtttgtgaatgtttcctggattagggaggtgtcaacataaatgtattattaaccatgaagctgctcgctatatttttggcataacaaaataatatttatttactgtggataataattctagtgggaatataatgtgacaggaacttctctttatatacgctaccaatt

SEQ ID NO: 72525 - DNA, 993 bp, Homo Sapiens
  misc_feature (33)..(35): n is a, c, g, or t
  misc_feature (42)..(45): n is a, c, g, or t
  misc_feature (49)..(49): n is a, c, g, or t
  misc_feature (51)..(54): n is a, c, g, or t
  misc_feature (58)..(58): n is a, c, g, or t
  misc_feature (69)..(70): n is a, c, g, or t
  misc_feature (77)..(78): n is a, c, g, or t
  misc_feature (80)..(80): n is a, c, g, or t
  misc_feature (82)..(84): n is a, c, g, or t
  misc_feature (87)..(91): n is a, c, g, or t
  misc_feature (93)..(101): n is a, c, g, or t
  misc_feature (103)..(110): n is a, c, g, or t
  misc_feature (112)..(112): n is a, c, g, or t
  misc_feature (121)..(123): n is a, c, g, or t
  misc_feature (127)..(129): n is a, c, g, or t
  misc_feature (131)..(131): n is a, c, g, or t
  misc_feature (134)..(137): n is a, c, g, or t
  misc_feature (142)..(143): n is a, c, g, or t
  misc_feature (146)..(148): n is a, c, g, or t
  misc_feature (150)..(150): n is a, c, g, or t
  misc_feature (152)..(153): n is a, c, g, or t
  misc_feature (158)..(163): n is a, c, g, or t
  misc_feature (167)..(173): n is a, c, g, or t
  misc_feature (175)..(175): n is a, c, g, or t
  misc_feature (177)..(181): n is a, c, g, or t
  misc_feature (184)..(185): n is a, c, g, or t
  misc_feature (187)..(189): n is a, c, g, or t
  misc_feature (192)..(193): n is a, c, g, or t
  misc_feature (196)..(200): n is a, c, g, or t
  misc_feature (203)..(205): n is a, c, g, or t
  misc_feature (207)..(208): n is a, c, g, or t
  misc_feature (210)..(215): n is a, c, g, or t
  misc_feature (217)..(227): n is a, c, g, or t
  misc_feature (229)..(232): n is a, c, g, or t
  misc_feature (237)..(237): n is a, c, g, or t
  misc_feature (239)..(243): n is a, c, g, or t
  misc_feature (247)..(248): n is a, c, g, or t
  misc_feature (251)..(251): n is a, c, g, or t
  misc_feature (289)..(289): n is a, c, g, or t
  misc_feature (291)..(293): n is a, c, g, or t
  misc_feature (295)..(295): n is a, c, g, or t
  misc_feature (301)..(301): n is a, c, g, or t
  misc_feature (316)..(316): n is a, c, g, or t
  misc_feature (324)..(324): n is a, c, g, or t
  misc_feature (335)..(335): n is a, c, g, or t
  misc_feature (339)..(384): n is a, c, g, or t
  misc_feature (386)..(386): n is a, c, g, or t
  misc_feature (415)..(415): n is a, c, g, or t
  misc_feature (429)..(429): n is a, c, g, or t
  misc_feature (435)..(435): n is a, c, g, or t
  misc_feature (467)..(467): n is a, c, g, or t
  misc_feature (487)..(487): n is a, c, g, or t
  misc_feature (497)..(497): n is a, c, g, or t
  misc_feature (500)..(500): n is a, c, g, or t
  misc_feature (533)..(533): n is a, c, g, or t
  misc_feature (544)..(544): n is a, c, g, or t
  misc_feature (548)..(548): n is a, c, g, or t
  misc_feature (558)..(560): n is a, c, g, or t
  misc_feature (564)..(564): n is a, c, g, or t
  misc_feature (577)..(577): n is a, c, g, or t
  misc_feature (583)..(585): n is a, c, g, or t
  misc_feature (592)..(594): n is a, c, g, or t
  misc_feature (618)..(618): n is a, c, g, or t
  misc_feature (623)..(623): n is a, c, g, or t
  misc_feature (628)..(628): n is a, c, g, or t
  misc_feature (630)..(630): n is a, c, g, or t
  misc_feature (647)..(647): n is a, c, g, or t
  misc_feature (652)..(652): n is a, c, g, or t
  misc_feature (655)..(655): n is a, c, g, or t
  misc_feature (658)..(664): n is a, c, g, or t
  misc_feature (666)..(667): n is a, c, g, or t
  misc_feature (671)..(671): n is a, c, g, or t
  misc_feature (673)..(674): n is a, c, g, or t
  misc_feature (676)..(682): n is a, c, g, or t
  misc_feature (689)..(691): n is a, c, g, or t
  misc_feature (693)..(694): n is a, c, g, or t
  misc_feature (698)..(698): n is a, c, g, or t
  misc_feature (701)..(704): n is a, c, g, or t
  misc_feature (711)..(711): n is a, c, g, or t
  misc_feature (713)..(713): n is a, c, g, or t
  misc_feature (715)..(715): n is a, c, g, or t
  misc_feature (717)..(717): n is a, c, g, or t
  misc_feature (719)..(719): n is a, c, g, or t
  misc_feature (721)..(721): n is a, c, g, or t
  misc_feature (725)..(726): n is a, c, g, or t
  misc_feature (730)..(731): n is a, c, g, or t
  misc_feature (733)..(734): n is a, c, g, or t
  misc_feature (738)..(744): n is a, c, g, or t
  misc_feature (746)..(746): n is a, c, g, or t
  misc_feature (748)..(748): n is a, c, g, or t
  misc_feature (750)..(754): n is a, c, g, or t
  misc_feature (757)..(796): n is a, c, g, or t
tctccgcgggtggggcctcctcttcgccggctnnngggggcnnnngggntnnnngccncccttttttcnngcccgcnncncnnnccnnnnngnnnnnnnnntnnnnnnnncnggggggggnnngggnnncnccnnnnggggnnttnnngntnntcccnnnnnngccnnnnnnncngnnnnncgnngnnntcnntgnnnnntgnnncnntnnnnnncnnnnnnnnnnngnnnnggtcncnnnnngggnnggntccccctcccgtttccttgccgtgctttcgttcggccngnnncnggtttntcggtgtttctttgnccttggtngtttggcgggnttcnnnnnnnnnnnnnnnnnnnnnnnnnnnnnnnnnnnnnnnnnnnnnngngggccctctccttggcccccccttttccntggctgctgtcccnttcccngccttgcccccttcttccttttgcgtttggtnttgggctctcttcggctttnctcctgtttnttntgtttgggcggttccccttccgtcccgtccccnttcccgtgccncccngtcggggccnnntttnttcttttttggangttgtnnntttgtgnnnttttttccctgtgccctttccccncctcnggccntncccgtggcccctccccncccgnccnttnnnnnnngnnggcngnngnnnnnnnctggggnnngnnctgnccnnnnccggggngngngngngngggnngggnncnncccnnnnnnncngngnnnnntgnnnnnnnnnnnnnnnnnnnnnnnnnnnnnnnnnnnnnnnnccacctcaagggtagggagttgctcttcctacctgttttattttgttttctcgttttttccctccccaccccactcccagccttatctatcccccctcactgtccccttttctccactcccagccccatttcctttttttctggagtgtgtggtgaaacagaaaaaaacatgtttaataaacggagattgttctttt

SEQ ID NO: 72526 - DNA, 692 bp, Homo Sapiens
  misc_feature (50)..(50): n is a, c, g, or t
tcaccaccagctctctgtttccctttctgctgtggtaatcaacacgtgtntgcctgcagtggccgggaccgtgactgtttctgcccttgtgcctagttaagagccttcaaaagcataatgaacacttttgatatgatattgtaactttagtaaatgctttacttccctctaattgcccccaaatgccttaattttgtggactgtttatttcaacaggtggaagtgttggtcgtgcgaaatcttggtattcgcatttcaagaagggagttcttttttctttcttctttctatggaacgtttcaagtgattggatagaaagaagggctctgaagcaggagttttcacctgctctgagggaacttggggctccagggacgtaccccaaatgttgcccaggttgaaactccctgacagcctgttctacgtagtggctcgtggtttccagtttgaagagagttgtgcccctaaaagtgtttgaaacctgtggctttcaagcaaggtaccgttgtccccacagtgttccgtggggtagggggtgatggagactgtgggcaagcctgttgtttttggccccctgttgttacatgggacctgttttgacggtgggagggtgagatgtgaagatgtgggatgaacctggaatgaacgaattaaataaagacatgcatccatctgtcagcgaaatttttttt

SEQ ID NO: 72527 - DNA, 591 bp, Homo Sapiens
  misc_feature (354)..(409): n is a, c, g, or t
gcctcccgaattcccgtgcaggccctgctccacctgcgccacccagaggctgaggacccctcagcggaacacccctggtgtgcctgagacatctgtgaagcctgggcagagaaacgtggttacaagacagccaaggcggctcggaatgatgtgtacagagcagccaacagtctcttgcggctggcagtggacggccgcctcagcctgtgttttcatcccccaggctacagtgaacagaaaggcacctgggagtcccatccagagaccacggagctggtggttttgcagggcagggtggggccagcaggtgacgaggaggaggaggaagaggaagagctgagcagctcctgtgannnnnnnnnnnnnnnnnnnnnnnnnnnnnnnnnnnnnnnnnnnnnnnnnnnnnnnnccccaacctcggctccagggtccagcctggctggccgaaacccttatgccctgctgggtgaggatgagtgctgagttcctcgcccagcgccatcttccctcccagtatctttgcttttggactgacctgggggtatctcccctctgccaccccaaattgtgaataaagattgtttgctttgt

SEQ ID NO: 72528 - DNA, 684 bp, Homo Sapiens
  misc_feature (26)..(26): n is a, c, g, or t
  misc_feature (360)..(445): n is a, c, g, or t
accctatcgcccagatccaggagccntacactgctgtgggctacctggcctcccgaattcccgtgcaggccctgctccacctgcgccacccagaggctgaggacccctcagcggaacacccctggtgtgcctgggacatctgtgaagcctgggcagagaaacgtggttacaagacagccaaggcggctcggaatgatgtgtacagagcagccaacagtctcttgcggctggcagtggacggccgcctcagcctgtgttttcatcccccaggctacagtgaacagaaaggcacctgggagtcccatccagagaccacggagctggtggttttgcagggcagggtggggccagcaggtgacnnnnnnnnnnnnnnnnnnnnnnnnnnnnnnnnnnnnnnnnnnnnnnnnnnnnnnnnnnnnnnnnnnnnnnnnnnnnnnnnnnnnnnggatgaggagaccccaacctcgggctccagggtccaacctggctggccgaaacccttatgccctgctgggtgaggatgagtgctgagttcctcgcccagcgccatcttccctcccagtatctttgcttttggactgacctgggggtatctcccctctgccaccccaattgtgaataaagattgtttgctttgtagccccttccccagatgaactgaggtgagagcggctgttccaggct

SEQ ID NO: 72529 - DNA, 2070 bp, Homo Sapiens
  misc_feature (1833)..(1889): n is a, c, g, or t
gggcccgcccgctgacgtcacctgctagccccgcctcctctagggtcccgggcccctgcggcgggggctgccccgggggcagtcacgttgaggcggcgggactcggcggagggcgggccaggtgactggtccgggccatgccgaggaagaagccattcagcgtgaagcagaagaagaagcagttgcaggacaaacgggagcggaagagagggcttcaagatgggctgcgctccagttccaacagccgcagcgggagccgggagcggcgagaggaacagaccgacacctcggacggggagtctgtgacccatcatatccgcaggcttaaccagcagccttctcaggggctgggtccacgaggctacgacccaaatcgataccgactgcattttgagagagacagcagggaggaggtagagaggagaaagagagcagcccgggcagcaagttctacagccggtcagtgctgaagtgttggagctggacatccgggaggtgtatcagcctggctcagttctggactttcctcgacgtcctccttggagctatgagatgtccaaggagcaactaatgagccaagcaggaacggagcttccaagactatcttgggaagattcatggggcttactcctctgagaaactcagctactttgagcacaatctggagacatggaggcagctgtggcgggtgttagagatgtctgacatcgtcctgcttatcactgatatccgacatccagttgtgaatttcccgccagcactttatgagtatgtgactggagaacttggactggccctggtgctggttttgaacaaggtggatctggccccgccagctcttgtggttgcctggaagcattatttccatcaacactatccccagctccacgtcgtccttttcacctcttttcctcgggacccccgcaccccacaggatcctagtagtgtcttgaagaagagtcggaggcgggggagaggatggactcgggccctggggccagagcagttgctgagagcctgtgaagccatcactgtggggaaagtggacttgagcagctggcgggagaagattgctcgggatgtggctggggccacctggggtaatggctctggggaggaggaggaagaggaggatggcccagcagtcctggtggagcagcagactgattcagcaatggagccaactggcccaacccaagagcgctacaaggatggggtggtgaccatcggctgtgtgggtttccctaatgtgggaaagtcctcgctgatcaatgggctggtggggcggaaagtcgtgagtgtctccagaaccccgggccatacccgatactttcagacctactttcttaccccctctgtgaagctctgtgactgcccaggcctcatcttcccatctcttctgcctaggcagttgcaggttctggcagggatctaccctatcgcccagatccaggagccctacactgctgtgggctacctggcctcccgaattcccgtgcaggccctgctccacctgcgccacccagaggctgaggacccctcagcggaacacccctggtgtgcctgggacatctgtgaagcctgggcagagaaacgtggttacaagacagccaaggcggctcggaatgatgtgtacagagcagccaacagtctcttgcggctggcagtggacggccgcctcagcctgtgttttcatcccccaggctacagtgaacagaaaggcacctgggagtcccatccagagaccacggagctggtggttttgcagggcagggtggggccagcaggtgacgaggaggacgaggaagaggaagagctgagcagctcctgtgnnnnnnnnnnnnnnnnnnnnnnnnnnnnnnnnnnnnnnnnnnnnnnnnnnnnnnnnnccccaacctcggctccagggtccagcctggctggccgaaacccttatgccctgctgggtgaggatgagtgctgagttcctcgcccagcgccatcttccctcccagtatctttgcttttggactgacctgggggtatctcccctctgccaccccaattgtgaataaagattgtttgctttgt

SEQ ID NO: 72530 - DNA, 732 bp, Homo Sapiens
cgaagctatagaactttgtagactattggccaagcaaaatatatgacagtaaatatcagaattttatggttgaccagcgcttatcacattcccaattcagtgagaaaaattcatctgggacacaacagggtactcttctctgtttgcccagaatcagctctggattttaagcccagacttcagtggacccagatagaaaatataaagtctctgatctataggccacatcaggatgttattttatgaagagttctagagcaaggttgcggaaatcggggtggagatggggagcagtgactcctccaaatattcattgctaacaggccattctatgcagtttgttttaacaaatcctgggttaaactgaggccacaggacatgatgggctgttctataaagcattctaagtggagaggagacgatagggcatatgaaattcactaaactctctggaaaaaaaatatgtatatattaaaaaccaagactggaatcagtgcaacagtgggaactaccttttacaagtatccattgcttcataaactccatttgtttggaccaatcccttaaacaaaagcaaggcaaattttacatggatttagagcctaggtcaggttattaggattataaattttccactggtatgtcattgtgattatctttgtttttgtctttctgaaagattggattttctataacaccttgtgtaagaaaataaaaaacttgatctaacgg

SEQ ID NO: 72531 - DNA, 803 bp, Homo Sapiens
  misc_feature (71)..(71): n is a, c, g, or t
  misc_feature (88)..(88): n is a, c, g, or t
tgagatttcatactatcattaaccaccaggaagctgaagtgtgtgaagtacaaagctgacagcacttattntattgctctccattatntgtattcatatattccttcagtcagaaaatagtactctctatggcactgttttttatcacaaatatgtatatgtgatagtgatatataactatatatagtgccatcacacacgaacaataaaataaagtgttctattaacctgatctctttgcccttttgctatgtgaggagtgaatgagtggccttctgatgctctgactcttctctgtatgtcaaactcatccctggcacaagaaattccagtcatgtgaagcaaactgccctttgtcctcaaagaaattgttgaaaaagaaaactttttaaagagattttttgcatattctctgccttgttcttatcaacttgaaatgttggcattttctaaccttgttttgttggctacaataattcagtattcatgtcaaaattgagaagtgccctaattgaatgtgtttgaatgttatccttgcacaattctttaaattgaaagataaaatgttttacctcactgttggacatacattccaagcttttcaactctaggagaaaaagaaaatcatgttttcctgtattgtaaattttagactatttcatatacattgtattaaaactgccatatcaattttaatgtatagattttgcaaatattatgctatatgtaatacctaactgtatctgtagtgtatatgtaatatatttatgcccaataaatgttttaattctttctgacttaaa

SEQ ID NO: 72532 - DNA, 1359 bp, Homo Sapiens
  misc_feature (1232)..(1233): n is a, c, g, or t
  misc_feature (1247)..(1247): n is a, c, g, or t
  misc_feature (1255)..(1255): n is a, c, g, or t
  misc_feature (1330)..(1330): n is a, c, g, or t
gtggaccggtccggattcccgggatatcgtcgacccacgcgtccggtggctgaggagcctgtggcggcagcggcgatggaaccagcggagcagccgagcgagttagtgtcagccgagggccgaaaccggaaggcggtgctgtgccagcgttgcggctcccgggtgctgcagccagggaccgctctcttctctcgccgacagcttttccttcccttcccatgagaaagaagccagctctgtctgacggcagcaatcctgacggcgatctcctccaggaacactggctggttgaggacatgttcattttcgagaatgtgggcttcaccaaggacgtgggcaacatcaagtttctggtctgcgcagactgtgaaattggaccaattggctggcattgcctagatgacaagaacagtttctatgtggccttggaacgagtttcccatgagtaactgaggggaggggtactcagctccatctccaaagataaacctactccccacaagaactggcctttaatgtggtataactgttccgctgccttcttgtctgtgctaatataaatactgagtaccagcatgtccatttgaacatgcagagggttaatcctgcttcctaaagcctcaagtacatgcctcctgcttagttcactttgtatcacatttcctaagctcccttttcccccagttttgggacactgtgcttacctccaaaaatctcatctcttccctggcattctccctaggctctgttttgcccaggggctcccgctttttcttgctctagaggagcagtattcaaccttttagctatgatgacacataacaaaaagatgtttatgtactaatagttgaaatctgcctttttctcattcaagaaggcatacaaatatctgagagtgactttgttgtatggctacccttgtgatctacagtaatttattctttctaaaagtaaagcattttcaaaactcagtatttaaaccactaaccagaaacattactttggatgcatctctaataccatgtttgagcacctctgctctaggttgagaatgacattttattgtgaagatgggtgtggtccctcttcccttgaaatcttgtagtttctttttatattagctcctcactgctacagcctagaaggtgagaagcagattttaacccccatctggcagccattcaagggaaaacccagcccctggctgtttactcaggctctcttagaatgannagtggagggtgtangatatgangggttaggccttttgcacattatacaaaagtttataatttgccacatctgggacaagtaactttccttcctttgntcataggcaagaacttctttaatggaata

SEQ ID NO: 72533 - DNA, 1648 bp, Homo Sapiens
  misc_feature (71)..(88): n is a, c, g, or t
gacgagccacgtgccatgctcgaaattaatcctcactaaagggaaaaagcttgcggccgcctgctcatggnnnnnnnnnnnnnnnnnnacatttcaagacaactttatccagacaggcgcctctcaaatagaacacagggaagttaggcagcagttactaaaatacagtctcgccaaatgatttacaacagaacacaacaggagcaggggatctgtgggtggggctgggctgggccctctatctcacagggcctgagtcaagccagcccgccctgcaaggcaggggctgacctgcaagcggagatctcacttcctcttaccccaaattcatacctccattttccccgcccccatctctccccagggtcctcaagtgggaaagggagaggtagcatccctcggatccaggcccactccactccgtctccggcaccagtgggcaggctgagtctgggcctcaaggggccctgggcttagggtatctatggcagtaggaaaatgacatggacaggctcttcaggggtaggctaaagtcctctggccagcagtacccagagaaaatgggcagcagcaggtaaaccagccaggaggtggagtcctctgaacccacagcagaccccaccctcctgcccagcccctgcccacattgggggtcaggaccactgagactctggtcaggacagtgggtgctctcagcagtgtggcaagctcagagcagagctcccaaggaccataccacactggttcaaaacccataggtgacaccatcccagcagaagcttccatgggtgctggatcccagggctgcatcctgagcacaggtgggcagactggaacataacactaggacccaagggatccagaacattttaggcccatctcctgggctgctccagcctgttgccatgacttgggcagtgagtgggcctcctgccaggtggcagggcacagcttagaccaaacccttggcctcccccctctgcagctacctctgaccaagaaggaactagcaagcctatgctggcaagaccataggtggggtgctgggaatcctcggggccggctggcacccactcctggtgctcaagggagagacccacttgttcagatgcataggcctcaggcggttcaaggcagtcttagagccacagagtcaaataaaaatcaattttgagagaccacagcacctgctgctttgatcgtgatgttcaaggcaagttgcaagtcaaggcaagtgtcccagaggccctgggcagctgagtgcacctgtgtttgatcttcccctgatgatggacactcccagctgaccatccaaacaccaggaaaacatccccctttcctgggctcagttcctagtctacttgctggtacgaacccaacccacacactccccgcccacaatgcagctccttccaaatcctcccacaagccacctttgtgggacttggaagctgcttaggatgggccctgccctctgcgggaagccaatcctagcagaaaggtaagctaaacaacagtctcagaatctgagacccagtgactgttccccccgccccaggccttgggcctgaagtgggggcctgcctgtggcctctgtggtgggctcctcgtgccgaattcaacacccaggcctcgctacctagccgta

SEQ ID NO: 72534 - DNA, 925 bp, Homo Sapiens
atacggctaggtagcgaggctgggtggtgaatcggcacgaggggatggtcagctgggatgtgtccatcatcacgggaagatcaaacacaggtgctgtggtctctcaaaattgatttttatttgactctgtggctctaagactgccttgaaccgcctgaggcctatgcatctgaacaagtgggtctctcccttgagcaccaggagtgggtgccagccggccccgaggattcccagcaccccacctatggtcttgccagcataggcttgctagttccttcttggtcagaggtagctgcagaggggggaggccaagggtttggtctaagctgtgccctgccacctggcaggaggcccactcactgcccaagtcatggcaacaggctggagcagcccaggagatgggcctaaaatgttctggatcccttgggtcctagtgttatgttccagtctgcccacctgtgctcaggatgcagccctgggatccagcacccatggaagcttctgctgggatggtgtcacctatgggttttgaaccagtgtggtatggtccttgggagctctgctctgagcttgccacactgctgagagcacccactgtcctgaccagagtctcagtggtcctgacccccaatgtgggcagggctgggcaggagggtggggtctgctgtgggttcagaggactccactcctggctggttacctgctgctgcccattttctctgggtactgctggccagagcactttagcctacccctgaagagcctgtccatgtcattttcctcgcccccatctctccccagggtcctcaagtgggaaagggagaggtagcatccctcggatccaggcccactccactccgtctccggcaccagtgggcaggctgagtctgggcctcaaggggccctgggcttagggtatctatgg

SEQ ID NO: 72535 - DNA, 1816 bp, Homo Sapiens
  misc_feature (1711)..(1711): n is a, c, g, or t
  misc_feature (1793)..(1794): n is a, c, g, or t
agagtatgaagtcgacggcgcgccgaattcggcacgaggggaggaggaagccggcggtggccccgtcagcagccggctgctgagaggccggtaggcggcggcggtcccgaggggcggcggccgcgctgctccctgagaacgggtcccgcagctgggcaggcgggcggcctgagggcgcggagccatgaagctgtacagcctcagcgtcctctacaaaggcgaggccaaggtggtgctgctcaaagccgcatacgatgtgtcttccttcagctttttccagagatccagcgttcaggaattcatgaccttcacgagtcaactgattgtggagcgctcatcgaaaggcactagagcttctgtcaaagaacaagactatctgtgccacgtctacgtccggaatgatagtcttgcaggtgtggtcattgctgacaatgaatacccatcccgggtggcctttaccttgctggagaaggtactagatgaattctccaagcaagtcgacaggatagactggccagtaggatcccctgctacaatccattacccagccctggatggtcacctcagtagataccagaacccacgagaagctgatcccatgactaaagtgcaggccgaactagatgagaccaaaatcattctgcacaacaccatggagtctctgttagagcgaggtgagaagctagatgacttggtgtccaaatccgaggtgctgggaacacagtctaaagccttctataaaactgcccggaaacaaaactcatgctgtgccatcatgtgatgcagcctgccagaggcccaatgctggaatggcaccatcattcacatcagaactgcagcccctggaaaagaagagacagccatagacgaggagccagagtgggggcagactggccatttttattttgaagttcctgcgagaaatggatggtggaagggtggcgaatgttcaaattcatatgtgtggtagtgattcttggaaagaatttgaggtccccaaaggtgtatttttgggcaaatgaaaccataaactccgactggcttctgtagatgccaaagggctctttttcagctaaccctgggaaggctctgtgggagggaggtcggagccagctgtttctcgatctttggtatatctttggatcttatttgtacattaatgatattaacactccagtggggggtggggagtccctgatgctagggctggggtgggtggagtttgaagactcttgggaaagcctctcctggggccactgttgggggtgggagtgagcccaccacagaggccacaggcaggcccccacttcaggcccaaggcctggggcggggggaacagtcactgggtctcagattctgagactgttgtttagcttacctttctgctaggattggcttcccgcagagggcagggcccatcctaagcagcttccaagtcccacaaaggtggcttgtggggaaggatttggaaggaactgcattgtgggccgggagtgtgtgggttgggttcgtaccagcaagtagactaggaactgagcccaggaaagggggatgttttcctggtgtttggatggtcagctgggagtgtccatcatcaggggaagatcaaacacaggtgcactcagctgcccagggcctctgggacacttgccttgacttgcaacttgccttgaacatcacgatcaaagcagcaggtgctgtggtctctcanaattgatttttatttgactctgtggctctaagactgccttgaaccgcctgaggcctatgcatctgaacaagtgggtctctcnncttgagcacaggagtgggtgcc

SEQ ID NO: 72536 - DNA, 1344 bp, Homo Sapiens
cgggtcccgggatgggggggcggtgaggcaggcacagccccccgcccccatggccgcccgtcggagccagaggcggagggggcgccggggggagccgggcaccgccctgctggtcccgctcgcgctgggcctgggcctggcgctggcctgcctcggcctcctgctggccgtggtcagtttggggagccgggcatcgctgtccgcccagcaggagcctgcccaggaggagctggtggcagaggaggaccaggacccgtcggaactgaatccccagacagaagaaagccaggatcctgcgcctttcctgaaccgactagttcggcctcgcagaagtgcacctaaaggccggaaaacacgggctcgaagagcgatcgcagcccattatgaagttcatccacgacctggacaggacggagcgcaggcaggtgtggacgggacagtgagtggctgggaggaagccagaatcaacagctccagccctctgcgctacaaccgccagatcggggagtttatagtcacccgggctgggctctactacctgtactgtcaggtgcactttgatgaggggaaggctgtctacctgaagctggacttgctggtggatggtgtgctggccctgcgctgcctggaggaattctcagccactgcggcgagttccctcgggccccagctccgcctctgccaggtgtctgggctgttggccctgcggccagggtcctccctgcggatccgcaccctcccctgggcccatctcaaggctgcccccttcctcacctacttcggactcttccaggttcactgaggggccctggtctccccgcagtcgtcccaggctgccggctcccctcgacagctctctgggcacccggtcccctctgccccaccctcagccgctctttgctccagacctgcccctccctctagaggctgcctgggcctgttcacgtgttttccatcccacataaatacagtattcccactcttatcttacaactcccccaccgcccactctccacctcactagctccccaatccctgaccctttgaggcccccagtgatctcgactcccccctggccacagacccccagggcattgtgttcactgtactctgtgggcaaggatgggtccagaagaccccacttcaggcactaagaggggctggacctggcggcaggaagccaaagagactgggcctaggccaggagttcccaaatgtgaggggcgagaaacaagacaagctcctcccttgagaattccctgtggatttttaaaacagatattatttttattattattgtgacaaaatgttgataaatggatattaaatagaataagtcataaa

SEQ ID NO: 72537 - DNA, 676 bp, Homo Sapiens
tgcagagtatgttttctttcgtgcctcccttcagttttcttcagttgcgttcagtgtatcttctggaaccaatagtgccctgtgttctcaagtctctaaaatgctaagatctgagcaaagtcaagcagcttacactaggcttttttacagctgtgcttgagaacatttccgagtggaccagggccttgaggagcctgtttttcagcaaattcaacagatgtgtgcagtgattccctccgttttgtatttgacaccttcatttaaaatgctaagatgcaatatcattcacttcaaagtggggaaaatgcagaattgtgtttcctttttatctgtgtgattccttaagaaacatgtttttaaaatatgtgttctaaatggttttttattctgtattactgctttggccatgtggctctcatgactttcattgtaccagattctcagctccctgaaacatggggacgagaagctctggaattacagcaagatttttgttccatgagcgcaatactgtatcattaacatttttaatggtatggattttatagcatctgtgtatgtttgcaaatattaagttattacatgttttaaaatgagcgtttttcatcttaaattttatatgtttgcaaatatatttttttaataaaatttcaaaaccaagttttagcacctaaaa

SEQ ID NO: 72538 - DNA, 683 bp, Homo Sapiens
atataggaagctcctgggcttagctgtgagaagccaagtaccctcaccggcatgagacatgaggggcagctagacttccacccccttcccgcagacctgcctccagagcaaggagaatgctgccttaatctgttgggctccagtctccggggtgaattccagtgtatcccactgggagtgaatggatcatgaggtgggatggccccatctggatgttctgcagatccccacatgggaggagattcccaagtagaggcagccagaattctgactccctggcagcagcagggctttcaggcaccagtgtctgtgttgttagaactcagaggaagaggcaggggcagcagccgacagggggcagcatgacccaagcaaggggcctgaggcctcagtgggggtagggcaaggaggtacctcacaggtgggtgtgaggccccctctggagtttctggccattcacttacccactctcttctccccctgacccccgctccattgtttatgatggaaaaacggacatttggctaggtgtctctcacggctgctccatcctagcccccacaagctggggcttcctcctgtagatgctgtgcatgccccatgatgagtttctggcctaattgagggaaggaggaaattcataccagcagttttcaaataaaagaattgttctaattaaaaaa

SEQ ID NO: 72539 - DNA, 1112 bp, Homo Sapiens
  misc_feature (18)..(18): n is a, c, g, or t
caacatcattgaacatancaaattattgttgattactgtgaaaagcatcctgaggccgcccaggaaatagaagttgagctagaacttagtaaagagatggttagtcttctcccaacaaaaatggagagattcagaaccaagatggccctgacttaatccttgtttttaaagaaaggaaatgtgcaatattgaagtgatctttttccctagtcagacaggcccaattccattgtgatgtttacctttatagccaggtgagtgcagtttgaacttgagatacagtcaactgagtgtttgctaggatcctaaggaacataaagttaattaaaaacttacacctaattatgtaaattgccttgttaaagacatgtgatttgtattttagatgcttgtttcctattaaaatacagacatttctaccctcagtttctaaatgtagactatttgttggctagtacttgatagattccttgtaagaaaaaatgctgggtaatgtacctggtaacaagcctgttaatatattaagattgaaaaagtaacttctatagttactccttctaaaatatttgacttcctaaattccccccacccaaaatctttcccttttgaaaatactaaaaactaagttatgttattataaagtgtaaaatggtttgtcttaattataggagaaaaaggccttgttagaaataaaataaactgacttatttcactaatgaaaaaaatctacaatgttaacccagcatgctgttggcaattgttgtaaacaaacaagttaaaggcaaaaattcttgccaagagaattaatgtgcgtatcgagcacattccgcaatatattatccaaaatatctttctgacacgcgtgcccgaaagtgatcagaaaaggaactaagccttttcacaaaggaacctggggttcaactaaaggggccgggcctgctcccccctaaaaaaaagcccccctgtgttgacaaaccaagtgtataagaaacctgcacgcagggggggacccagatgcccctatgggggttcctgggccataaggggggtgcttaagcgaagcctaaaattaatggaattttcgggccccctcccgttggaaattttttatg

SEQ ID NO: 72540 - DNA, 1874 bp, Homo Sapiens
cagtcgacggtaccggacatatgcccgggaattcggccattacggccggggcctgcccctgagtgacagaaccgtggacagcaacatttcccacaggacacgaagtttgtcggcccttgccttggcagagctgagtaagaaaaatcaccaagaatattatttttggtatttggaattgaatttgccaggaatgcaagcactgctacctaactaaagaccttggctttggaaacatcttaccccttggcagctctccagagtttagacttggcagcatcaaagacacaacgcaagcaggcattttggagatcaaagatgggtagaaaagatgctgctactataaaacttcctgttgatcagtacagaaaacaaattggtaaacaggattataaaaaaactaaacctattttacgagcaaccaaattaaaagcagaagcaaagaaaacagcaataggcataaaggaagttggccttgtacttgcagctatattggcactactactggctttctatgctttcttttatctcagactcaccacggattgttgaccctgatctggaccaagatgaagattagctaagcaacaatcaatgcatgaaagagaaataactttacgaaagcaccttttgggaccaaaactttcaatactgaaactgtaacatctttaattctttctgctaatattttcagtttgcagacatatgatttttgatagttgcataggatgtcaggaaaagaaccttacctagcaatgcagtatagtatgtgctactggatacttttatatatctttctgctttgacagccaccctatacatggtacatttagatgaaatgggaaccagatcctaaatttttcaaatgtcattgccaatttatgtgtataattccatcacttcctgatgagtaagtctatttttggtctatatacatcataagttagtatatatccttaatttacagaaacatgctcaaatcacatttcagaaagaacaaaaagtcatggggaaaattttttattttacaacaaagccctggcttttctttctgggacgtattttacatcatttagagagactatctgcacatacatctaccataatctttttccttctttgccaactgttcagtgcacatgtgctgcatcagaaatggcacctggatgacagaagctcaaagagtcacatatgtctctaaaatagagttcttttcctcttgggctgtctgaactggtgtaaatagaagctcagttgatcttggttttaattaacttattacctctattaatataacctcggaattctattctaattatgttgttctggctgcttgtagtatcagttcgcccctcttgttagggagatatgtaacaatctgtcatttaattgagcagtctttttcacataacagtaatagcaaaaatcctacctactcagaatcatcttcttaggttgtctcctaaatctgaacaatacagtggttttataaaattacattttgtctcttgagatttaatcaattagaactctttagggagaaaataaataatagaagaaaatatatgcctcatatttcatatgtaattatctgttgatataatttttcaatgtattttgtatttgtgggagcataatgacctgtacattcaatatttttactggtaattcaatttttaaatatgtttttacaatgcttgaacacataaaccttagaaaactggaaaatacgtgtccacagaaagagttattagctactaccttatgtaaagatgcatagaaaatgaaattgttggaaacatgtgcacaaagtgttttatattatatacattgtatttatgaagaataaataaaatattaagattgtttaacaagct

SEQ ID NO: 72541 - DNA, 1524 bp, Homo Sapiens
gctttcagaaagtaggaaaataaacattagggctttaatcctcttaaataaaaattttaaattaaacattaacatttaaagtacaccaagcgtgcagtcctattttgagaaagtccattttgccagggaatacaacttgaggtcattagtaactagttgaatatgatttaaatatgtctgcatttagatgaacagaacagggtaaaaggaactttgccaagccaagctcaattcctggccaaataatgggggagaactgtcagtgcccacacccatttctcagtggtcagtttcagccgctgttgactgaagacaaacgaactcactatgttcttcacaaagatcattttttttaagtaagaaaaatgtttcaactctcttgcctttccttcagcgaatgaaatgtgacgggctaaatacgccagtcactcatgcgccgcagggacacatggtgcagactggcgtgcccaggtagccaaacagaattccccaagaccttttatttgtttaaaatactttggtgtcagcagagtctgagcagacacgttactcatgatgctcgggagaccaggcagggccctgctgagctcttctgaaagtatgtggaactattcaacgcgtggcactaaaagggaacagactcccgaattagagttcattaatgcagttgggcaaccggcttttctgtttagccactggttacttaaggttcccaataaggtttgggaaaaggtcacacgtactcatagatgagaaacaatgaaccagccttgagagttacatcaagtgagtttaaaaacacccaccccatcaacagcagctaagcttccttcaccacccccaccagggcgggtctcagagtgcgcccatgcagcttgtaccccactttgctaactagggccactgtgcctggctccttcccctcaaccggtgtgtggaacaaggcctcatgttcataagggtcgaacttggctccgacagggttcaacttgagcaagccatgctttgtgaacaccttctggatctggacttcagtcatgaccagcccctcatagaggttcttcaggtgagggttatcgtctttaatttcttcttttggaacacactgtgttgccttctccagaacgtctgccacctccaacaagtccttgcagaaggcttgaatgccgtataattttgcctcctccaccaatttctggctcctctgccgtaagttctcagtgtctgccaaagctcgtttatatttttccacagtctccttcagctgttcctccaacttgaccttctcttccaggagggtcttctctgtagcaggaggatctgccttctgttcactctgacccatgtcctcttccaggttctggccactgttcttttgtttcgtggctgtgcacaacaaccggggagatggcctgagagacaacgccaaagcaggaagactgcgccgcgccaacctcacgcactgagccgccatgactgccactgcccgtcgcagtcgccgcgcacgcaccaagcgtgagtccc

SEQ ID NO: 72542 - DNA, 560 bp, Homo Sapiens
ttttgtcttgaaaataatagacatttgtagaatatggagactaactcctaggagttgctttactctgtcaggtgacttaagtcactgggattcactaattttctctgagagaacagctgattgagaatttccattgtaaatagctcagtgttgtatagtgaggcttacgatgttttgtagtcttggcgtaaggacacagcccaagtaactgacgtttcccctccccctcccctctgaggagcctgcctgcctcacaactcaccctcacttcactgaatgaggaggctgagcagctgcagtgtttctgtccggaggaaatggatcttaggccactggacaagaacctgcacccaagggccctgaacccattttcctcccctgtcccagccttcccactttgacagacacttttaactgtgttccttactgctgccacaatcagcatggttgtatagtgccccattaggccatttacatacccagagttatactcaagcagaatgcacaaatggacatgtcataatttttgttacaataaatatgaaatttacaagtaaaaa

SEQ ID NO: 72543 - DNA, 660 bp, Homo Sapiens
  misc_feature (15)..(15): n is a, c, g, or t
gcccgcccacaccgnccgcctccatgcccaacctcgccgaggccacgctcgcggacgtgatgccccggaaagatgagcacatgggccaccagttcctgacgcccgatgaggcgccctcgccccccaggctactggcggcgggcagccccctggcgcacagccgcaccatgcacgtgctgggcctggccagccaggactccctgcatgaggactctgtgcgcggcctggtgaagctcagctccgtgtgacccacatggccccaggccgggggacaccagaggctcctccatgggcagcaggagtgagcggaggggtgtgtcccacagcgactttcccagccaatgccacggtggagatgacagccccaggtctggggtacagagaccacttaggatggcacagggtggctggccccggatgctgagagcttggtttcatttgaattttcttccccaacctgagtgctttgacaacaatggaaatagagaagtggctgctttcttttggtgaccctccaggggtggaatcggagtgtgtctgcccgcccttgtgacagacacacggaaggcttctgacgcttgtggccagactgcaattgcacttatgtgttatgctactaatatttgaaacagacctgccattccatttgttaattaaaaa

SEQ ID NO: 72544 - DNA, 1573 bp, Homo Sapiens
tggaccggtccggaatttccgggatatcgtcgaccccgcgtccggcggcgtggagggcggcgcggagggcgcgggcccgggagccagggagcgagcggggcgcccggcagcgcggagtcagcgccgcgggggccgcacccgactcgcgcctggacactcgcggggcgccgacctggcagggggccaaaccagtgctcctgccacctctctggctgccccctagagcctgcccatcccagcctgaccaatgtccacagccagggagcagccaatcttcagcacacgggcgcacgtgttccaaattgacccagccaccaagcgaaactggatcccagcgggcaagcacgcactcactgtctcctatttctacgatgccacccgcaatgtgtaccgcatcatcagcatcggaggcgccaaggccatcatcaacagcactgtcactcccaacatgaccttcaccaaaacttcccagaagttcgggcagtgggccgacagtcgcgccaacacagtctacggcctgggctttgcctctgaacagcatctgacacagtttgccgagaagttccaggaagtgaaggaagcagccaggctggccagggagaaatctcaggatggcggggagctcaccagtccagccctggggctcgcctcccaccaggtgcccccgagccctctcgtcagtgccaacggccccggcgaggaaaaactgttccgcagccagagcgctgatgcccccggccccacagagcgcgagcggctaaagaagatgttgtctgagggctccgtgggcgaggtacagtgggaggccgagtttttcgcactgcaggacagcaacaacaagctggcaggcgccctgcgagaggccaacgccgccgcagcccagtggaggcagcagctggaggctcagcgtgcagaggccgagcggctgcggcagcgggtggctgagctggaggctcaggcagcttcagaggtgacccccaccggtgagaaggaggggctgggccagggccagtcgctggaacagctggaagctctggtgcaaaccaaggaccaggagattcagaccctgaagagtcagactggggggccccgcgaggccctggaggctgccgagcgtgaggagactcagcagaaggtgcaggacctggagacccgcaatgcggagttggagcaccagctgcgggcgatggagcgcagcctggaggaggcacgggcagagcgggagcgggcgcgggctgaggtgggccgggcagcgcagctgctggacgtcaggctgtttgagctgagtgagctgcgtgagggcctggcccgcctggctgaggctgcgccctgagccggggctggttttctatgaacgattccggcctgggatgcgggccaggctgcaggcggcatagttgggcccattcgtcctggaaagggactggggggtcccaacttagccctgggtgggccgggccgggctgggctggggtgggccccagtcggctctggttgttggcagctttggggctgtttttgagcttctcattgtgtagaatttctagatcccccgattacatttctaagcgtg

SEQ ID NO: 72545 - DNA, 950 bp, Homo Sapiens
tgcggccgcggcgggccagcggcggagccgtgtagcggagaagctccccctccctgcttcccttggccgagccgggggcgcgcgcgcacgcggccgtccagagcgggctccccacccctcgactcctgcgacccgcaccgcacccccacgcgggcccggaggatgatgaagctcaagtcgaaccagacccgcacctacgacggcgacggctacaagaagcgggccgcatgcctgtgtttccgcagcgagagcgaggaggaggtgctactcgtgagcagtagtcgccatccagacagatggattgtccctggaggaggcatggagcccgaggaggagccaagtgtggcagcagttcgtgaagtctgtgaggaggtatgcatggagaagagagggcacagctgtgcctcgtcatcatgaacctgtcctatctgtgtagttctttaatatgtcagcactcactgaataaatatacagtcacagaaaaagggcaatgaatggttatccggtccctcctttattaccgggtgatggagttgtgacatggtaatgttaaccggcactctgtgccagacttcccatgactttttatgccagacttttgttacttcccatggatttcttccaacactgcctgttacctgtggcacaaaatcaagaagcaaatagttcctgacctctaaggagtaagaggaacaggcagcattagtataaatgactcattgtcattaagctttggaggaggcccttgttttcctgtgcttactgcatcctagccatggaactgtggctaaaggagtgattatgttagccagatactgttaatggtacaacttgagagagaatagtatcttcttttttatttagtcacatgatgttccacatacatgtgttgagttcctgggccatgatatcctactagatactccagaataaataaaagaagtaaagtc

SEQ ID NO: 72546 - DNA, 1289 bp, Homo Sapiens
  misc_feature (1163)..(1181): n is a, c, g, or t
  misc_feature (1206)..(1245): n is a, c, g, or t
  misc_feature (1269)..(1269): n is a, c, g, or t
ggtcctaggtagcgaggcctgggtggcgaattcccacgagggggcggcggccctggcggtagcggagacggcagccgtgacggtggcagcggcggcgcgggacctgggcctgggggaatgaggcggccgcggcgggccagcggcggagccgtgtagcggagaagctccccctccctgcttcccttggccgagccgggggcgcgcgcgcacgcggccgtccagagcgggctccccacccctcgactcctgcgacccgcaccgcacccccacccgggcccggaggatgatgaagctcaagtcgaaccagacccgcacctacgacggcgacggctacaagaagcgggccgcatgcctgtgtttccgcagcgagagcgaggaggaggtgctactcgtgagcagtagtcgccatccagacagatggattgtccctggaggaggcatggagcccgaggaggagccaagtgtggcagcagttcgtgaagtctgtgaggaggctggagtaaaagggacattgggaagattagttggaatttttgagaaccaggagaggaagcacaggacgtatgtctatgtgctcattgtcactgaagtgctggaagactgggaagattcagttaacattggaaggaagagggaatggtttaaaatagaagacgccataaaagtgctgcagtatcacaaacccgtgcaggcatcatattttgaaacattgaggcaaggctactcagccaacaatggcaccccagtcgtggccaccacatactcggtttctgctcagagctcgatgtcaggcatcagatgactgaagacttcctgtaagagaaatggaaattggaaactagactgaagtgcaaatcttccctctcaccctggctctttccacttctcacaggcctcctctttcaaataaggcatggtgggcagcaaagaaagggtgtattgataatgttgctgtttggtgttaagtgatggggctttttcttctgtttttattgagggtgggggttgggtgtgtaatttgtaagtacttttgtgcatgatctgtccctccctcttcccacccctgcagtcctctgaagagaggccaacagccttcccctgccttggattctgaagtgttcctgtttgtcttatcctggccctggccagacgttttctttgannnnnnnnnnnnnnnnnnnattaaaagataccagtttggggtgnnnnnnnnnnnnnnnnnnnnnnnnnnnnnnnnnnnnnnnngggccgcgtatgcggccgcaagcnttattccctttagttgaggg

SEQ ID NO: 72547 - DNA, 719 bp, Homo Sapiens
ttttgctttaaaaaaacaaagcaaaccctgggatcaactttattgctgatggctgaagcctcctcctccctatccccttggtctttcaggtggtccaaagcccctccaggatagcacagtgcttaggctctgctgggccagaggcaagggagacaatctatctcccgagcctgccctggcccagtcctttccctgcccctaccccaccctattgcacatcaaatcatgtaaacatggctatggggatggcccagaacagcagtgaggcagattgatgtgtaaacagatttgggatcaggggctagacccagtcacccagccctaccccatgctgaggccacagttaagtatggaaaagcaggaggtcctggtcccaaactctggctcagattatgcaatagtgcagatggctctgctcccctctgccacccaccctctcagattccaggtcctgaggtccaagtagccttgggcttccctccaggcctaggcagcagatggcagtgtccagttttttccttcccacccccagctggaggtcactggtgctgggtcttcctagatgcctgggggaaaccggagacgggcagcggcagtctgtccagcccaaaggcccggatcagctctgcccgcacagctgcagtgaaggtcttcaccagacagagtgtggtgaggcctgcaaaggctgcgttgtagaagaacacaatgtagaaattgcc

SEQ ID NO: 72548 - DNA, 777 bp, Homo Sapiens
gggacaaaactgcctggtctcattgtggccatccacatcctggagctgctcatcgatgaggctgccactgccccgaggcatgcagggtacctccttaggccaggtctccttctccaagctgggctcctttggtgccgtcattcaggttgtactcatcttttacctaatggtgtcctcagttgtgggcttctatagctctccactcttccggagcctgcggcccagatggcacgacactgccatgacgcagataattgggaactgtgtctgtctcctggtcctaagctcagcacttcctgtcttctctcgaaccctggggctcactcgctttgacctgctgggtgactttggacgcttcaactggctgggcaatttctacattgtgttcctctacaacgcagcctttgcaggcctcaccacactctgtctggtgaagaccttcactgcagctgtgcgggcagagctgatccgggcctttgggctggacagactgccgctgcccgtctccggtttcccccaggcatctaggaagacccagcaccagtgacctccagctgggggtgggaaggaaaaaactggacactgccatctgctgcctaggcctggagggaagcccaaggctacttggacctcaggacctggaatctgagaggagcctaagcactgtgctatcctggaggggctttggaccacctgaaagaccaaggggatagggaggaggaggcttcagccatcagcaataaagttgatcccagggtttgctttgtttttttaaaa

SEQ ID NO: 72549 - DNA, 1297 bp, Homo Sapiens
  misc_feature (720)..(720): n is a, c, g, or t
cagtgcacctgatgctgatagtcgttctagagtatccccctggagcgttttctcggcacaaaagctcatgatttaatgaggaacagaaacaaaatctctgattgttggtgtttcaaacttcattggcgtcctctggcaagcacaagttgatccctctgcagcttcaataccctttagcctgatgacagcttcatttaacagatcatttttccttgatggaggtggcaagcgtaacagtgttctgggcctgcttcagtaatggcatgtcgatcatactcccttggaaagtaaaggccccctttcctaattgttgatgttctttaaaggcagcaatcagttcttcagcccacttaattttttcaggggaaggagaaaactgctcctggaccacggcaatttggttagggtgaatcacctgcttaccagtgaagcccatggcggctccttctcgtgactgtctaagcagcccagctccatctcgaaagtcaatgtacaccagatctacggcttggagaccaaaggctttcgctatgacaacaatcttttgccgggcgtagagaatatccagggtttctttactacttgttgcacctatgctggctcgaaagtcttctcctccaaaaacgactgcatctagaaagagacctacttgaggcccgaccttcagggtttcttcacacactgccttaaaattgagcaaacccattgcagtttccacanaagggattaaattcattgcttgttcaagttttcggccttttaagtggaatgaaaatttgtctgcaaaccactggatttcttcaggactttccacctttggtagcatcaggctggaaggaaggacccgggattgcaaagggtctctaggtcttcttccgccagaccactggaaactgagttgactctcacacatttttcagtagggcccagatcaatgtcttcaagagtttttacaattctcagtcgagcttcattctttttgtttgcagccactccatcctcacagtcgagcactgcacaatctacattcagggatggaatcttctttattttcttttcatcatttccaggtacataaagcactgccctccgggggatgtacttgtgatgggatgaggaactatatccaagtctggggatatcagctgctagagacgctttcagcctcagcagcgccgccgccgcagctccgcgcgccgccctccgcagcagacgtagcgcccgacgcgtgggtcgacgatatcccgggaattccgaccggtaccagcctggctttttttacccactgttatattac

SEQ ID NO: 72550 - DNA, 1252 bp, Homo Sapiens
  misc_feature (80)..(114): n is a, c, g, or t
  misc_feature (149)..(382): n is a, c, g, or t
  misc_feature (408)..(436): n is a, c, g, or t
tgtatagatcactatagggcgctagcggcggtcgtagccgaacgacgagcgcagcgaagtagtgagcgaggaagcggcgnnnnnnnnnnnnnnnnnnnnnnnnnnnnnnnnnnncagtcgacggtaccggacatatgcccgggaattcnnnnnnnnnnnnnnnnnnnnnnnnnnnnnnnnnnnnnnnnnnnnnnnnnnnnnnnnnnnnnnnnnnnnnnnnnnnnnnnnnnnnnnnnnnnnnnnnnnnnnnnnnnnnnnnnnnnnnnnnnnnnnnnnnnnnnnnnnnnnnnnnnnnnnnnnnnnnnnnnnnnnnnnnnnnnnnnnnnnnnnnnnnnnnnnnnnnnnnnnnnnnnnnnnnnnnnnnnnnnnnnnnnnnnnnnnntggggggaaaaaagtatatatatatnnnnnnnnnnnnnnnnnnnnnnnnnnnnntatatctctaaatgtgtgtatagaaccttttatcagtataacattgatttataattaaatgtgggtgaggaagaatgtgtggagtgtttcagaaattttgatcttaaaagccttttcagaaactcaaagctttcagaaattaatagttatattaatagccttctaaacagcattaagttttcaattttaatatatctatataaaatatagtgtcaaagaaagtaacatcaatatagtgggtctgtaatggaaatctgtcaatgaacatgaactgagttcttcaactacaggttgaaggataattaaacttttcattaggagtgttcagctacatggattcatggaatggtggttcatagtaagtgatggtaatctttttattcatgggtgtaaaccctttataacttagtgcttaaaatattaatcttttgattatataatgtcccatgaattatagtttaccaatagttctaaaacatgctaacctgaccttttccttctaatttgtttttaacttcattcgagatagtacctctcactcacagatatttatttggttatcaagtgaagataggtgtgtctaaaagtgatcttctgaatcctgtctccctagaggtactagtatctagagtttacccagaaaattttatgattgtaacaaaaggaagtagtgacttatgaaggttttgtttcttgaattttacttttgctacttgtccaatagtggctagtttatgtttatcaatatagttattcactgtgccttaagtttatactttgtttatgcaaactataaaatttcccataaatgtaaaa

SEQ ID NO: 72551 - DNA, 686 bp, Homo Sapiens
tgtccaggacaaaaactggccactccattcagcattgacagcagtatgtaaagctggtgcatggtgaggtgagtttctcaagggcaaagacaatgccttcatgcatgttcagtgtctgcccccgtgggctgtgaaatgatcgctgacaatgggggatctgcagtgacttctctgcctctgccaaagcccaggggtgctgctccctaattctaaggattctaatgagactcagagcaggtgtaacacagggcatggagcttcctgagcaagaggctggctaacaaactgtggacgtggtacttagacacattaagagacattacagggacacctgcaagtatgtctccctggggagaagccaagtgcagatgctatggccacagatgatatggtttggctctgtgtccccactcaaatctcatctcaagttgtaatccctggatgtcgagggagggacctggtgggaggtgattggattggttcgcatgatagtgagggagttctcacgagatctggttgtttgataagtgtctggcatttctcctgtgctgtctctcctgccaccttgtgaagaaggtgcctgcttctccttcgccttccgccatgattgtaagtttcctgaggcctccctagcaatgcagaactgtgagtcaattaaacttcctttctttataaataaaaaaaac

SEQ ID NO: 72552 - DNA, 582 bp, Homo Sapiens
gtagaaagcacagataagtggtaaatggtctttttctgactttcattatgtggactggatggaggctttcaaactggtgccatactgctgcaggacctaaagggagccccatctttatggctgatcaactacaaccctatatgcctgaatactctgcaagaaggcctggagattttgcaaaactgatttattgagaatggcaaggagagccttgtgaacttttagctttggtgcacagctgataccaggagggaacatcctgaagtgtcagagaaaagtaaggcatatggctcacagtgatgatgccagtcagagccaggccagatggaaattgttttctgatgttactggttttcttttccctattagccaaagtgactatctcttaagagaagataatgtgacgtcaagggaagttggaaggcatggatttatatctatgtcagatcctggtttataatgttggccaaggcttatttatatatgtttatttagtattccataaaattgtacttcgtaatgaaaatgacacattttatcttaaatttagacaataaacaaaactttgttaccaaatcactc

SEQ ID NO: 72553 - DNA, 1517 bp, Homo Sapiens
  misc_feature (196)..(237): n is a, c, g, or t
ggctaggtacgaggccgggtgttaattcggcacgaggcaccaccgcccctgccgcatcgccacctccgccgctgcgccttggggccctcctccttcaccgcccccttcaccacctctacacgttctaggccttctgtcctggagaagaagctatagtcgttctcccttgtgggcccggggcgcagccatggcggannnnnnnnnnnnnnnnnnnnnnnnnnnnnnnnnnnnnnnnnnaactagccaggcctctgccggggcagcgactggcgctactggggccagcgggggcggtggccccatcaacccggcctcgctgcctcccggcgacccgcagctcatcgctctcatcgtggagcagctcaagagccggggcctttttgacagcttccgccgggactgcctggccgacgtggacaccaagccagcttaccaaaacctgaggcagaaagtggataattttgtgtcaacacatctggacaagcaggaatggaatcctacgatgaacaaaaaccagttgcgaaatggtctgaggcagagtgtggttcagtcagggatgttggaagctggagtagacaggattatttctcaggtggtggatccaaaacttaaccacatcttcaggccacaaatagaacgagcaattcatgagttcctggcggcccagaaaaaagcagctgtgccagcaccccctccagagcccgaaggccaggaccctccagctccatctcaagacacttcctaagaatacgccagacaccttttgaaagctaatttttggtgaagaaatggattcggttacataagagtgcaacttcagactgaagataggccaaggtcgtcactgatctcaagatttcaaccttgaccatgggcagtgaccagattgaaaggggagcaagttcggcagtgggagagttgaccgtgtcaccccctgcattgtgctgccatttggccagcctgtccaagggcatgacaccaagtagacactacagagagagaaacactacagcaacccagggttgtcctgaaacagacttttatacttgaacatggagactgcacatggactttagggtttgtgctgtgggataaacggaagctacagtgagaacatagccagtcccaaagacaatttcaaagaaaaatgacagtaaagattagctgggagtagtctttgacagtgcttatttgatactgtctctcagagtttgcaaaccagattgtacaagtcattagcgtcagatagctttaaagttgtgaccttcttgtacatgaatcttctagccagtttcctttcctttgtaacgaaacatgaaatcctagaatgtatgagaagttcagacattaggcataaggaaactcgtttgcaggctctctgtccagggctgcttcctgtcctggaggggccagtgagtcttaggtatgtttattttattctcacatttgtgtttttttagaaaagtgaatggtcaataaatggcttatctttcataataaaattatttgatactttt

SEQ ID NO: 72554 - DNA, 676 bp, Homo Sapiens
agtccactggggacagaggcaggggcaagtggctctccccattaccttctcaagacctcagtgggagcaccagccaatggtaccatcggctgggctgccaggtaccctgggcctggcgctgcagacctgagctggcttggacccatttgaggactgaactaggcaggcaatggctccagtgccctccctctgttccctggaccaccaccccacgtagctgctcacaccagcctccgggtgcctccctctgcttgtacagagcccatggtcgggacagtgccctggcctttgccggggaggaggatgctctgagattcagggtggggctggcaacccctgaagagaacacttcctgttggtctgtctcttcccaccttccatctgcacacacccccaaggtaagggtacagcccggctggcggcctccttgggaacgtgtaggccacggctctgccaccactaggtacctgctgagggcgctggctctgcagatcagaacaacggaggatagctttgtgcctggacccagagagtgtgggactccccgcttcatccccaccgtcccactccacagccttcccgaaacattccctggcaaacaaaggaacactaggagaaaaaatggaaaaacccttccagtaattaaaaaggaagaaaccacagaaagaaaactaat

SEQ ID NO: 72555 - DNA, 1346 bp, Homo Sapiens
  misc_feature (781)..(781): n is a, c, g, or t
ggtccaaggtagcgaggcctgggtggcgattccggcacgaggagctggtgagccgtggctgcgagacccgcgagctggcgctgccccgcgacggtcaaggccgcctgggcttcgaggtggacgccgagggattcgtcacgcacgtggagcgcttcacattcgccgagacggcggggctgcggcccggggcgcgcctcctgcgcgtgtgcggccagacgctgcccagcctccggcccgaggccgctgcccagctcctgcgctcggcgcccaaggtctgcgtcaccgtcctgccccccgacgagagcggccggccccgcaggagtttttcggagctgtacacgctgtcgctgcaggagcctagccggcggggggccccagatcctgtgcaggatgaggtccagggggtgaccctgctgcccaccacaaagcagctgctgcacctgtgcctgcaagatggtggcagtcctccagggcctggggatctggccgaggagaggactgagttcctgcacagccagaactcgctgtcaccacgcagctctctgtcggatgaggccccagtcctgcccaacaccaccccggacctcctcctggccaccacagccaagccatcagtacccagggctgacagtgagacacccctgacccaagacaggccaggcagtcccagtggctctgaggacaagggcaacccggcgccggagctgagggcctcctttctgccacgtaccttgtctctgcggaactccatcagcaggatcatgtcggaggcgggcagtgngaccctggaggacgagtggcaggccatctcggagattgcctctacttgcaacaccattctggagtcgctgtcccgagagggacagcccatcccagagagtggagaccctaagggaactccaaaatctgatgctgagccagagcctgggaacctctcagagaaggtctctcacttggagtccatgctcaggaagctgcaggaggacctgcagaaggagaaggcggacagggcggccctggaggaggaggtgcggagcctgagacacaacaaccggcggctgcaggcggagtctgagagtgcagccacacgcctcctcctggcctccaagcagctgggctcacccaccgccgacctggcctgagccgtctggaaccacctgggcccctgagggcactgtggtcacactgggccctcctcaggaactctccctgcgcagaggcgtgtcttagcactgcccccctccctagccccttatttggtggcggaagtggcctccaccccttccctgtttgtaaatattctgtggagaaaagaggacttcagggagtaaaaaagccaaaagaaa

SEQ ID NO: 72556 - DNA, 640 bp, Homo Sapiens
gaattcggcacgagggtgcaccctgagccggagctgcccagtcgccgcgggaccggggccgctgggtcgtggacgggggtcgccatgttccggaactttaagatcatttaccgccgctatgctggcctatacttctgcatctgtgtggatgtcaatgacaacaacctggcttacctggaggccattcacaacttagtggaggtcttaaacaaatatttccacaatgtctgtgaactggacctggtgttcaacttctacaaggtttacacggtcgtggacgagatgttcctggctggcgaaatccgagagaccagccagacgaaggtgctgaaacagctgctgatgctacagtccctggagtgagggcaggcgagccccaccccggccccggcccctcctggactcgcctgctcgcttccccttcccaggcccgtggccaacccaacagtccttccctcagctgcctagaaggaagggacccagctgggtctgggccacaagggaggagactgcaccccactgcctctgggccctggctgtgggcagaggccaccgtgtgtgtcccgagtaaaaaaaccgtcgtcgtgtaatgccataagcgtctgtggataaagtccccaataaacctgtggtcctgcca

SEQ ID NO: 72557 - DNA, 965 bp, Homo Sapiens
  misc_feature (859)..(878): n is a, c, g, or t
  misc_feature (880)..(884): n is a, c, g, or t
cagtcgacggtaccggacatatgcccgggaattcggccattacggccgggctaccggaagtccgctctagctctgggccctacaactgcaccctgagccggagctgcccagtcgccgcgggaccggggccgctggggtctggacgggggtcgccatgatccgctttatcctcatccagaaccgggcaggcaagacgcgcctggccaagtggtacatgcagtttgatgatgatgagaaacagaagctgatcgaggaggtgcatgccgtggtcaccgtccgagacgccaaacacaccaactttgtggagttccggaactttaagatcatttaccgccgctatgctggcctctacttctgcatctgtgtggatgtcaatgacaacaacctggcttacctggaggccattcacaacttcgtggaggtcttaaacgaatatttccacaatgtctgtgaactggacctggtgttcaacttctacaaggtttacacggtcgtggacgagatgttcctggctggcgaaatccgagagaccagccagacgaaggtgctgaaacagctgctgatgctacagtccctggagtgagggcaggcgagccccaccccggccccggcccctcctggactcgcctgctcgcttccccttcccaggcccgtggccaacccagcagtccttccctcagctgcctaggaggaagggacccagctgggtctgggccacaagggaggagactgcaccccactgcctctgggccctggctgtgggcagaggccaccgtgtgtgtcccgagtaaccgtgccgttgtcgtgtgatgccataagcgtctgtgcgtggagtccccaataaacctgtggtcctggnnnnnnnnnnnnnnnnnnnnannnnntccttggtcggccgcctcggcccttgaaaagctttccaagacctttcgttttgcccgcgggccccattggggaatgaacca

SEQ ID NO: 72558 - DNA, 1019 bp, Homo Sapiens
  misc_feature (983)..(983): n is a, c, g, or t
  misc_feature (989)..(989): n is a, c, g, or t
cggcagtaactccaacggtttaaggtagcgaggctgggtggcgaattcggcacgagggtctctagagacaaggatctgattgcaggtggagaggggatgttgagacaggcgcaggagactgcctgtgagagagggatgatctcaagaagagacctggcacaggaaaccaaaaggaggcaactgtagggaatgaaacttaagggtctgggaaagcgctgtaaaaggagagaggacctggagatccgctttatcctcatccagaaccgggcaggcaagacgcgcctggccaagtggtacatgcagtttgatgatgatgagaaacagaagctgatcgaggaggtgcatgccgtggtcaccgtccgagacgccaaacacaccaacatttgtggagttccggaactttaagatcatttaccgaccgctatgctggcctctacttctgcatctgtgtgcatgtcaatgacaacaacctggcttacctggaggccattcacaacttcgtggaggtctttaaacgaatatttccacaatgtctgtgaactggacctggtgtacaacttctacaaggtttacacggtcgtggacgagatgttcctggctggcgaaatccgagagaccaagccaagacgaaggtgctgaaacagctgctggatgctacagtccctggagtgagggcaggcgagacccacaccagccccggaccctactggaatcgcatgctcgactccccttcccaggcccgtgggcaacccagcagtccttccctcagctgcctaggaggaaaggacccagctgggtctgggccaacagggaggagactgcaccccactggctctggggccctggctgggggcagaggccaccgtgtgtgtcccgaagtaaccgtgccgtttgtcgggtgatgccaataagcgtcctgtggcgtggaagtcccccaataaacctgtgggtcctggcctgggcaaaaccgggaattaaaatcnaccacncaacagatacaccaaaacctggtggggcca

SEQ ID NO: 72559 - DNA, 882 bp, Homo Sapiens
  misc_feature (251)..(251): n is a, c, g, or t
ctcgccgagtcagatacacacatgagaatataaataacggcttgtggcaataatgactaaatgccaaggagtggctggtaaaccgcggtgttccctagagaccccggcctgggctctacttaggctgcctcttggacatcagaccaaggcttacattctgaatccacagggcatccacatgggtggtgtcagtcccccacagacagagaagtgtcccgttgcatttttccatctattccagtagtaagatngtgtcatttgagattttctttaactgtataattggacgtttaattaacaaaccagagaggaggaaaaacaatgaggtgggtagagcatcatgttcagcctcagggctgtacagcaaagcaattttagactgcggatgttgagtctccagttaccctgagtgccagttacagtgattcacatctgaaagaacagtactgcaggagagggacagcccagggtggatgggtggggtgggcaggagctggctgccaactccttccctgagctgggcctgcagagccctgaggagtggggcatgctgtcctttttgcctgatttccaaggattctgcttaacgaattacttcgttcattttagtaagcacaggtggctggtgaagattttccagctaggtagatctttttgtgtgtggcttatgacttttagggggtgagggaagaaaatagacgaaaatagacttagttacaaatgtgagtctgtgcaggaaaatgtggaggtcagtcgttagttgtgttgtatcaaagacgtgaatgaggaactagctgaagtgtaagaggttgattttcctgtacgattaaaaataaacctgcctctatgcatttcagtcgcatgtatctactcggcgagtcc

SEQ ID NO: 72560 - DNA, 1746 bp, Homo Sapiens
  misc_feature (1746)..(1746): n is a, c, g, or t
gcggccgcggaggggcctggagtgtggcggcggcgggacccggagcaggagcggcggcagcagcgactgggggcggcggcggcgcgttggaggcggccatggcaaagcagtacgactcggtggagtgccctttttgtgatgaagtttccaaatacgagaagctcgccaagatcggccaaggcaccttcggggaggtgttcaaggccaggcaccgcaagaccggccagaaggtggctctgaagaaggtgctgatggaaaacgagaaggaggggttccccattacagccttgcgggagatcaagatccttcagcttctaaaacacgagaatgtggtcaacttgattgagatttgtcgaaccaaagcttccccctataaccgctgcaagggtagtatatacctggtgttcgacttctgcgagcatgaccttgctgggctgttgagcaatgttttggtcaagttcacgctgtctgagatcaagagggtgatgcagatgctgcttaacggcctctactacatccacagaaacaagatcctgcatagggacatgaaggctgctaatgtgcttatcactcgtgatggggtcctgaagctggcagactttaggctggcccgggccttcagcctggccaagaacagccagcccaaccgctacaccaaccgtgtggtgacactctggtaccggcccccggagctgttgctcggggagcgggactacggcccccccattgacctgtggggtgctgggtgcatcatggcagagatgtggacccgcagccccatcatgcagggcaacacggagcagcaccaactcgccctcatcagtcagctctgcggctccatcacccctgaggtgtggccaaacgtggacaactatgagctgtacgaaaagctggagctggtcaagggccagaagcggaaggtgaaggacaggctgaaggcctatgtgcgtgacccatacgcactggacctcatcgacaagctgctggtgctggaccctgcccagcgcatcgacagcgatgacgccctcaaccacgacttcttctggtccgaccccatgccctccgacctcaagggcatgctctccacccacctgacgtccatgttcgagtacttggcaccaccgcgccggaagggcagccagatcacccagcagtccaccaaccagagtcgcaatcccgccaccaccaaccagacggagtttgagcgcgtcttctgagggccggcgcttgccactagggctcttgtgttttttttcttctgctatgtgacttgcatcgtggagacagggcatttgagtttatatctctcatgcatattttatttaatccccaccctgggctctgggagcagcccgctgagtggactggagtggagcattggctgagagaccaggagggcactggagctgtcttgtccttgctggttttctggatggttcccagagggtttccatggggtaggaggatgggctcgcccaccagtgactttttctaagagctcccggcgtggtggaagaggggacaggtccctcacccacccacaatcctattctcgggctgagaaccctgcgtgaggacagggctcgcctcaggaatgggctgtttttggcctaaccctcagaaacactggggctggcacaaactcttggtttcttcaacaggagaattttactgtgtttcttttggttccattgtttggagacattcctgggcacagtttggtccgttagaattaaaaagttgaan

SEQ ID NO: 72561 - DNA, 917 bp, Homo Sapiens
agagtatgaagtcgacggcgcgccgaattcggcacgaggcgagatggagaagtgggttgaggacatccagatggccattgacctggcggagaagagcagcagccccgcccctgagttcctggccagcagcccccctgacaacaagtcccctgatgaagccaccgcggctgaccaggagtcagaggatgacctgagcgcctcgcgcacatcgctggagcgccaggccccgcaccgcggcaacacaatggtgcacgtgtgctggcaccgcaacaccagcgtctccatggtggacttcagcatcgcagtggagaatcagttgtctggaaacctgctgaggaaattcaaaaacagcaacgggtggcagaagctgtgggtggtgttcacaaacttctgcctgttcttctacaaatcacaccaggacaatcatccccttgccagcctgcctctgctcggctactcgctcaccatcccctctgagtccgagaacatccagaaagactacgtgttcaagctgcacttcaagtcccacgtctactacttcagggcggaaagcgagtacacgttcgaaaggtggatggaagtgatccgcagtgccaccagctctgcctcgcgaccccacgtgttgagccacaaagagtctcttgtgtattgatggccggacacactcgtttccgcagtggctgctttcctggaagacgtttcctttcttctgtattaatgaagcctggtaaaattaacacctgtctgaaaatcaaaaacatggcttcccagcagctctcctgtctccacagccgcgttttttaaccccgacctctcagcgtctgaatgaacagcgctcccacctccagtcctggcatccgctgggggcgctgttctttagctagtgccagtattaaaacattgtcattacgagagca

SEQ ID NO: 72562 - DNA, 170 bp, Homo Sapiens
gcggccgcctactactactactactatacggctgcgagaagacgacagaaggggttctgggcctagttgtcctccctctggagccccgtcctgtggtctgcctcagtttcccctcctaatacatatggctgttttccacctcgataatataacacgagtttgggcccgag

SEQ ID NO: 72563 - DNA, 1395 bp, Homo Sapiens
ggcctgggtggcgaattcggcacgaggggccagggccgcaggcaggaagggagcgaggctgaagggaacgtcgtcctctcagcatgggggtcccgcggcctcagccctgggcgctggggctcctgctctttctccttcctgggagcctgggcgcagaaagccacctctccctcctgtaccaccttaccgcggtgtcctcgcctgccccggggactcctgccttctgggtgtccggctggctgggcccgcagcagtacctgagctacaatagcctgcggggcgaggcggagccctgtggagcttgggtctgggaaaaccaggtgtcctggtattgggagaaagagaccacagatctgaggatcaaggagaagctctttctggaagctttcaaagctttggggggaaaaggtccctacactctgcagggcctgctgggctgtgaactgggccctgacaacacctcggtgcccaccgccaagttcgccctgaacggcgaggagttcatgaatttcgacctcaagcagggcacctggggtggggactggcccgaggccctggctatcagtcagcggtggcagcagcaggacaaggcggccaacaaggagctcaccttcctgctattctcctgcccgcaccgcctgcgggagcacctggagaggggccgcggaaacctggagtggaaggagcccccctccatgcgcctgaaggcccgacccagcagccctggcttttccgtgcttacctgcagcgccttctccttctaccctccggagctgcaacttcggttcctgcggaatgggctggccgctggcaccggccagggtgacttcggccccaacagtgacggatccttccacgcctcgtcgtcactaacagtcaaaagtggcgatgagcaccactactgctgcattgtgcagcacgcggggctggcgcagcccctcagggtggagctggaatctccagccaagtcctccgtgctcgtggtgggaatcgtcatcggtgtcttgctactcacggcagcggctgtaggaggagctctgttgtggagaaggatgaggagtgggctgccagccccttggatctcccttcgtggagacgacaccggggtcctcctgcccaccccaggggaggcccaggatgctgatttgaaggatgtaaatgtgattccagccaccgcctgaccatccgccattccgactgctaaaagcgaatgtagtcaggcccctttcatgctgtgagacctcctggaacactggcatctctgagcctccagaaggggttctgggcctagttgtcctccctctggagccccgtcctgtggtctgcctcagtttcccctcctaatacatatggctgttttccacctcgataatataacacgagtttgggcaaaaa

SEQ ID NO: 72564 - DNA, 893 bp, Homo Sapiens
ccagttcagtggtgaaagttcttcaggtacgaggagggcattgttgtcagtctggaccgagcccgcagagcccctcctcggcgtcctggtcccggccgtgcccgcggtgtcccgggaggaaggggcgggccgggggtcgggaggagtcacgtgccccctcccgccccaggtcgtcctctcagcatgggggtcccgcggcctcagccctgggcgctggggctcctgctctttctccttcctgggagcctgggcgcagaaagccacctctccctcctgtaccaccttaccgcggtgtcctcgcctgccccggggactcctgccttctggtgtgtccggctggctgggcccgcagcagtacctgagctacaatagcctgcggggcgaggcggagccctgtggagcttgggtctgggaaaaccaggtgtcctggtattgggagaaagagaccacagatctgaggatcaaggagaagctctttctggaagctttcaaagctttggggggaaaaggtccctacactctgcagggcctgctgggctgtgaactgggccctgacaacacctcggagaccaccgccaagttcgccctgaacggcgaggagttcatgaatgtcgacctcaagcagggcacctggaatggggactggcccgaggccctggctagtcagtcaggcggtggcagcagcaggacgaaggcggccaagcaaggagctcaccttcctgctattctcctgcccgcaccgcctgcgggagcacctggagaggggccgtggaaacctggagtggaaggagccccttcatgcgcctgaaggcccgaccagcagccctggcttttccgtgcttacctgcagcgccttcctccttctaccctccggagctgcacttcggttcctg

SEQ ID NO: 72565 - DNA, 870 bp, Homo Sapiens
ggaacattccagctaatgaggatgtaatgtcctcagtacaacgcagaccttctttttgtgttcaccaccacaagatgctggaagcttgacaaatgatatcatttaagacacatgcctgccttagggacctggtttttggcttcctgtttctggcttttatttgggtaacgtttataatggccacccgacttgtacctgggtaatgttttaaccccttccccagagttctcaattagcatgaatttactacagtcagagtttcctttaaattggggtgggggtgctaagcactgaaaatatctttcttgattactttaccatgtggacatatgggataaatactgtatttcagatttacataaaagtagattagtaatgcacagctttcagaataaaaacaatgataaaaaagaccaagcactatcaactttggacagtaatttcctaggtgttaaacaagttttctgaatgcaatctggatgcaaaacggcctgatttgatgaattcataattttcttctgtatactttcattttattaaatattttattacttggttaaacacaagaattatctatgtaaacttcatgggcttttttgttgaaagttagatgttcagtaactaatttcccagttatggcccagaattaaacatttatgatcatatttcagaagtcaaaatacaaaactggattatcaaaacggttggtgtggtcactttaaactggactatcagtatggttgccgtggtcactttaagctggattatcagtacggttggtgtggtcactttggtttatcatcaatacagttggtgtggtcactttaaactggattaccaatatggttggtgtggtcgctttaaagtttg

SEQ ID NO: 72566 - DNA, 656 bp, Homo Sapiens
atgatgggatggtctgttttttcgcttaaggtcgcatgatctttctgcaggaaatagtcactcatcccactccacataaggggtttagtaagagaagtctgtctgtctgatgatggatagggggcaaatctttttcccctttctgttaatagtcatcacatttctatgccaaacaggaacgatccataactttagtcttaatgtacacattgcattttgataaaattaattttgttgtttcctttgaggttgatcgttgtgttgttgttttgctgcactttttacttttttgcgtgtggagctgtattcccgagaccaacgaagcgttgggatacttcattaaatgtagcgactgtcaacagcgtgcaggttttctgtttctgtgttgtggggtcaaccgtacaatggtgtgggagtgacgatgatgtgaatatttagaatgtaccatattttttgtaaattatttatgtttttctaaacaaatttatcgtataggttgatgaaacgtcatgtgttttgccaaagactgtaaatatttatttatgtgttcacatggtcaaaatttcaccactgaaaccctgcacttagctagaacctcatttttaaagattaacaacaggaaataaattgtaaaaaaggttttctatacaaaaaaa

SEQ ID NO: 72567 - DNA, 1455 bp, Homo Sapiens
  misc_feature (185)..(185): n is a, c, g, or t
ctagttctcttctctctcctttcctgtctcgggcgagagtggcagcgacgtgcagctgttagccgtgtcccaccgtgggctgcgactgctcaaggtgacccaaggccccggctccgccccgaccagctgaagattctctgctcatacagctttgcggaggtgctgggtgtggagtgccggggcgnctccaccctggagctgtcactgaagagcgagcagctggtgctgcacacagcccgggcaagggccatcgaggcgctggttgagctattcctgaacgagcttaagaaggactccggctatgtcatcgccctgcgcagctacatcactgacaactgcagcctcctcagcttccaccgtggggacctcatcaagctgctgccggtggccaccctggagccaggctggcagtttggctctgccgggggccgttccggactctttcctgccgacatagtgcagccggctgccgctcccgacttttccttctccaaggagcagaggagtggctggcacaagggtcagctgtccaacggggaaccagggctggctcggtgggacagggcctcagaggtgaggaagatgggagagggacaagcagaggcaaggcctgcctgagactgaggaaggaaaggggtttgaccactcccgaggctgccatgcggtgggaccaccctgctgtccgtctcctgtggctgcccctctgcccgctcctgatggctcgccttgtctctccagcaagactgtgcactccttgcaggcaggggctgggctggatgctgctcttgtgtcccacgtggtacttagttcaaggctgccccagcagatgcttaataaacagctcttcactttcctggcttctggtcttgctcctttggtgtctggctggggagggatggggctggggcaggacccctgggacagggcactggacactcaggtggcaccaggtttcttgtgatcccagcgccctgcccacccttggagccaggcacacagtgacgactcggaggccaccagcctgtcctctgtggcctatgcctttctgcccgactcccacagctacaccatgcaggaattcgcccggcgttacttccggaggtcccaggccttgctgggccagactgatggaggtgccgcaggaaaggacacggacagcctggtgcagtacaccaaggctcccatccaggagtcgctcctcagcctcagtgatgatgtgagcaagctggctgtagccagcttcctggccctgatgcggtttatgggtgaccagtccaagccccggggcaaggatgagatggatctgctctatgaactgctgaagctgtgccagcaggagaagctgagggatgagatttactgccaggttatcaagcaggtcacgggacacccccggcggaacactgcactcgaggctggaggcttcctcagcttctcacaggcttcttccccccg

SEQ ID NO: 72568 - DNA, 888 bp, Homo Sapiens
ctgtgcgggtggtagactttggcagtgccacctttgaccatgagcaccatagcaccattgtctccactcgccattaccgagcaccagaagtcatccttgagttgggctggtcacagccttgtgatgtgtggagtataggctgcatcatctttgaatactatgtgggattcaccctcttccagacccatgacaacagagagcatctagccatgatggaaaggatcttgggtcctatcccttcccggatgatccgaaagacaagaaagcagaaatatttttaccggggtcgcctggattgggatgagaacacatcagctgggcgctatgttcgtgagaactgcaaaccgctgcggcggtatctgacctcagaggcagaggaacaccaccagctcttcgatctgattgaaagcatgctagagtatgaaccagctaagcggctgaccttgggtgaagcccttcagcatcctttcttcgcccgccttcgggctgagccgcccaacaagttgtgggactccagtcgggatatcagtcggtgacgatcaggccctgggcccccctgcatcttttatagcagtgggtgtccagtccaggacactggtgcttttttatacaagagaacgagccagagttcactccttcctcctggctctctatatacctgtgaatatgtgaaatagtgtaaatatgaaagaacttgtacctatcacttcaacccctgccttgtacataatactattccatccacacagtttccaccctcacctgccccctcatacggagttggatgggggccgagtgaggtaaccaggtggcatctaccccatgttttataaggaattttgtacagtctttgtgaaataaaataacgtgcttcatttgacccccaaa

SEQ ID NO: 72569 - DNA, 266 bp, Homo Sapiens
gcagcttttctctcccctccctgacgctgtcgcagctgcagtgacatgtacgagaaagtgctgtgcaccagctgtgccatgttcgagacctgaggctggctcaagccggctgccttcaccgggagccacgccgtgcatggcagccttccctggacgagcgctcggtgttcacactgaactgtggggtcgacgggaggggtgccttttacatgttctattttgtatcctaatgacagaatgaataaacctgtttatatttgcacaag

SEQ ID NO: 72570 - DNA, 802 bp, Homo Sapiens
aacggccagtaactataacggtcttaaggtagcgaggcctgggtggcgaattcggcacgagggagcttgcgtagctcccggccccgcgggcatgcccaagcggagctgccccttcgcggacgtgccccgctacagcgtcaaggtccgcgtgagccagagggagttgagccgcggcgtgtgcgccgagcgctactcgcaggaggtcttcgagaagaccaagcgactcctgttcctcggggcccaggcctacctggaccacgtgtgggatgaaggctgtgctgtcgttcacctgccagagtccccaaagcctggccctacaggggccccgagggctgcacgtgggcagatgctgattggaccagacggccgcctgatcaggagccttgggcaggcctccgaagctgacccatctggggtagcgtccattgcctgttcctcatgcgtgcgagccgtggatgggaaggcggtctgcggtcagtgtgagcgagccctgtgcgggcagtgtgtgcgcacctgctggggctgcggctccgtggcctgtaccctgtgtggcctcgtggactgcagtgacatgtacgagaaagtgctgtgcaccagctgtgccatgttcgagacctgaggctggctcaagccggctgccttcaccgggagccacgccgtgcatggcagccttccctggacgagcgctcggtgttcacactgaactgtggggtcgacgggaggggtgccttttacatgttctattttgtatcctaatgacagaatgaataaacctctttatatttgcaaaaaacctcgtgcc

SEQ ID NO: 72571 - DNA, 836 bp, Homo Sapiens
gggggtcgttggtaaggggctggcggccggggagctgcgtagctcccggccccgcggccatgcccaagcggagctgccccttcgcggacgtggccccgctacagctcaaggtccgcgtgagccagagggagttgagccgcggcgtgtgcgccgagcgctactcgcaggaggtcttcgagaagaccaagcgactcctgttcctcggggcccaggcctacctggaccacgtgtgggatgaaggctgtgccgtcgttcacctgccagagtccccaaagcctggccctacaggggccccgagggctgcacgtgggcagatgctgattggaccagacggccgcctgatcaggagccttgggcaggcctccgaagctgacccatctggggtagcgtccattgcctgttcctcatgcgtgcgagccgtggatgggaaggcggtctgcggtcagtgtgagcgagccctgtgcgggcagtgtgtgcgcacctgctggggctgcggctccgtggcctgtaccctgtgtggcctcgtggactgcagtgacatgtacgagaaagtgctgtgcaccagctgtgccatgttcgagacctgaggctggctcaagccggctgccttcaccgggagccacgccgtgcatggcagccttccctggacgaccgctcggggttcccactgaaactgggggggtccgaccggaaggggggcccttttaacaggttccattttgggacccccaagggccgaaatggaaataaccccccttttatatttggcccccggtggagaaatcaggaggagcatacataatttaaggtgaacagaatgcaagaggggacaaaga

SEQ ID NO: 72572 - DNA, 656 bp, Homo Sapiens; identical to SEQ ID NO: 3921

SEQ ID NO: 72573 - DNA, 582 bp, Homo Sapiens
atcccaattatatgagacgtttgtggaagagtagtaatagagcaaaattgatgtgtttatttatagagtgtacttaacctattcaggagagtagaacaggataatcagtgtgtctaaatttgaatgttaagcagatggaatgctgtgttaaataaacctcaaaatgtctaagatagtaacaatgaagataaaaagacattcttccaaaaagattttcagaaaatattatgtgtttccatattttataggcaacctttatttttaatggtgttttaaaaaatctcaaatttggattgctaatcaccaaaggctctctcctgatagtctttcagttaaggagaacgacccctgcttctgacactgaaacttccctttctgcttgtgttaagtatgtgtaaaatgtgaagtgaatgaaacactcagttgttcaataataaatatttttgccataatgactcagaatattgctttggtcatatgagcttccttctgtgaaagtacatttggagacacaactatttttccaaaataattttaagaaatcaaagagagaaaataaagaccttgcttatgattgcagat

SEQ ID NO: 72574 - DNA, 687 bp, Homo Sapiens
cttcaaagggcacaggaaccaggtgacttgcctgtcagtgtccactgacggcagcgtgctgctctcagcctcccacgacgagaccgtgcgcctctgggacgtgcagagcaagcagtgcatccggacggtggccctcaaagcatgctgagctcagacttcaggcccagcctgccgctgccccacttcaacaagcacctgctgggcgccgagcacggggacgagccgcgccacgggggcctcactctgcgcctgggcctccaccagcagggctcggagcccagctacctggaccgcacggagcagctgcaggccgtcctgtgcagcaccatggagaagagcgtgctcggcggccaggaccagctgcgcgtccgtgtgacggagctggaggacgaggtgcgcaacctgcgcaagatcaatcgggacctgttcgacttctccacgcgcttcatcacgcggccggccaagtgaggcccggagaccccggcccgaggcgcccaggcctgagccccatgcctcccagcaaccagggcccgcgggtgtggcccccaccagcccaggcctggactctcctcagttctgtgtcgtgttcgggtttttcctctgtgactgggccgtcttggtgtctcgtggcacgcgtcacagtggtgctagtctgtttttaacaaaagaggatgaaaagcccctcca

SEQ ID NO: 72575 - DNA, 717 bp, Homo Sapiens
aagggcacaggaaccaggtgacttgcctgtcagtgtccactgacggcagcgtgctgctctcagactcccacgacgagaccgtgcgcctctgggacgtgcagagcaagcagtgcatccggacggtggccctcaaaggcccagtcaccaatgccgccatcctgctggcgcccgtcagcatgctgagctcagacttcaggcccagcctgccgctgccccacttcaacaagcacctgttgggcgccgagcacggggacgagccgcgccacgggggcctcactctgcgcctgggcctccaccagcagggctcggagcccagctacctggaccgcacggagcagctgcaggccgtcctgtgcagcaccatggagaagagcgtgctcggcggccaggaccagctgcgcgtccgtgtgacggagctggaggacgaggtgcgcaacctgcgcaagatcaatcgggacctgttcgacttctccacgcgcttcatcacgcggccggccaagtgaggcccggagaccccggcccgaggcgcccaggcctgagccccatgcctcccagcaaccagggcccgcgggtgtggcccccaccagcccaggcctggactctcctcagttctgtgtcgtgttcgggtttttcctctgtgactgggccgtcttggtgtctcgtggcacgcgtcaccagtggtgctagtctgtttttaacaaaagaggatgaaaagcc

SEQ ID NO: 72576 - DNA, 610 bp, Homo Sapiens
tgcttattatagtagtttatacttttgcttaactctgttatgtctcttaagcaggtttggtttttattaaaatgatgtgttttctttagtaccactttacttgaattacattaacctagaaaactacataggttattttgatctcttaagattaatgtagcagaaatttcttggaattttatttttgtaatgacagaaaagtgggcttagaaagtattcaagatgttacaaaatttacatttagaaaatattgtagtatttgaatactgtcaacttgacagtaactttgtagacttaatggtattattaaagttctttttattgcagtttggaaagcatttgtgaaactttctgtttggcacagaaacagtcaaaattttgacattcatattctcctattttacagctacaagaactttcttgaaaatcttatttaattctgagcccatatttcacttaccttatttaaaataaatcaataaagcttgccttaaattatttttatatgactgttggtctctaggtagcctttggtctattgtacacaacctcatttcatatgtttgcattttggcaaagaacttaataaaattgttcagtgcttattatc

SEQ ID NO: 72577 - DNA, 734 bp, Homo Sapiens
ctataataagcagttgcttagatttaatataagaggatttgttttcactggaaaaaacgttaaagccctttcttttttctggagctgaaacagtggcttgtgttctagttattcaatatttctacagtaatttttttaatttttgtacttgtcaatgtgttcacgggctacaataagtctttgaatttgtgaagtaccttcataaatctgatagattttggcatccctcattagtttttccacaggatattctgtattaaatccattgcctccaagtatctgcacagcatcagtagctaactgatttgcaatatctccagcaaatgcctttgcaatagaagcataataggtatttcgacgaccagaatcaacctcccaagctgctctctggtaactcattctagctagttcaactttcattgccatttcagccagcataaatgatattgcttggtgctctacaagtagctttccgaaagttttcctttccagggcatacttggtagcttcatccaaagctctttgtgctaatccaacagcaccagcagctactacaggtctggttttatcaaaagctcccattgcaactttgaaaccagctccgtcaccaattaaaacattttctttaggcactttcacatcttcgaagacattcctctagtatctgaacatcgctggcccatgtttaattcctttctcccactctgattcctggggtactctgctcggcgacg

SEQ ID NO: 72578 - DNA, 1327 bp, Homo Sapiens
ccctgggacaagcccctgtgccaaccccccaggggccccccttccgggcattatatgagcgggcccagcacaacctgcaggcaagcttcagagggtgaaagcagaacttcagagagcgagcgcccgcagcccccagcagggaggatgaccgggacgagcgcgagtcccgcgcggagatccagaacgccgaggactacaacgagatcttccagcccaagaacagcatcagtcggacgccaccccggagaagtgagcccttccctgcaccccccagaggacgacgcagccacagcaaaggaggcagcaaagcccagcccctgccatggatgtgcagttccccggtgccaaatctggaggtcctgccccggccccccagtggttgcttccacacctgcacccaaggctgagcctgccatcatcccctgccacccggaacgagcccatcgggctgaaggcctccgacttcctgcccgccgtgaagatcccccagcaggccgagctggtggacgaggatgccatgtcacagatccgcaaaggccacgacaccatgtgtgtggtgctcaccagccgccacaagaacctggacactgtgcgggctgtgtggaccatgggcgacatcaagacgtcggtggactccgctgtggccatcaacgacctgtcggtggtggtggacctcctgaacatcgtcaaccagaaagcctccctgtggaagctggacctgtgcaccaccgtcctgccacagattgagaagcttctgcagagcaagtatgagagctacgtccagacgggctgcacctccctgaagctgatcctgcagcggtttctgcccctcatcacagacatgctggcggccccaccctctgtgggtgtggatatcagcagggaggagaggctgcataagtgccggctctgctacaagcagcttaagagcatcagcggcctggtcaagagcaagtcaggcctgagcggccgccatggcagtaccttccgcgagctgcacctgctcatggccagtctggactgaggaaagcagtgggcaggggcgctcggcagcccacagggcctggcctcagcccccactcctgttccttgtgcacccactggcccatgagcctctgcctggcccctgctgctgtcctgtggccgtcctggaggaggtgatgctggtccctggccacctctacagccctgaactcttgagacaactctctccagcaatagctgcccagctttgcccaactgttgcttcttggggcagcgaactgagccctggggctgctgctgtaatttataaggcaaattttattaaatttgtaactattcccag

SEQ ID NO: 72579 - DNA, 674 bp, Homo Sapiens
  misc_feature (37)..(37): n is a, c, g, or t
cagtgggtgctcccacacctgcaccaaaggctgagcntgccatcatccatgccacccggaacgagcccatcgggctgaaggcctccgacttcatgcccgccgtgaagatcccccagcaggccgaagctggtggacgaggatgccatgtcacagatccgcaaaggccacgacaccatgtgtgtggtgctcaccagccgccacaagaacctggacactgtgcgggctgtgtggaccatgggcgacatcaagacgtcggtggactccgctgtggccatcaacgacctgtcggtggtggtggacctcctgaacatcgtcaaccagaaagcgtaagtggctgcagagggggagtgggcggaggggcagggctgggctgatggcagcatgtcctggcctctcctagctccctgtggaagctggacctgtgcaccaccgtcctgccacagattgagaagcttctgcagagcaagtatgagagctacgtccagacgggctgcacctccctgaagctgatcctgcagcggtttctgcccctcatcacagacatgctggcggccccaccctctgtgggtgtggatatcagcagggaggagaggctgcataagtgccggctctgctacaagcagcttaagagcatcagcggcctggtcaagagcaagtcaggcctgagcggccgc

SEQ ID NO: 72580 - DNA, 1010 bp, Homo Sapiens
  misc_feature (142)..(645): n is a, c, g, or t
  misc_feature (676)..(693): n is a, c, g, or t
  misc_feature (757)..(797): n is a, c, g, or t
  misc_feature (935)..(945): n is a, c, g, or t
gacgagcactaccggaatggatcctcgctgagtatggaagcccaccttcccgaggagaaagcgacagttccgtaagcgcaggtcgaacagaggccacgaggagctccagggaaacgctgttcttatagcctgtcggttcccnnnnnnnnnnnnnnnnnnnnnnnnnnnnnnnnnnnnnnnnnnnnnnnnnnnnnnnnnnnnnnnnnnnnnnnnnnnnnnnnnnnnnnnnnnnnnnnnnnnnnnnnnnnnnnnnnnnnnnnnnnnnnnnnnnnnnnnnnnnnnnnnnnnnnnnnnnnnnnnnnnnnnnnnnnnnnnnnnnnnnnnnnnnnnnnnnnnnnnnnnnnnnnnnnnnnnnnnnnnnnnnnnnnnnnnnnnnnnnnnnnnnnnnnnnnnnnnnnnnnnnnnnnnnnnnnnnnnnnnnnnnnnnnnnnnnnnnnnnnnnnnnnnnnnnnnnnnnnnnnnnnnnnnnnnnnnnnnnnnnnnnnnnnnnnnnnnnnnnnnnnnnnnnnnnnnnnnnnnnnnnnnnnnnnnnnnnnnnnnnnnnnnnnnnnnnnnnnnnnnnnnnnnnnnnnnnnnnnnnnnnnnnnnnnnnnnnnnnnnnnnnnnnnnnnnnnnnnnnnnnnnnnnnnnnnnnnnnnnnnnnnnaagaattcggcacgaggcgcggctgtaggcnnnnnnnnnnnnnnnnnngtggggtctcctcctcccctatgatgggcggctactggaggaggctgtgaggaagaaggggtcnnnnnnnnnnnnnnnnnnnnnnnnnnnnnnnnnnnnnnnnncctactacccgcccgcgccgcccccgtactcggagaccgactcgcaggcgtcccgagagcgcaggctcaagaagaacttggccctgagtcgggaaagtttagtcgtctgatctgacgttttctacgtagcttttgtannnnnnnnnnnaatttgaaggaacactgatgaagccctgccatacccctcccgagtctaataaaacgtataatcac

SEQ ID NO: 72581 - DNA, 1340 bp, Homo Sapiens
  misc_feature (239)..(291): n is a, c, g, or t
  misc_feature (551)..(575): n is a, c, g, or t
  misc_feature (647)..(656): n is a, c, g, or t
  misc_feature (735)..(747): n is a, c, g, or t
tgctgtgtgattggtaagcaatacaatagtaaacatgtccccattacttttttctaatattggaccaatgctgtcctaattgtacatttccccttatggtgacgatgctctgactcgtttaggtagacacattgaccaccttccattccattaaatattttttcctttttcccctttctgtgtcattcttgaggaaaaaacaaaagagagaggggatgccaatgatccccttgagcagnnnnnnnnnnnnnnnnnnnnnnnnnnnnnnnnnnnnnnnnnnnnnnnnnnnnntttggagtattttcttactgtagagaagcactgtacattactaagagacctgggtataagatactcacatgtggagctggaaaaatcgcatgtccaagcccgtttgagtggtttcttttgtttttcattgcagggagtgggtgggagggaggtgggactaggggcactttgggggtctccttttagtcaaaagcgagaaaatgacaagaaagagattaaaattcaatgtttcctttatagtgttaaacactaaaattttnnnnnnnnnnnnnnnnnnnnnnnnncttgtaaaatgcgagaacagaagcaaaagacactacgctctgtcattttatctttcttttgttgaaagactnnnnnnnnnnctgaaatgttttttagacaatcaaatgttaggtaagtgcaaaaacttgttttttcttactggtgtagaaattaatgccnnnnnnnnnnnnncagttattttataataacgaaataaaaagaaccccccagctgccaggcgggttttggtgtttgaaatgcggggcaaagcactacatcactgcaaatagatacagagttagtctgcatgtctgtaggctgtgtgattgcggaaaatataaatgctgctaatatatttcctttttacaaaagcatatctaaatagatgattgttttgatgttaatctttgtaaattatgtattaccaattttaacattggatgtaattgcatacaaagcttgcatctcaatccttgaaagtctagtattaaatggaaaaaacttttcctaaataaaaaacaaatagcacacagagccatgctactgatcaccaagacgaacgtagcaagtacgcacatagaaaaagcaggcggcggccaataatactccgcgcggcgccaagcatttacgatccacccctttttgtaaaaggggccccagtgggggctctataaacagacgcgcgccgccaaaaacctggaggacaagcgccgtggttttggaggaccatccgtgggtcaacgcgaccccagcgattggccgggaaaactcggtttgctaaccca

SEQ ID NO: 72582 - DNA, 2169 bp, Homo Sapiens
  misc_feature (959)..(991): n is a, c, g, or t
  misc_feature (1843)..(1900): n is a, c, g, or t
gcagtactacaacggtcttaaggtagcgaggcctgggtggcgaattcggcacgaggccaaagactcaagtcttttcatatttatttcccatcctgcgtggctttccctgaactgttccgtggctgtgccctctgctccccaaacccaggttcccacagccttgggccctaggtaccccagctgatcagtgccaggagagaccagagcctctggaggctacccagggactacaccaagtccttgcctgtgccgggcgagccctgtgtgagtgaggctgtgaactgagcgtgaggcctcccaggtgggggaactgcttgggccttgctgagccaggtcctcagggtgaagcaggactgaggagtggccagctctggatagctggctgtggagaggaagcctccatgggctgctttggtctgtgggctccttcattcccttggtgataatttccctttattctgtgggatttttggtggggttttccccccttttttatggagtcggccaataggattgagttggggctccagtagagaaggcagggttggtggtgggtggagggcaacctgtatcagacaaaggtaaatcagccagccaggcaaccaaaagactcagctcctgtgcagttcctgggcagcacagtggaagtgggagcctggtccttcccctgcccatggagagctctttaagggatcccagcctgcccctccacttctctcccaagccaggtcccggcatgggtgggttatgctcatgctggcaatacttgaaacgggtttattaatgctgggtattttgcacaattttatagacctcttttctacatagtcttttttaaatggaaggagaaaatgtcagccacattactgtctgtgtagtgccaggtgaagggttatcagaaggctggttggttttaataagtttattccaagagaccttctggctggaatgagtgagannnnnnnnnnnnnnnnnnnnnnnnnnnnnnnnnccctgtatgaatgtggctggctcccatatcccctgggctgccccctgccccatcccctttgagtatcagaagcactctgagccaaggggacagggggcacgtgcactggtcacgagaaaaccctgggctcccactggggctcagcccagcctcctatctttccttcttctatggacttcagacagccagtgtctggggactctgccactctacccccagccctacccaccagcccccaggtgaggcttccagctgggacctgcccagacaggctgagcctgggcgtggtgggtggggtgatggctctggggagcggctgccatcctacaagccacaccccctcctctgagctctgaatatgggacccagtgccaggagctggaagacaaggtgtttctgccaaacggggacctccatccagagaaaaggaagaaggtgcagggtgggccaagaggcaagtgaaggttggcctgagtctgggccggaaactcagaggatgtttctcctctgctgggagctgtagtttcttatcaaaatagatattgttccaccatccccctccttggcccttcaagtgggctgaagcccttggaaagtgacataggaagtccccagatcttgcccttctcactccagaggctagtggtcacagacagctgggaatggcagccacagagggtcccctctgggagaaacagcttcaccccagcctcagggccctgggccatcactgcagtggccctgggaggtgaggaagaagctggctagaggagggggctcccacctaccttttatttaagccagtattctttgttcctgcttgtaataaaacttcagtttataggaacacgnnnnnnnnnnnnnnnnnnnnnnnnnnnnnnnnnnnnnnnnnnnnnnnnnnnnnnnnnnttgcccgacccctccttgtaggcccgcccacctcacccgcccacccttctcgctgtggcgccccccctccgatcccagcacccctcccctcttggctttctgcgctgaatgcctcccgggccacgcacaggaagacatgttgttgacccaccttcttttctaaccactgcccgcgcacacccaatccagtccaaaatggggccggtaccacgccgtggagctcccatccccccccgtctctcccccatctgcgtgaccagccacgcccg

SEQ ID NO: 72583 - DNA, 1592 bp, Homo Sapiens
ggtgtaaatggagggcggctccacccgttaggagcagggctggatctgtgacccctgccatctggccagagtcgtgaagatcggctcactggaggtggtactatgagcatgtgaaagcccgcttcaagaggttcggaagtgccaaggtcatccggtccctccacgggcggctgcagggtggagctgggcctgaactgatatctgaagagagaagtggagacagcgaccagacagatgaggatggagaacctggctcagaggcccaggcccaggcccagccctttggcagcaaatccctcacagatgagtcctgctcagagaaggcagcccctcacaaggctgagggcctggaggaggctgatactggggcctctgggtgccactcccatccggaagagcagccgaccagcatctcaccttccagacacggcgccctggctgagctctgcccgcctggaggctcccacaggatggccctggggactgctgctgcactcgggtcgaatgtcatcaggaatgagcagctgcccctgcagtacttggccgatgtggacacctctgatgaggaaagcatccgggctcacgtgatggcctcccaccattccaagcggagaggccgggcgtcttctgagagtcagggtctaggtgctggagcgcgcacggaggccgatgtagaggaggaggccctgaggaggaagctggaggagctgaccagcaacgtcagtgaccaggagacctcgtccgaggaggaggaacccagaggacgaaaaggcagagccggagggacagagtggcagtgacggcctcaaagtccagcaggcagagagcgaggtttcagacattgaatccaggattgcagccctgagggccgcagggctcacggtgaagccctcgggaaagccccggaggaagtcaaacctcccgatatttctccctcgagtggctgggaaacttggcaagagaccagaggacccaaatgcagacccttcaagtgaggccaaggcaatggctgtgccctatcttctgagaagaaagttcagtaattccctgaaaagtcaaggtaaagatgatgattcttttgatcggaaatcagtgtaccgaggctcgctgacacagagaaaccccaacgcgaggaaaggaatggccagccacaccttcgcgaaacctgtggtggcccaccagtcctaacgggacaggacagagagacagagcagccctgcactgttttccctccaccacagccatcctgtccctcattggctctgtgctttccactatacacagtcaccgtcccaatgagaaacaagaaggagcaccctccacatggactcccacctgcaagtggacagcgacattcagtcctgcactgctcacctgggtttactgatgactcctggctgccccaccatcctctctgatctgtgagaaacagctaagctgctgtgacttccctttaggacaatgttgtgtaaatctttgaaggacacaccgaagacctttatactgtgatcttttacccctttcactcttggctttcttatgttgctttcatgaatggaatggaaaaaagatgactcagttaaggcaaaaaa

SEQ ID NO: 72584 - DNA, 1473 bp, Homo Sapiens
  misc_feature (1303)..(1303): n is a, c, g, or t
  misc_feature (1308)..(1309): n is a, c, g, or t
  misc_feature (1355)..(1355): n is a, c, g, or t
  misc_feature (1362)..(1362): n is a, c, g, or t
  misc_feature (1440)..(1441): n is a, c, g, or t
cgctcccggagctgggcggagcggggcgcagcccacgtggttcgggcgggaggcgccgggacgtggccagttgcccgcctgccccggagagccaggcgctaaccagccgctctgcgccccgcgccctgcttgcccccattatccagccttgccccggcgccctgacctgacgccctggcctgacgccctgcttcgtcgcctcctttctctcccaggtgctggaccagggactgagctgtcccccggagagggtccggtgtgaccccgacaagaagcagaaatggggaagaaactggatctttccaagctcactgatgaagaggcccagcatgtcttggaagttgttcaacgagattttgacctccgaaggaaagaagaggaacggctagaggcgttgaagggcaagattaagaaggaaagctccaagagggagctgctttccgacactgcccatctgaacgagacccactgcgcccgctgcctgcagccctaccagctgcttgtgaatagcaaaaggcagtgcctggaatgtggcctcttcacctgcaaaagctgtggccgcgtccacccggaggagcagggctggatctgtgacccctgccatctggccagagtcgtgaagatcggctcactggagtggtactatgagcatgtgaaagcccgcttcaagaggttcggaagtgccaaggtcatccggtccctccacgggcggctgcagggtggagctgggcctgaactgatatctgaagagagaagtggagacagcgaccagacagatgaggatggagaacctggctcagaggcccaggcccaggcccagccctttggcagcaaaaaaaagcgcctcctctccgtccacgacttcgacttcgagggagactcagatgactccactcagcctcaaggtcactccctgcacctgtcctcagtccctgaggccagggacagcccacagtccctcacagatgagtcctgctcagagaaggcagcccctcacaaggctgagggcctggaggaggctgatactggggcctctgggtgccactcccatccggaagagcagccgaccagcatctcaccttccagacacggcgccctggctgagctctgcccgcctggaggctcccacaggatggccctggggattgctgctgcactcgggtcgaatgtcatcaggaatgagcagctgcccctgcagtacttggccgatgtggacacctctgatgaggaaagcatccgggctcacgtgatggcctcccaccattccaagcggagaggccgggcgtcttctgagagtcagggntctanngtgctggagtgcgcacggaggccgatgtaaaaggaggaggccctgnaggaggnaacctggaggagctgaccagcaacgtcagtgaccaggaagactccgtccccaagaaggaaggaggccaagggacgaannagggcagaagcccaacaaggggaccaaatcca

SEQ ID NO: 72585 - DNA, 868 bp, Homo Sapiens
  misc_feature (65)..(65): n is a, c, g, or t
agcttagcctgtttctcacaggatcagagagggatggtgggcagcccaggagtcatcagtaaacnccaggtgagcagtgcaggactgaatgtcgctgtccacttgcaggtgggagtccatgtgaggggtgctctttcttgtctctcattgggacggtgactgtgtacagtggaaagcacagagccaatgagggacaggatggctgtgggggagggaaaacagtgcagggctgctctgtctctctgtcctgtcccgttaggactggtgggccaccacaggtttcgcgaaggtgtggctggccattcctttcctcgcgttggggtttctctgtgtcagcgagcctcggtacactgatttccgatcaaaagaatcatcatctttaccttgacttttcagggaattactgaactttcttctcagaagatagggcacagccattgccttggcctcacttgaagggtctgcatttgggtcctctggtctcttgccaagtttcccagccactcgagggagaaatatctggagggcaaagaagagacttatgttattgttgaacctccagccacagggaggagcatgggcatgggtcagctggatgtaaggatggatgctctctatacatgctgggttggggatgctgggactgcacagccacccccagtatgccgctccaggactctgggactagggcgccaaagtgtgcaaatgaaaatacaggatacccagggaactttgaatttcagattgtgaaaagaaaacaaatcttgagactctacaatcaccaagctaaaggaaaaagtcaagctgggaactgcttagggcaaagctgcctcccattctattcacagtcaccccccacggcatagtg

SEQ ID NO: 72586 - DNA, 1022 bp, Homo Sapiens
  misc_feature (24)..(24): n is a, c, g, or t
  misc_feature (35)..(35): n is a, c, g, or t
  misc_feature (55)..(55): n is a, c, g, or t
  misc_feature (68)..(68): n is a, c, g, or t
  misc_feature (87)..(87): n is a, c, g, or t
  misc_feature (90)..(90): n is a, c, g, or t
  misc_feature (135)..(136): n is a, c, g, or t
  misc_feature (139)..(139): n is a, c, g, or t
  misc_feature (147)..(147): n is a, c, g, or t
  misc_feature (154)..(154): n is a, c, g, or t
  misc_feature (182)..(183): n is a, c, g, or t
  misc_feature (228)..(229): n is a, c, g, or t
  misc_feature (249)..(249): n is a, c, g, or t
  misc_feature (266)..(266): n is a, c, g, or t
  misc_feature (299)..(299): n is a, c, g, or t
  misc_feature (373)..(373): n is a, c, g, or t
tatcacatctgaatgttaaattgntagtgattttntactgtcagaatatattgtntatgtgcagaaanaatatgtgtgtatgtgtgnaanatatgcacacacacacagatatgctcccagtgatgtgaaactctnnttncctgtgcnactgatngacagacttgtgctgatccattatactnntagggcttgattctcttggggagtgactggctaagcttcagtgtnnaactgtgtcacgggagcaanaacattaaccagctgcncaggggttcaagcttgagcctttaggtgatctnttaactatggtagtaaaataagcctcactcaaacatagctgacttcctattggtacagcttgaaaagcactttntactacatacacattttatgcttaaaaagttaacatgatacgaaactgtgattagaaaatatctggtctggatgtgattagtaaggatacaagataatgttctaagactgcctaatgctttttgtttgattttcatctgccaggcgttgttatgtgctatgagggtagcaagtacgtctttgtcttaatgatctaaggctggtgtagaaacaaagggcctaatgagaaccaatcatcatggaagtcagttgcgggggcagcccataaggaaagggaaagtgagtggggttgggcataggctgagtgaggtggcctgaatgacacctcttagaggactgtgaagtacaggcacagcccgactgcagggagggatgcacccatcatttacccatgggagcatctgtaggaccatctctctcccacttcttctcccctcccccaccgcatctggccagatggactgtcctacagcaatcgtttccatctgtcaccctcttccctctcctttcataccagtcactatcttgggtaacaaatttatacaggacagtggtacagaaatacatctttgctctgagaatacagcaaatattaacttaaattattataactgaacaaataataaaacctgaattttaatatcttcaaa

SEQ ID NO: 72587 - DNA, 1275 bp, Homo Sapiens
  misc_feature (931)..(941): n is a, c, g, or t
  misc_feature (1057)..(1081): n is a, c, g, or t
ataccacacaccctctgactccaaggaaattactcttactgttacttcaaaggaccctgaaagacctcctgttcatgaccaacttcaggacccacgactgctgaagaggatgggcattgaggtcaaaggaggaatattcctttgggatccacaaccctcgagcccccagcatcctggagcaacacctcctacgggcgagccgggcttccctgtcgttcaccaggacctgagccatatacagcagcccgctgctgtagtggctgctctgagcagccacaaacctcccgtgcggggcgaacctccagctgccagtcccgaggcttccacgtgtcagagcaaatgtgatgacccggaagaggagctctgtcacaggagagaggccagggctttcagtgaaggggagcaggagaagtgtggttccgagacccatcacaccaggaggaactctaggtgggacaagaggacactggagcaggaggacagcagttccaagaaaagaaagcttttataggaaagcccagtgacatgggccagcagccacagcatattgtaaactgaagatgaccagctcgtgggaccatctagataagcttgttttttgtaaggagtttgtgtgctgttggaaaacatggaaaatgcatccttaacacctgagcctctggtcatcttcagtattttctgtcatttgcaaaagctttcagagggcattgtgtatccgtaataatgtccttgaagtcagagactggaaatgttgatctcttagtcttctatagacaaggaggtcagactggagtgaatgttgtaaaagttgaaatgtatatttgtatagcaaataacaaaatccttttaaaatttaatctagtagaccgcttttctttccccctgtttaaaatgttaatcagttttcaacagaacaaactttatattaccnnnnnnnnnnntgggaggagggcgggtcctttcaaccattgttagagcaagacagataattatttaacagcctagcttggaataagctgagttagtgctggtgggtcaggtgtctctggctctattnnnnnnnnnnnnnnnnnnnnnnnnncctggagtctcctaggggacctttgggcagcacggttatgttaggtaaagtcttgctgacagggtgcatttttagaaaaaagtgcctttggcccaggggaattaaattttctggggatgaagttcctttaccctggttttcaagtatgcacacttagttccccctaccctaaaaatttcccaaaacttttctct

SEQ ID NO: 72588 - DNA, 1162 bp, Homo Sapiens
gctataggacatatagaacagtgttcaaaaaagcaggctggtacggccggaattcccgggatatcgtcgacccacgcgtcgaccgactcctttccaggtgaagggtgacttggctgaagaaacacttaaattctggaaatagcgactcagtatcatggccagcagccttaatgaagatccagaaggaagcagaatcacttatgtgaaaggagacctttttgcatgcccgaaaacagactctttagcccactgtatcagtgaggattgtcgcatgggcgctgggatagctgtcctctttaagaagaaatttggaggggtgcaagaacttttaaatcaacaaaagaaatctggagaagtggctgttctgaagagagatgggcgatatatatattacttgattacaaagaaaagggcttcgcacaagccaacttatgaaaacttacagaagagtttagaggcaatgaagtctcattgtctgaagaatggagtcactgacctctccatgcccaggattggatgtggtcttgatcgtctgcaatgggaaaatgtatctgcgatgatcgaggaggtatttgaggcaacagacatcaaaattactgtgtacacactctgaaccagtgaacattttggatgtttccgtgttctcctgtgtcatctctactgggccataggaccgggcaaacctaccttaaaataggcagaggaaagtttcatgagaagtagtgtgtttaacaagacagactttggttgctgtattcaagtatttggattatgactgtggaggagggcttgcttaagatatgtggttgtgtttttttgtggaaaagtaaggagttaggtggcttgataataggcagggaaaccagattgtcgggactatgacctttttctccagtatgctacctgatttgtttggctggccactaggtggcagcattggttctacttctctgctttttaagagaaatttcaggaaggatgatcattccagttagtttggcattttttgtcgtttgtgcacataacttggtgttatccttatgtcatcagattcctcctaggggagagtttttgttttaattacaaaattaaattctacattgttaccaagaaatttgtggtgataaaaatggaaaaataaaaatttggggagttagtaaaa

SEQ ID NO: 72589 - DNA, 1939 bp, Homo Sapiens
  misc_feature (1650)..(1699): n is a, c, g, or t
  misc_feature (1708)..(1747): n is a, c, g, or t
taacggtcctaaggtagcgaggcctgggtggcgaattcggcacgaggcgcagggggagctggtcgccgccgcggccgcctggaattgtgggagttgtgtctgccactcggctgccggaggccgaaggtccctgactatggctccccagagcctgccttcatctaggatggctcctctgggcatgctgcttgggctgctgatggccgcctgcttcaccttctgcctcagtcatcagaacctgaaggagtttgccctgaccaacccagagaagagcagcaccaaagaaacggagagaaaagaaaccaaagccgaggaggagctggatgccgaagtcctggaggtgttccacccgacgcatgagtggcaggcccttcagccagggcaggctgtccctgcaggatcccacgtacggctgaatcttcagactggggaaagagaggcaaaactccaatatgaggacaagttccgaaataatttgaaaggcaaaaggctggatatcaacaccaacacctacacatctcaggatctcaagagtgcactggcaaaattcaaggagggggcagagatggagagttcaaaggaagacaaggcaaggcaggctgaggtaaagcggctcttccgccccattgaggaactgaagaaagactttgatgagctgaatgttgtcattgagactgacatgcagatcatggtacggctgatcaacaagttcaatagttccagctccagtttggaagagaagattgctgcgctctttgatcttgaatattatgtccatcagatggacaatgcgcaggacctgctttcctttggtggtcttcaagtggtgatcaatgggctgaacagcacagagcccctcgtgaaggagtatgctgcgtttgtgctgggcgctgccttttccagcaaccccaaggtccaggtggaggccatcgaagggggagccctgcagaagctgctggtcatcctggccacggagcagccgctcactgcaaagaagaaggtcctgtttgcactgtgctccctgctgcgccacttcccctatgcccagcggcagttcctgaagctcggggggctgcaggtcctgaggaccctggtgcaggagaagggcacggaggtgctcgccgtgcgcgtggtcacactgctctacgacctggtcacggagaagatgttcgccgaggaggaggctgagctgacccaggagatgtccccagagaagctgcagcagtatcgccaggtacacctcctgccaggcctgtgggaacagggctggtgcgagatcacggcccacctcctggcgctgcccgagcatgatgcccgtgagaaggtgctgcagacactgggcgtcctcctgaccacctgccgggaccgctaccgtcaggacccccagctcggcaggacactggccagcctgcaggctgagtaccaggtgctggccagcctggagctgcaggatggtgaggacgagggctacttccaggagctgctgggctctgtcaacagcttgctgaaggagctgagatgaggccccacaccaggactggactgggatgccgctagtgaggctgaggggtgccagcgtgggtgggcttctcaggcaggaggacatcttggcagtgctggcttggccattaaatggaaacctgaaggccnnnnnnnnnnnnnnnnnnnnnnnnnnnnnnnnnnnnnnnnnnnnnnnnnnctcgaggcnnnnnnnnnnnnnnnnnnnnnnnnnnnnnnnnnnnnnnnncatggtcatagctgttttcctgaccccagctttcttgtacaaaagtggtaagatctggccgggcctcccctaatagtgaggccgtaattaattttccaaaaagcccagggttaaaccctggcatttaatggaatccgggctggcaggtaccccggggaaattttaaccccggccctaaatggagccgggggc

SEQ ID NO: 72590 - DNA, 1700 bp, Homo Sapiens
  misc_feature (1607)..(1640): n is a, c, g, or t
ttaaggctaggtacgaggcctggtggtagaatcggcaccgaggtgctgcactacaaggcgggcacctcctacctgggcaaggaacactggaagacgtgcttcgtggtgctcagcaacgggatcctctaccagtacccggaccgcaccgacgtcatccctctgctctcggtgaacatggggggggagcagtgcggtggctgccggagagccaacaccacggatcggccccacgccttccaggtcattctctccgaccggccctgcctggagctaagtgccgagagcgaggccgagatggccgagtggatgcagcatctctgccaggctgtgtccaaaggggtcatcccccagggcgtagctcccagcccctgcataccctgctgcctggtcctcacggatgaccgcctctttacgtgccatgaggattgccagaccagcttcttccgctctttgggcacagccaagctgggcgacatcagcgccgtctccaccgagccgggcaaggagtactgcgtcttggagttctcccaggacagccagcagctcctcccgccctgggtcatctacctgagctgcacttctgaactggaccgattgctgtctgcactgaactctgggtggaaaaccatctatcaggtggacctcccccacacggcgatccaggaagcctccaacaagaagaaattcgaggatgccttgagcctcatccacagcgcctggcagcggagcgacagtctctgccgcggccgagcctcccgagacccctggtgctgaggcagagctggttggcgtccctggtgggcaggaaaggaaggcacgccagccggcaggcacactgtcacggctgttgtcatgctgtcgggagcctacagtccacccctgccctgggcggcagaaccaccgagtgtggcttaagacaggtccctccactccagggatccagatcaggtgcccggcacccctgggcatcctgcccgacaggtagcgaatggaggtcgctgggggcagagggtccgagccctgtgggctctgcggatgcacgccctcctcccgggcctccgcctcagtctgcagaatttctgccgagtggcaccgagaacaccatccatctaaggacgaacaaaagaaccaggagggcgggacccccctcttcctctcctgggttgggggctggggccctgagtgcccagccatccttgttcgtgtttgaacactctcctggccacgtggggaagcgggaacacggggtgtctgcgcatgtttcctcctcctagctccatcactgcgcacacagctgcctgcctcgccagatgcaggggggcgggcagccctccctggctgccaggaggctctgcatgcccacagtcctgccctgcctgtcccctcaacccggcagtgcctgtagcaccgaggagcaaagggggtggatggggggcttggagaagggcggagcccaccagcctggcatccatgttgacatcttctgactgtcccctgcttggctggagccaggcccttccctagagtttcgtcaagagcctcctggggaaggggtcaggtggtttgggttttgttttttaaaataaaatagacatgttatattgccnnnnnnnnnnnnnnnnnnnnnnnnnnnnnnnnnngaccgcgtatgcggccgcaagcttattccctttagttgagggttaattttagcttggcac

SEQ ID NO: 72591 - DNA, 681 bp, Homo Sapiens
  misc_feature (44)..(44): n is a, c, g, or t
gctgagaaatggagagctcttttcccctgtacttctctggggtntgccttgtggaaccaagtgcttgggggaggagctcctggcaggactccagctgttatttgtcagaggacagctaggattggttcacccttgctctgagttggccccaaagcgagctatgctgaactcttctccatctccaagcagacaacctttgtctttacatgcaagagggatccaattatgacaggctgacccagctggtttcatgtttggggtttatctactgagtaaggctgaccttacctgagtttctgtatgtgtatttgcaagacagttaatactaatccatcatccctcacagagatgtagaggatgagatgtagtaacttatagcagtgtcatttggaaaagttgaatttgccctacaaggcatgttctccattcaagggtcttgtgtaaacgtttgcagacacaggtgcagctttggagaactcacctctggctcttgtgcttttatgttgggacagctgcctaaattaggagctctagacctgttattggttcccaactgttggccagaatgaattcttcgaaaaatataggtggtttccagggaatttgaatgattgtattttgtgtccatggaacgtttatagacatggaggcaggcaataaattcctcccaataattttttt

SEQ ID NO: 72592 - DNA, 1110 bp, Homo Sapiens
  misc_feature (1051)..(1068): n is a, c, g, or t
ggggccaggacacccagtgagcccatacttgctctttttgtcttcttcagactgcgccatggggctcagcgacggggaatggcagttggtgctgaacgtctgggggaaggtggaggctgacatcccaggccatgggcaggaagtcctcatcaggctctttaagggtcacccagagactctggagaagtttgacaagttcaagcacctgaagtcagaggacgagatgaaggcgtctgaggacttaaagaagcatggtgccaccgtgctcaccgccctgggtggcatccttaagaagaaggggcatcatgaggcagagattaagcccctggcacagtcgcatgccaccaagcacaagatccccgtgaagtacctggagttcatctcggaatgcatcatccaggttctgcagagcaagcatcccggggactttggtgctgatgcccagggggccatgaacaaggccctggagctgttccggaaggacatggcctccaactacaaggagctgggcttccagggctaggcccctgccgctcccacccccacccatctgggccccgggttcaagagagagcggggtctgatctcgtgtagccatatagagtttgcttctgagtgtctgctttgtttagtagaggtgggcaggaggagctgaggggctggggctggggtgttgaagttggctttgcatgcccagcgatgcgcctccctgtgggatgtcatcaccctgggaaccgggagtggcccttggctcactgtgttctgcatggtttggatctgaattaattgtcctttcttctaaatcccaaccgaacttcttccaacctccaaactggctgtaaccccaaatccaagccattaactacacctgacagtagcaattgtctgattaatcactggccccttgaagacagcagaatgtccctttgcaatgaggaggagatctgggctgggcgggccagctggggaagcatttgactatctggaacttgtgtgtgcctcctcaggtatggcagtgactcacctggttttaataaaacaacctgcaacnnnnnnnnnnnnnnnnnngcctacagccgcggccgcaagcttattccctattagtgaggg

SEQ ID NO: 72593 - DNA, 925 bp, Homo Sapiens
  misc_feature (798)..(873): n is a, c, g, or t
tgaagaaacaggggtgggtgtgaagtactattttcccagggtggcttcaatctccccacctaggatgtcagccctgtccaaggaccttccctcttctccccagttcctgggcaatcacttcaccttggacaaaggatcagcacagctggcctccagatccacatcaccactcttccactcgattgttcccagatcctccctgcctggcctgctcagaggttccctgttggtaacctggctttatcaaattctcatccctttcccacacccacttctctcctatcaccttcccccaagattacctgaacagggtccatggccactcaacctgtcagcttgcaccatccccacctgccacctacagtcaggccacatgcctggtcactgaatcatgcaaaactggcctcagtccctaaaaatgatgtggaaaggaaagcccaggatctgacaatgagccctggtggatttgtggggaaaaaatacacagcactccccacctttctttcgttcatctccagggccccacctcagatcaaagcagctctggatgagatgggacctgcagctctccctccacaaggtgactcttagcaacctcatttcgacagtggtttgtagcgtggtgcaccagggccttgttgaacagatccacactgctctaataaagttcccatccttaatgactcacttgtcaactagtggactaattaaccctcccccaaaaaaacacaaagtgcttctgtgagaccaattttgtgctaatgagcattgagactgatgctttgtaagtcacccccnnnnnnnnnnnnnnnnnnnnnnnnnnnnnnnnnnnnnnnnnnnnnnnnnnnnnnnnnnnnnnnnnnnnnnnnnnnnccttgcctttgagagtttatggtctggataatataaataaccaagtaagcat

SEQ ID NO: 72594 - DNA, 1221 bp, Homo Sapiens
  misc_feature (672)..(718): n is a, c, g, or t
ggcttcccaccccactgaacttacccaattcctgctttcagtcttaagttttcccattctagacccctaccctctaggctgtgctgctcctggacttcatgcctctccattctcattgcctacaatctctgtgccccagaaccccctccacttcccaccccagccctccagacatgcacttaccttgactttaccccacatgtttggggcacctggggctccctcaccccttgggtggtttgcaatctgaagacttctccagccacacaggcacatgcacaggcacggtgctgtctgcatattgccaggtggggagagaagccaggacccctcagctgtctgccaccatctatgtgcctcccttaccccccagctttctttctacagatggtgctactcttggtctcccacaggaaaaggcctccccccttcttagccccatttaccccgtttgtggaaggcactgctcgctctgttttgtcagagagtggcctatccagattggtgctatgggggggtctgacccctccctcctccctctggaggtgatgtgggccctcaatggagggaattgtgctgggctagggaaaggggagggactagactggccacactggctctgaaactcaccaatctctatacaccataaagacctcaccttggataggccannnnnnnnnnnnnnnnnnnnnnnnnnnnnnnnnnnnnnnnnnnnnnngagggggcgcgcgccgcgaccaaagatatatcccgcccgacgagggcccccaaacctcaaacgcgacaccaccaggctcttccgcacaacaaggggcgccccccaataagcgtgaccaccgacttctaacaacggcaaggaccctgcggcccgacgctattccaccacacctcgcgcaaaccgcggaacaacgcggcgacccgctggaaacaaccctcggaaaacagagaccctaacacccaggaggaggagtgacacaccatcatggcgcgcccaacccactcccccccacacagcgccttctcacaaggcccccacagagccgacacccctcagcaacaacatacacgcgacggatcacacgcgccggtccaaacaccgacgccgcgcccaatgcaccacagcgcgcaacgtgcacaaaacagctgaccgcaccaccgaaggaacacagcagccaccacgcaccaccaactttcacaccccggggaccccgacggcgccca

SEQ ID NO: 72595 - DNA, 1196 bp, Homo Sapiens
cagtactataacggtttaaggtagcgaggcctgggtggcgaattcggcacgaggccgccggaggcttttcttcccggagactgaggtgggcggctcagcgttggccccacacattcgaggctcacaggtgattgtcgctcacacagttagggtcgtcagttggtctgaaactgcatttggcccactcctccatcctccctgtccgtcgtagctgccacccccagaggcggcgcttcttcccgtgttcaggcggctccccccgccccgtacacgactcccagaatctgaggcagagagtgctccaggctcgcgaggtgctttctgacttccccccaaatcctgccgctgccgcgcagcatgtcccgtgtggcgtttgaggaaatgctgagggacagacaccttggagcaccagctccggtccctgttacagtgagaaaggtcccccacttcgggggatacttgcacttagccacatggtcctgcctcccttggagtccagttccaggctcccttactgagtgggtgagacaagttcacaaaaaccgtaaaactgagaggaggaccatgggcaggggagctgaagttcatcccctaagtctaccacccccagcacccagagaacccactttatccctagtcccccattcaccccatcccaggaggggaagcacaggccgggcctccggtggagattgctgccactgctcggcctgctgggttcttaacctccagtgtcctcttcatcttttccacccgtagggaaaccttgagccatgtgttcaaacaagaagtggggctagagcccgagagcagcagctctaagcccacactcagaaagtggcgccctcctggttgtgcagccttttaatgtgggcagtggaggggcctctgtttcaggttatcctggaattcaaaacgttatgtaccaacctcatcctctttggagtctgcatcctgtgcaaccgtcttgggcaatccagatgtcgaaggatgtgaccgagagcatggtctgtggatgctaaccctaagtttgtcgtaaggaaatttctgtaagaaacctggaaagccccaacgctgtgtctcatgctgtatacttaagaggagaagaaaaagtcctatatttgtgatcaaaaagaggaaacttgaaatgtgatggtgtttataataaaagatggtaaaactacttggattcaaaa

SEQ ID NO: 72596 - DNA, 677 bp, Homo Sapiens
  misc_feature (532)..(552): n is a, c, g, or t
tcaagagcaacctgcagtggtgcatcgccgacctgggcctggctgtgatgcactcacagggcagcgattacctggacatcggcaacaacccgagagtgggcaccaagcggtacatggcacccgaggtgctgaacgagcagatccgcacggactgctttgagtcctacaagtggactgacatctggccctttggcctggtgctgtgggagattgcccgccggaccatcgtgaatggcatcgtggaggactatagaccacccttctatgatgtggtgcccaatgaccccagctttgaggacatgaagaaggtggtgtgtgtggatcagcagacccccaccatccctaaccggctggctgcagacccggtcctctcaggcctagctcagatgatgcgggagtgctggtacccaaacccctctgcccgactcaccgcgctgcggatcaagaagacactacaaaaaattagcaacagtccagagaagcctaaagtgattcaatagcccaggagcacctgattcctttctgcctgcannnnnnnnnnnnnnnnnnnnncagtggatggtgccctatctgggtagaggtagtgtgagtgtggtgtgtgctggggatgggcagctgcgcctgcctgctcggcccccagcccacccagccaaaaatacagctgggctgaaacctga

SEQ ID NO: 72597 - DNA, 555 bp, Homo Sapiens
tagaggacggggagcgatgaggggacagtcgaggggcaaggccgatctcgcttcgcgcctcccgcctttctgagttgagcctagcgcgcgggtctgagggacatccggggagctgcttgggatggccgccttggggagactcgacccgcccgccaggacccggccgcgcgccgcagttcgggcgccttcgggcaggatcgcccagcggggccgcgttctcctgcttgcggacggctgcgggcctgagggctggacagcgccatgcctcagtaccgggaactgtcccacgtaggaaggtgggaatgccgcgaacggcgtgcggaatccgacctcaaggtggaacggggtggtgaagagtgcatgctccgaggcagtttcgagttctggtgctgccacttacttgctgcctgacttcggcgcgtttgctgtttcatttttgtgactttcaactcgctcctctgtgaaatgggagtaatattagtaccttcctcattgggttgttgttatgaataaattagatgataatatagcgcttagcaaagtcccaaacttaaa

SEQ ID NO: 72598 - DNA, 1269 bp, Homo Sapiens
  misc_feature (44)..(44): n is a, c, g, or t
  misc_feature (659)..(800): n is a, c, g, or t
  misc_feature (803)..(806): n is a, c, g, or t
  misc_feature (808)..(821): n is a, c, g, or t
  misc_feature (829)..(847): n is a, c, g, or t
  misc_feature (907)..(907): n is a, c, g, or t
  misc_feature (932)..(942): n is a, c, g, or t
  misc_feature (1031)..(1039): n is a, c, g, or t
  misc_feature (1063)..(1064): n is a, c, g, or t
  misc_feature (1117)..(1210): n is a, c, g, or t
gttaacttgatgaagtcaagtatgactattatgtattgtacatntgataagacaatttttggaattgtgaattgcacaaattacatgatatcttttgcatttatgttactatattgtacttctgacaaatctttattcctgggtggtatttttaagatatctttacctataaaaaatgtttaaggttcataggactcgacaagagctatctggtgattttctcattagtaacatgcaacgttgtactgcaaaatttcaatcaacatgacaacttataatgagtggagatttcatattaggtactaaatattatagtattatttctattttctttttccaaataagaagcttggattattttattttgtggtctttatcattaactttaattctttctgtactgtgtataatatttttatattattggccttaccataaaattatttagaaaggttgtcaaaataagttatacctctttggcaatagatagatgtatacatctacctactatgatctacaattttaggttaagtgaagcttgggggggctactgacttggttaccttcttgtctcttgtcccaaagatttaaactatgtacctttgtatagctcttctgccccattttgacttctgagatgaaagtatttactaaaattnnnnnnnnnnnnnnnnnnnnnnnnnnnnnnnnnnnnnnnnnnnnnnnnnnnnnnnnnnnnnnnnnnnnnnnnnnnnnnnnnnnnnnnnnnnnnnnnnnnnnnnnnnnnnnnnnnnnnnnnnnnnnnnnnnnnnnnnnnnnnntgnnnngnnnnnnnnnnnnnnaaaaaaannnnnnnnnnnnnnnnnnngggcccgggcccccaaaaggaagggaacggggcccaacctttttccaaaaaaaaccgggncctgaagaggggggggatccccccnnnnnnnnnnncccggggggaaaccgggggttttaaaaaaatcccaaggggtttgggggggtttttcgggaaataaaaaccgggagccaaggaaagtttnnnnnnnnnttacccccgcgcctgggccgtttnnaaagagggggagaaatattaaaacctctgccccaaagtgaaaacccccccaannnnnnnnnnnnnnnnnnnnnnnnnnnnnnnnnnnnnnnnnnnnnnnnnnnnnnnnnnnnnnnnnnnnnnnnnnnnnnnnnnnnnnnnnnnnnnaaaaaaagtggccccatatttgggccccgggtgtgttatttaaaaaagtggggggaaca

SEQ ID NO: 72599 - DNA, 658 bp, Homo Sapiens
  misc_feature (98)..(98): n is a, c, g, or t
tttttctatgttgtcttctttcccacctttatctctcctcctatcttgtgggatcagttgggttttctatttaatcatatattttccctttactgatntggaatgtgaatgttacaagtccttttgattatccttaaacatctaaaaatgctaccctctttccaaacaacacaaaggtattgaaataacattaattctaattaaattccacaagttctttattaaatctccaaattggatattattagtattttatatagtcaatgtttatttttttgatgggacatggtgggggcttaccttttttcttgtgtgtcagatgttccttctaggtagaattctttataccttctgaaattatgtccttagagctgtagatttagaactgacatctcttgagctgttctaagataatatcttttactttggagatacgcagtttttattatatgtctagctatagatttatcatggatttaggttcattatgaatctgcagatttgtgtcttccatcaaatctggattgttttcaatattaaaaaaacttctattttaaaatctgtatatagaaaggtacataaacataaatgaacatgttaatgagtaattgtaacaactatgtaactgtccaagtcaagaaataaaacatatcaagta

SEQ ID NO: 72600 - DNA, 925 bp, Homo Sapiens
aaagagatgaagaaacagtatgatagtttaccttcacagcctccaaaaatggacatacaaatttgcttcagcaatgaattttctactttcacacataaaactgtatattttgattttcaagttggagaagacccacctttgtttcctagtgagaaccgagtcagtgctcttacccagatggaatctgcctgtgtttcaattcacgaagctctgaagtctgtcatcgattatcagactcatttccgtttaagagaagctcaaggccgaagccgagcagaggatctaaatacaagagtggcctattggtcagtaggagaagccctcattcttctggtggttagcatagggcaggtatttcttttgaaaagctttttctcagataaaagaaccaccacaactcgtgttggatcataactacgttttgagaattgatgcaccattgccactgtaatattgctgtcctctaattaattttaggtactgaagaacttaatattggcaacatttttaaatccttactcatacacttgttgggagggatgtacaatgcatattcccaaactgtggaaaggacacctttttttatttgtaaaggtggaaaaactttggaactcattttgggctattcatgttaaatattcaacaccaatgatctactctgttcgcagttgtttatatctactcttcgcacactaaactttggtattttgattccttttaaccatttaagactacttttcttataggtagttgatattttaaaaaccttagatttaatgtctacatgtgttagggaggaagaaaattgccttttaattgttaataagaaaaccaaatgtgatgaactgtagcccaagccctattctgcactgttcagttttatggaggaaaaataaatctaccataggaatgttagttaattttg

SEQ ID NO: 72601 - DNA, 917 bp, Homo Sapiens
  misc_feature (900)..(900): n is a, c, g, or t
cgaggggcggtgctcagcctcccatgaagggggtcttccctcacaatcggactgctggctgcctttggcctcgtctgcagggagcagggcgggtgggctggctgggacggcagcaagccctgcttacaggcccagcggaccctcaaaggtgcaaggactttctgagggtgcaggacctgtctgactctcagaggcccaggcaatgagaaaatgacaggcaagatacaaacaataccaaatcatttaatacgtgcaagaaagtccgaagaattctgatataccccacgatatgcttttttggaatagccaaaaatgaagtttaaaaaaacgttttccacatgcctcggcgtcctgcgtagccggtggtcaggcagagctccctctccctggcgggtgcggggcggctccgccccaggacgctcccgcccctcccagatcccagcccctgacccccgcccttcccgggccgctgggctcactgtcttcagataatccagcaggtccaaatacagcaggtggatgttctggctggtgatgatcttgatcattgtcttctcgatgttgttctccagctggcggatgatctgcagcagccgcagctcctccttgctggcgtcgggctggctccgcaggctgtccagctccagctgcatgctctccagcttctgcccgcgccgccgcaccaggtggatcagtaggttgtgcatgttcacgcggtcgaagacgtacttgcgcagcttctcccgcaccacctgggtcgggaagggcaccgcccactcgtggatgcgtagggggccgccatggagcccgccaacaagcgggcgggtggaggctcgtggcaaccccacagggaacctggggctgggcacctgctccgtcctcgtcggtccgcaaatctantggggggtgctggaggt

SEQ ID NO: 72602 - DNA, 877 bp, Homo Sapiens
  misc_feature (42)..(42): n is a, c, g, or t
  misc_feature (80)..(121): n is a, c, g, or t
  misc_feature (432)..(504): n is a, c, g, or t
aggcagaggcggctttggaggacgaggtggtggtagaggagnccgaggaggatttggtggcagaggccggggaggctttnnnnnnnnnnnnnnnnnnnnnnnnnnnnnnnnnnnnnnnnnngaccacaagccacaaggaaagaagacgaagtttgaatagcttctgtccctctgctttcccttttccatttgaaagaaaggactctggggtttttactgttacctgatcaatgacagagccttctgaggacattccaagacagtatacagtcctgtggtctccttggaaatccgtctagttaacatttcaagggcaataccgtgttggctttgactggatattcatataaactttttaaagagttgagtgatagagctaacccttatctgtaagttttgaatttatattgtttcatcccatgtacaaaaccnnnnnnnnnnnnnnnnnnnnnnnnnnnnnnnnnnnnnnnnnnnnnnnnnnnnnnnnnnnnnnnnnnnnnnnnngcgttcgtggtggaggcagaggcggctttggaggacgaggtggtggtacaggaggccgaggaggatttggtggcagaggccggggaggctttggagggcgaggaggcttcccaggaggcaaaggaggaggaggtgaccacaagccacaaggaaagaagacgaagtttggatagcttctggtccctctgctttcccttttccatttgaaagaaaggactctgggggttttactggtacctgatcaatgacagagccttctgaggacatcccaagacaggataaccgtcctgtggtctccctgggaaatccgtctagttaacatttcaagggcaattaccgggttgggttttgacgggatattcctataaaactt

SEQ ID NO: 72603 - DNA, 1493 bp, Homo Sapiens
  misc_feature (794)..(824): n is a, c, g, or t
  misc_feature (950)..(1009): n is a, c, g, or t
  misc_feature (1030)..(1030): n is a, c, g, or t
cagtcgacggtaccggacatatgcccgggaattcggccattacggccggggagtctttcgcctcagtctcgagctctcgctggccttcgggtgtacgtgctccgggatcttcagcacccgcggccgccatcgccgtcgcttggcttcttctggactcatctgcgccacttgtccgcttcacactccgccgccatcatggtgaagctcgcgaaggcaggtaaaaatcaaggtgaccccaagaaaatggctcctcctccaaaggaggtagaagaagatagtgaagatgaggaaatgtcagaagatgaagaagatgatagcagtggagaagaggtcgtcatacctcagaagaaaggcaagaaggctgctgcaacctcagcaaagaaggtggtcgtttccccaacaaaaaaggttgcagttgccacaccagccaagaaagcagctgtcactccaggcaaaaaggcagcagcaacacctgccaagaagacagttacaccagccaaagcagttaccacacctggcaagaagggagccacaccaggcaaagcattggtagcaactcctggtaagaagggtgctgccatcccagccaagggggcaaagaatggcaagaatgccaagaaggaagacagtgatgaagaggaggatgatgacagtgaggaggatgaaggaggatgaccaggacgaggatgaggatgaagatgaaattgaaccagcagcgatgaaagcagcagctgctgcccctgcctcagaggatgaggacgatgaggatgacgaagatgatgaggatgacgatnnnnnnnnnnnnnnnnnnnnnnnnnnnnnnnctatggagactacaccagccaaaggaaagaaagctgcaaaagttgttcctgtgaaagccaagaacgtggctgaggatgaagatgaagaagaggatgatgaggacgaggatgacgacgacgacgaannnnnnnnnnnnnnnnnnnnnnnnnnnnnnnnnnnnnnnnnnnnnnnnnnnnnnnnnnnncctgtcaaagaagcacctggnaaaacgaaagaaggaaatggccaaacagaaagcagctcctgaagccaagaaacagaaagtggaaggcacagaaccgactacggctttcaatccctttgttggaaacctaaactttaacaaaatctgctcctgaattaaaaactgggatcagcgatggttttgctaaaaatgatccttgctgttgtggatgtcccaaattggtattgactaggaaatttggttatgggggattttgaatccgctgaaagacctgcaaaaaagcgatgggaactccctgggtttgaaacgctttggccaacgaattaaactaccaaaaacccaagaggaaacagacgcgaaccaaagaccaagatgcgaaaaacactttggggctaaaaaaccgccccgtcacaaagacccctccacggaggaatcgcacagacagggtctggcaaaatgcatcccgtagattcgcaccaagtcc

SEQ ID NO: 72604 - DNA, 974 bp, Homo Sapiens
  misc_feature (608)..(668): n is a, c, g, or t
gctggaccggtccggaattctcgggatatcgtcgacccacgcgtccggcaacctctcctacagtgcaacagaagaaactcttcaggaagtatttgagaaagcaacttttatcaaagtaccccagaaccaaaatggcaaatctaaagggtatgcatttatagagtttgcttcattcgaagacgctaaagaagctttaaattcctgtaataaaagggaaattgagggcagagcaatcaggctggagttgcaaggacccaggggatcacctaatgccagaagccagccatccaaaactctgtttgtcaaaggcctgtctgaggataccactgaagagacattaaaggagtcatttgacggctccgttcgggcaaggatagttactgaccgggaaactgggtcctccaaagggtttggttttgtagacttcaacagtgaggaggatgccaaagctgccaaggaggccatggaagacggtgaaattgatggaaataaagttaccttggactgggccaaacctaagggtgaaggtggcttcgggggtcgtggtggaggcagaggcggctttggaggacgaggtggtggtagaggaggccgaggaggatttggtnnnnnnnnnnnnnnnnnnnnnnnnnnnnnnnnnnnnnnnnnnnnnnnnnnnnnnnnnnnnntgaccacaagccacaaggaaagaagacgaagtttgaatagcttctgtccctctgctttcccttttccatttgaaagaaaggactctggggtttttactgttacctgatcaatgacagagcttctgaggacattccaagacagtattcagtcctgtggtctccttggaaatcccgtctagttaacatttcaaggcataccgtgtcggtttgactggttattcatattacttttaagagtgggtggattaaataacctattgtagtttgattttttgttcctcctggtcaaacctttttcctccaatt

SEQ ID NO: 72605 - DNA, 1446 bp, Homo Sapiens
  misc_feature (768)..(840): n is a, c, g, or t
  misc_feature (943)..(946): n is a, c, g, or t
  misc_feature (948)..(957): n is a, c, g, or t
  misc_feature (961)..(965): n is a, c, g, or t
  misc_feature (969)..(1006): n is a, c, g, or t
  misc_feature (1009)..(1010): n is a, c, g, or t
  misc_feature (1170)..(1196): n is a, c, g, or t
  misc_feature (1373)..(1373): n is a, c, g, or t
gaaattgagggcagagcaatcaggctggagttgcaaggacccaggggatcacctaatgccagaagccagccatccaaaactctgtttgtcaaaggcctgtctgaggataccactgaagagacattaaaggagtcatttgacggctccgttcgggcaaggatagttactgaccgggaaactgggtcctccaaagggtttggttttgtagacttcaacagtgaggaggatgccaaagctgccaaggaggccatggaagacggtgaaattgatggaaataaagttaccttggactgggccaaacctaagggtgaaggtggcttcgggggtcgtggtggaggcagaggcggctttggaggacgaggtggtggtagaggaggccgaggaggatttggtggcagaggccggggaggctttggagggcgaggaggcttccgaggaggcagaggaggaggaggtgaccacaagccacaaggaaagaagacgaagtttgaatagcttctgtccctctgctttcccttttccatttgaaagaaaggactctggggtttttactgttacctgatcaatgacagagccttctgaggacattccaagacagtatacagtcctgtggtctccttggaaatccgtctagttaacatttcaagggcaataccgtgttggttttgactggatattcatataaactttttaaagagttgagtgatagagctaacccttatctgtaagttttgaatttatattgtttcatcccatgtacaaaaccannnnnnnnnnnnnnnnnnnnnnnnnnnnnnnnnnnnnnnnnnnnnnnnnnnnnnnnnnnnnnnnnnnnnnnnngcgttcgtggggttgtaaaagaaaagaaagcagaatgttttatcatggtttttgcttcagcggctttaggacaaattaaaagtcaactctggtgccaaaaaannnnannnnnnnnnnaaannnnnaaannnnnnnnnnnnnnnnnnnnnnnnnnnnnnnnnnnnnnaannaaaacccttgtggggcccgcctcggcccctcaaagaagctttctaaaaccatttcgttttggcccgcggggccccaataaaggaaaagagaacctgggccaataccgtgttttccctaggaaaatccctgggccaatgaactaaagggcctggggaattnnnnnnnnnnnnnnnnnnnnnnnnnnngggggggcaaacggaagcggttcttgaaaacaaatcccaaaattgggaagtttcctgcagaggccctttcactggggaatctttatccaccccgggggaattccccaagggggaggcctctcgaatatatcaaaattttaacggcccccgccgccctgtgcccattttattttgggngagtaaaaaggggtgtgtgaaaatttcccttttaaacgcactttttcttggcccacaatattgggaaaaacca

SEQ ID NO: 72606 - DNA, 2265 bp, Homo Sapiens
  misc_feature (545)..(603): n is a, c, g, or t
  misc_feature (701)..(731): n is a, c, g, or t
  misc_feature (822)..(888): n is a, c, g, or t
  misc_feature (2085)..(2085): n is a, c, g, or t
  misc_feature (2098)..(2098): n is a, c, g, or t
  misc_feature (2135)..(2136): n is a, c, g, or t
  misc_feature (2207)..(2208): n is a, c, g, or t
  misc_feature (2232)..(2232): n is a, c, g, or t
gggtgggctccgggatcttcagcacccgcggccgccatcgccgtcgcttggcttcttctggactcatctgcgccacttgtccgcttcacactccgccgccatcatggtgaagctcgcgaaggcaggtaaaaatcaaggtgaccccaagaaaatggctcctcctccaaaggaggtagaagaagatagtgaagatgaggaaatgtcagaagatgaagaagatgatagcagtggagaagaggtcgtcatacctcagaagaaaggcaagaaggctgctgcaacctcagcaaagaaggtggtcgtttccccaacaaaaaaggttgcagttgccacaccagccaagaaagcagctgtcactccaggcaaaaaggcagcagcaacacctgccaagaagacagttacaccagccaaagcagttaccacacctggcaagaagggagccacaccaggcaaagcattggtagcaactcctggtaagaagggtgctgccatcccagccaagggggcaaagaatggcaagaatgccaagaaggaagacagtgatgaannnnnnnnnnnnnnnnnnnnnnnnnnnnnnnnnnnnnnnnnnnnnnnnnnnnnnnnnnnagatgaaattgaaccagcagcgatgaaagcagcagctgctgcccctgcctcagaggatgaggacgatgaggatgacgaagatgatgaggatgacgatnnnnnnnnnnnnnnnnnnnnnnnnnnnnnnnctatggagactacaccagccaaaggaaagaaagctgcaaaagttgttcctgtgaaagccaagaacgtggctgaggatgaagatgaagaagnnnnnnnnnnnnnnnnnnnnnnnnnnnnnnnnnnnnnnnnnnnnnnnnnnnnnnnnnnnnnnnnnnnggaggaggaagaagaggaggaggaagagcctgtcaaagaagcacctggaaaacgaaagaaggaaatggccaaacagaaagcagctcctgaagccaagaaacagaaagtggaaggcacagaaccgactacggctttcaatctctttgttggaaacctaaactttaacaaatctgctcctgaattaaaaactggtatcagcgatgtttttgctaaaaatgatcttgctgttgtggatgtcagaattggtatgactaggaaatttggttatgtggattttgaatctgctgaagacctggagaaagcgttggaactcactggtttgaaagtctttggcaatgaaattaaactagagaaaccaaaaggaaaagacagtaagaaagagcgagatgcgagaacacttttggctaaaaatctcccttacaaagtcactcaggatgaattgaaagaagtgtttgaagatgctgcggagatcagattagtcagcaaggatgggaaaagtaaagggattgcttatattgaatttaagacagaagctgatgcagagaaaacctttgaagaaaagcagggaacagagatcgatgggcgatctatttccctgtactatactggagagaaaggtcaaaatcaagactatagaggtggaaagaatagcacttggagtggtgaatcaaaaactctggttttaagcaacctctcctacagtgcaacagaagaaactcttcaggaagtatttgagaaagcaacttttatcaaagtaccccagaaccaaaatggcaaatctaaagggtatgcatttatagagtttgcttcattcgaagacgctaaagaagctttaaattcctgtaataaaagggaaattgagggcagagcaatcaggctggagttgcaaggacccaggggatcacctaatgccagaagccagccatccaaaactctgtttgtcaaaggcctgtctgaggataccactgaagagacattaaaggagtcatttgacggctccgttcgggcaaggatagttactgaccgggaaactgggtccccccaagggtttgggttttggagacctttcaacagtgaggaggatgccaaagctgccaaggaggccatggaagaacggggaaattgatggaaataaaggtaccttgggactggggccaaaccctaaaggtgaaagggggctttcgggggcccctgggnagagggcagaagncggcttttggcaggacaaggttgggggtaaaaggagnncccacggagggattgggggccaaaggccggggaaggtctttggaggggcgaaggaggcttcctaagtaggnnaaaggatggaggggggggcccccnaccccccaatggaaacaagaccaaaattttgaa

SEQ ID NO: 72607 - DNA, 1003 bp, Homo Sapiens
  misc_feature (711)..(772): n is a, c, g, or t
  misc_feature (873)..(873): n is a, c, g, or t
  misc_feature (878)..(943): n is a, c, g, or t
  misc_feature (970)..(971): n is a, c, g, or t
taggctagtacgaggctgggggtgtgaatcggcacgaggcgctggccttcggtgtgtcgtgctccgggatcttcagcacccgcggccgccatcgccgtcgcttggcttcttctggactcatctgcgccacttgtccgcttcacactccgccgccatcatggtgaagctcgcgaaggcaggtaaaaatcaaggtgaccccaagaaaatggctcctcctccaaaggaggtagaagaagatagtgaagatgaggaaatgtcagaagatgaagaagatgatagcagtggagaagaggtcgtcatacctcagaagaaaggcaagaaggctgctgcaacctcagcaaagaaggtggtcgtttccccaacaaaaaaggttgcagttgccacaccagccaagaaagcagctgtcactccaggcaaaaaggcagcagcaacacctgccaagaagacagttacaccagccaaagcagttaccacacctggcaagaagggagccacaccaggcaaagcattggtagcaactcctggtaagaagggtgctgccatcccagccaagggggcaaagaatggcaagaatgccaagaaggaagacagtgatgaagaggaggatgatgacagtgaggaggatgaggaggatgacgaggacgaggatgaggatgaagatgaaattgaaccagcagcgatgaaagcagcagctgctgcccctgcctcagnnnnnnnnnnnnnnnnnnnnnnnnnnnnnnnnnnnnnnnnnnnnnnnnnnnnnnnnnnnnnntctgaagaagaagctatggagactacaccagcccaaggaaaagaagctgcaaaagttgttcctggtgaagccaaagaacgtggctgagggatgagatgaanaaaannnnnnnnnnnnnnnnnnnnnnnnnnnnnnnnnnnnnnnnnnnnnnnnnnnnnnnnnnnnnnnnnnggagggaggaaaaaaaggagggagaannagcctggtcaagaaagaccctgggaaaaagaa

SEQ ID NO: 72608 - DNA, 1233 bp, Homo Sapiens
  misc_feature (96)..(96): n is a, c, g, or t
  misc_feature (301)..(301): n is a, c, g, or t
  misc_feature (532)..(582): n is a, c, g, or t
  misc_feature (894)..(966): n is a, c, g, or t
  misc_feature (1074)..(1092): n is a, c, g, or t
  misc_feature (1094)..(1096): n is a, c, g, or t
  misc_feature (1098)..(1098): n is a, c, g, or t
  misc_feature (1101)..(1101): n is a, c, g, or t
  misc_feature (1104)..(1104): n is a, c, g, or t
  misc_feature (1106)..(1106): n is a, c, g, or t
  misc_feature (1109)..(1109): n is a, c, g, or t
  misc_feature (1111)..(1111): n is a, c, g, or t
  misc_feature (1119)..(1119): n is a, c, g, or t
  misc_feature (1124)..(1125): n is a, c, g, or t
  misc_feature (1133)..(1133): n is a, c, g, or t
  misc_feature (1138)..(1138): n is a, c, g, or t
  misc_feature (1143)..(1144): n is a, c, g, or t
  misc_feature (1147)..(1147): n is a, c, g, or t
  misc_feature (1150)..(1150): n is a, c, g, or t
  misc_feature (1152)..(1152): n is a, c, g, or t
  misc_feature (1163)..(1163): n is a, c, g, or t
ggtgtacaaaattgttagcacccctccatgcacgagactctcggagtttggaagcacttaccaagacccagaccaaatgcaattaaaggttgcatntgattgctcatcgagacctaagagcttaagtccttatacaaggaaatgaggcagacaatcggctggagtgcaagacccagggatcacctaatccccgaagcccccatcaaaaatctgttgtcaaagcgctgtctgaggtaccactgaagagacattaaaagagtcatttgacggctccgttcgggcaaggattattactgaccgngaaactggtcctccaaagggtttggttttgtagacttcaacagtgaggaggatgccaaagctgccaaggaggccatggaagacggtgaaattgatggaaataaagttaccttggactgggccaaacctaagggtgaaggtggcttcgggggtcgtggtggaggcagaggcggctttggaggacgaggtggtggtagaggaggccgaggaggatttggtggcagaggccggnnnnnnnnnnnnnnnnnnnnnnnnnnnnnnnnnnnnnnnnnnnnnnnnnnngaccacaagccacaaggaaagaagacgaagtttgaatagcttctgtccctctgctttcccttttccatttgaaagaaaggactctggggtttttactgttacctgatcaatgacagagccttctgaggacattccaagacagtatacagtcctgtggtctccttggaaatccgtctagttaacatttcaagggcaataccgtgttggttttgactggatattcatataaactttttaaagagttgagtgatagagctaacccttatctgtaagttttgaatttatattgtttcatcccatgtacaaaaccannnnnnnnnnnnnnnnnnnnnnnnnnnnnnnnnnnnnnnnnnnnnnnnnnnnnnnnnnnnnnnnnnnnnnnnngcgttcgtggggttgtaaaagaaaagaaagcagaatgttttatcatgggttttttggctttcacggcttttaggaccaatttaaaaagtccacctctgggtggccccnnnnnnnnnnnnnnnnnnnannnanagncananaananaaaaaaanaaggnnaaagaaanaaaanaaaannaangtngnggcgcgggagngggtagttggaagcgcccccgccctctatgggcccctctctactaaaaaagcacaccccgtttatccgca

SEQ ID NO: 72609 - DNA, 881 bp, Homo Sapiens
  misc_feature (99)..(191): n is a, c, g, or t
  misc_feature (346)..(405): n is a, c, g, or t
  misc_feature (729)..(729): n is a, c, g, or t
ggagagagtatgaagtcgacggcgcgccgaattcggcacgaggatgaagatgaaattgaaccagcagcgatgaaagcagcagctgctgcccctgcctcnnnnnnnnnnnnnnnnnnnnnnnnnnnnnnnnnnnnnnnnnnnnnnnnnnnnnnnnnnnnnnnnnnnnnnnnnnnnnnnnnnnnnnnnnnnnncgatgaggaagatgactctgaagaagaagctatggagactacaccagccaaaggaaagaaagctgcaaaagttgttcctgtgaaagccaagaacgtggctgaggatgaagatgaagaagaggatgatgaggacgaggatgacgacgacgacgaannnnnnnnnnnnnnnnnnnnnnnnnnnnnnnnnnnnnnnnnnnnnnnnnnnnnnnnnnnncctgtcaaagaagcacctggaaaacgaaagaaggaaatggccaaacagaaagcagctcctgaagccaagaaacagaaagtggaaggcacagaaccgactacggctttcaatctctttgttggaaacctaaactttaacaaatctgctcctgaattaaaaactggtatcagcgatgtttttgctaaaaatgatcttgctgttgtggatgtcagaattggtatgactaggaaatttggttatgtggattttgaatctgctgaagacctggagaagcgttggaactactggtttgaaagtcttggcaatgaattaactagagaaccnaaagaaagacagtagaaagacgagatgcggacactttgctaaatctcctacagtcctcagatgattgagatgttgagagctgcgaataatatcgcagatggagtaggatgctttgatagagacgagcaaactgagagcgacgtctgctctcg

SEQ ID NO: 72610 - DNA, 844 bp, Homo Sapiens
gccagacaggagcacctgaccaaaggcttcacagccgccctcaccgcccggccttctacggtgtccagagacagttatgccaggcctgggctgggcacactccaccttccctagtcaccagctggtttcccagaggagaaggctgagacccgagaagggagccagcctgtcccatgcctgcctggggagccctgttcctgctctgggccacagcagaggccaccaaggactgccccagcccatgtacctgccgcgccctggaaaccatggggctgtgggtggactgcaggggccacggactcacggccctgcctgccctgccggcccgcacccgccaccttctgctggccaacaacagccttcagtccgtgcccccgggagcctttgaccacctgccccagctgcagaccctcgatgtgacgcagaacccctggcactgtgactgcagcctcacctatctgcgcctctggctggaggaccgcacgcccgaggccctgctgcaggtccgctgtgccagccccagcctcgctgcccatggcccgctgggccggctgacaggctaccagctgggcagctgtggctggcagctgcaggcgtcctgggtgcgcccgggggtcttgtgggacgtggcgctggtcgccgtggccgcgctgggcctggctcttctggctggcctgctgtgtgccaccacagaggccctggattgagccaggcccccagaacccctggctccaggccagggggccagtccctgaggcaggtccccagactccaccaagcctggtcagcccaaaccaccagaagcccagaataaactggcagctcagctgttttatataagctc

SEQ ID NO: 72611 - DNA, 1263 bp, Homo Sapiens
tcggagtgcttcccctccctccggcccgtgctggtcccgacggcgggcctgggtctcgcgcgcgtattgctgggtaacgggccttctcccgcgtcggcccggcccctcctgcctcggctcgtccctccttccagaacgtcccgggctcctgccgagtcagaagaaatgggactccctccgcgacgtgcccggagcagctcccttcgctgtggaagcggcggtgtcttcgaagaaaccggaagcccgtggtgacccctggcgacccggtttgttttcggtccgtttccaaacactaaggaatcgaaactcggcggccttgggggcggccctacgtagcctggcttctggttgtcatggatgcactggtagaagatgatatctgtattctgaatcatgaaaaagcccataagagagatacagtgactccagtttcaatatattcaggagatgaatctgttgcttcccattttgctcttgtcactgcatatgaagacatcaaaaaacgacttaaggattcagagaaagagaactcttggttaaagaagagaataagattttgggaagaaaagctaatagctcgatttgaagaagaaacaagttccgtgggacgagaacaagtaaataaggcctatcatgcatatcgagaggtttgcattgatagagataatttgaagagcaaactggacaaaatgaataaagacaactctgaatctttgaaagtattgaatgagcagctacaatctaaagaagtagaactcctccagctgaggacagaggtggaaactcagcaggtgatgaggaatttaaatccaccttcatcaaactgggaggtggaaaagttgagctgtgacctgaagatccatggtttggaacaagagctggaactgatgaggaaagaatgtagcgatctcaaaatagaactacagaaagccaaacaaacggatccatatcaggaagacaatctgaagagcagagatctccaaaaactaagcatttcaagagtatctgtagcacagcctggagtgcagtggcgcaatcatgggatagcatgaattttgaggactgttccctcttcgcataagaatagaagtagccatcagagttcatatactttttcaaccctttttcctcaaatacgtatcatttttacttaagtaacttcaattctgtgttttaagctatctaataattgttgtttctactatgttaagatagcctctctacattgttaccctccatccaataaaaaatactgatctaaaa

SEQ ID NO: 72612 - DNA, 488 bp, Homo Sapiens
gccctttaaaagggaaaacctaaggaaactgatgttaaccctttgccatcgccaatctcattgatgtcggccagtcaatcctgtcaaatcttgctctttttttaatgatgcttgaaaattggagcctcacaactgtttactaggtgggtctaggatggtaatttctggaaatgactgtagactatgccaaatgtctttttagcctgttatctgaccatgcccagatggcttaacttttctctagcagtgtcactttttccttacttctctgtatctgtggagtagcgtagaaccgtatgtacaaaggtttctgctgacatatcaatgtctacacagctatgtgggtatccatgttggtgcctgaagagtctggcccgcgcccagtatttggcagctgtaaaatgttagatgaacttccaccctcagtaaaatcagccaccccttcaaaagagtcacaggcatccatccagtaatatctttccaggaaa

SEQ ID NO: 72613 - DNA, 1174 bp, Homo Sapiens
  misc_feature (1164)..(1164): n is a, c, g, or t
aaggcggtgaacttgagtctaaagatgcagtgcctgccccttcctaaggtccctgcctggcatccgagtgtcggtgtgtggcacagaaggctcctgcttgcttccaaagtgatggacaggaaggggcagagtgagtcacggcccagactgggcaccttcacgtctcagcctcagggagccccacagccccaagctcgctgaggcaacgtgagaacaggctatgggaaggctgcaaaggctgagaaatgcaaaggctcatatttataaatcccacccccagagtggggagggtcaggtgccagacctggactaaactgcaccaaggaaacacccagcagggtctcctgtgagccggggaccatgcagcccgaaacctccagtcactgcgcccggcaggagtcaggagccagggactgtgcagcctggaacctccagtcactgtgcccagcagggtgggctgtgcccagcaggagtcaggctaagaaacgccaggtctgcctgttcttgctgggcaatggctgatggctgccagtttctgctgatacacaggtaggatgggacccttcatgaatatctgactttaataagttggtaaggatatatttttttgtctatgttctgtttcaacttatgtagattattataaattgatgtaaaccacgtgagaggaaaatgttaataaaaaatgcaaagccccatcatttgcacaaaactcagccctgtggtgtggatgtttgtgttcgcggtggtccagggaagccaccaatgtaaatatttaactcttccagctgcatccagatgtgagtttccaggaatctgtttacctagttcactccccttgagcctccctgtggcccacgggggctggggcagagctgcggggaggtgggctggagccctctccttgctcttcacaaaggcctccggatcagccagcatccaggctgcttctggctcacctttgccatgtgctgctacagtacaaatgtcccacctggccatcggtgtgccttgaaagtggcatgaagttgtccactgaacaggaagcgtcttcttttatgtaaacgcttctctacgctttccttcaaagtggcatatctttgaggcagccttttggtctaatctgcttgtcagagaagctgggtctccgagggcccaccctcnccctcgtgcc

SEQ ID NO: 72614 - DNA, 1513 bp, Homo Sapiens
gtcatctaatgtggtgaatcactgaaagtctcagaaagacctggttagtgtatgttctcatttaccacaggcctaccagccctgggcacagcagcttcatggcaagacataaaatgacactcaaaatccttcagatctggaaaccggctcagtattaaccctacctttggttgtcctgccctacctgctctgttagtttcttgttgcttgaactgtcttctgtcttatttcccttcctttctgtgttcctcttcacctctcttgttcccctccccgctgctctgtagtcatgttggtcctttcaggcacctctgtggcatagctcccctttggtaagtttcttaattgtcatagattaactgagtttcctggatgctaatttcacactttcggttggaggagatctccattgttcccacccctccgggccaaatgggccccaggtttccaaggaaggagcaatctgtgactcctaaaatgggttggggccctgccagccagttaaagcagtgactggagggtggactggggggttgcagcatctttagacctagatctgtctaactctggggaggcacattgacatttccattacacacagcactgctgcggtgccagggacctagcgcaggacttttggtaatccataaaatggattctgagactgcgacggcaaggctgtcctgtcccccaggcacccaaggatcctgccagacagcacactttggaggaaggtctgcagggagcagctgagccatttgttcttgaactctgggaggcagaagtccccgcacccatcatgcgtggactgataggacatcttttcgtggtgtgcaccagtgctttccacacttgacagtggttggctttgatgaaccctcatgctgcaccttcagagccagtcctctagtttggaataaaaattgcagaggtggtttttgggtctttaccacctgcggctggtggacagcagccagtgtgtctggacacccaggggcattgagactgcatgttgtcacatgaccacttctcttcacacatctgctttcagtgcctggtgaaaaatagaccttggcctaacagtgtgactctctccaccgcctcagtgtagggaagggtccaggccagggaaggagcaccctctagtggaggcgggggtgaattcttaggtcgagctgatgcaagaaactccggtagccagcctctgtgaccttgtacatgagtttggtgtgcctactgtgatttaaaacaggtgggttatcaagaggaacttgagatctctttattacatggacatttacttcagggggaccactgtaagaaaagccaaactccaagaccaagtaagttagaggagtcttgattttttagacttcactgcggagttctgtacaccctttgccctgatgaatttgaatgggtttgatttgcaaatttggatttacacccattgttttggaagcacatcagctgaataaagttgaggtttattttatttagaaaatcaaaaaaa

SEQ ID NO: 72615 - DNA, 2250 bp, Homo Sapiens
gcagtactataacggtcctaaggtagcgaggcctgggtggcgaattcggcacgaggccagaacgtcctgctcatcacactgataaccaacactgagcggcggcatcccggctttgaggccaccttcttccagctgcctaggatgagcagctgtggaggccgcttacgtaaagcccaggggacattcaagcgagccgccgtactacccaggccactacccacccaacattgactgcacatggaacattgaggtgcccaacaaccagcatgtgaaggtgcgcttcaaattcttctacctgctggagcccggcgtgcctgcgggcacctgccccaaggactacgtggagatcaatggggagaaatactgcggagagaggtcccagttcgtcgtcaccagcaacagcaacaagatcacagttcgcttccactcagatcagtcctacaccgacaccggcttcttagctgaatacctctcctacgactccagtgacccatgcccggggcagttcacgtgccgcacggggcggtgtatccggaaggagctgcgctgtgatggctgggccgactgcaccgaccacagcgatgagctcaactgcagttgcgacgccggccaccagttcacgtgcaagaacaagttctgcaagcccctcttctgggtctgcgacagtgtgaacgactgcggagacaacagcgacgagcaggggtgcagttgtccggcccagaccttcaggtgttccaatgggaagtgcctctcgaaaagccagcagtgcaatgggaaggacgactgtggggacgggtccgacgaggcctcctgccccaaggtgaacgtcgtcacttgtaccaaacacacctaccgctgcctcaatgggctctgcttgagcaagggcaaccctgagtgtgacgggaaggaggactgtagcgacggctcagatgagaaggactgcgactgtgggctgcggtcattcacgagacaggctcgtgttgttgggggcacggatgcggatgagggcgagtggccctggcaggtaagcctgcatgctctgggccagggccacatctgcggtgcttccctcatctctcccaactggctggtctctgccgcacactgctacatcgatgacagaggattcaggtactcagaccccacgcagtggacggccttcctgggcttgcacgaccagagccagcgcagcgcccctggggtgcaggagcgcaggctcaagcgcatcatctcccaccccttcttcaatgacttcaccttcgactatgacatcgcgctgctggagctggagaaaccggcagagtacagctccatggtgcggcccatctgcctgccggacgcctcccatgtcttccctgccggcaaggccatctgggtcacgggctggggacacacccagtatggaggcactggcgcgctgatcctgcaaaagggtgagatccgcgtcatcaaccagaccacctgcgagaacctcctgccgcagcagatcacgccgcgcatgatgtgcgtgggcttcctcagcggcggcgtggactcctgccagggtgattccgggggacccctgtccagcgtggaggcggatgggcggatcttccaggccggtgtggtgagctggggagacggctgcgctcagaggaacaagccaggcgtgtacacaaggctccctctgtttcgggactggatcaaagagaacactggggtataggggccggggccacccaaatgtgtacacctgcggggccacccatcgtccaccccagtgtgcacgcctgcaggctggagactggaccgctgactgcaccagcgcccccagaacatacactgtgaactcaatctccagggctccaaatctgcctagaaaacctctcgcttcctcagcctccaaagtggagctgggaggtagaaggggaggacactggtggttctactgacccaactgggggcaaaggtttgaagacacagcctcccccgccagccccaagctgggccgaggcgcgtttgtgcatatctgcctcccctgtctctaaggagcagcgggaacggagcttcggggcctcctcagtgaaggtggtggggctgccggatctgggctgtggggcccttgggccacgctcttgaggaagcccaggctcggaggaccctggaaaacagacgggtctgagactgaaattgttttaccagctcccagggtggacttcagtgtgtgtatttgtgtaaatgagtaaaacattttatttctttttaaaaaaa

SEQ ID NO: 72616 - DNA, 1480 bp, Homo Sapiens
  misc_feature (147)..(188): n is a, c, g, or t
tgaataaataagcatcaattttattgaatcatgaataatttaagacaggtacaatcatcagctttattctctatgacatggggcatgatgtccagcagatcattggcaaatccaaaaacctcatgacaaatgaaaattaaataggtnnnnnnnnnnnnnnnnnnnnnnnnnnnnnnnnnnnnnnnnnntggaaacataccgtacacaaaatactcaattcctagttttctctttaaaaatggctagaaaaatttcatcaaaatgcagcactttaatcaattatttacaatttctatgttacaatgaaaaaatgtacatcttatagaacatatttcataaaactgctccactggaaacaactagatcaaaacagcaaaccttccatttaatatccacaaagttggattatttttcctttttgaagtagattcgccacaatcaaatttgaatacagagaattttgaagtttaagcatcaaacaacaaagtaaaagtccccaagatacaacaaagatctaggcaagtcttgttcctgtcccactcccaccccacccctaatgaaacttaaaaggtattcccatttcaattatggcctgtatcattcttggcagtttgggaagagaacttttggcttccattggtaactcaacataaatgttgcatagaatttatatatttcaaaattggcctaactgtagaaaaggcaaaatggaagcatttccgatagagccctaaatgagtacaaagtcactttgtaaaaggtgagtgacactaaagtaaaaatatgaccaaaataagaaatgtgcatattagacaacccggcttcccgaaactttaggaaggacacggagttgtgagtcacacaagggctatgctacttgaagtcaatgttcaccaatcaggcagcactaggtacagaagtcttggttctgaacctggacccaggagggaagtctgtgggaaaggggagaagagaatgacaagagaggatgtcatattaaaaaaaggtttcaaacaatattggcaggtgtctactcacaaggtgattggaaaactgcccacgaggagaagtcaactttacctcctcccaaattcacagtacgcgagtgtagtagggtcattgctgggagataaattgtctgaggagggccacccttcaggtttaccagaaatcttagggtttggcccccctggtcacaggctaaatatatggtttaaaagttttattaaaaagaaaaacagaacaagacacactcacacccagatgactaatgaaggctaagcagaatagtctgagtttgctgagactaaagcagggatagtgttgaaaagttttcctttcactagtgggacacattccccttttcttttcaaagaggaagaacatggtgtcatccaatgtgaagtgagcagtttcgggtcaactcttatcccggccgtaatggccgaattcccgggcatatgtccggtaccgtcgactg

SEQ ID NO: 72617 - DNA, 333 bp, Homo Sapiens
  misc_feature (155)..(196): n is a, c, g, or t
tttttttctgaataaataagcatcaattttattgaatcatgaataatttaagactggtacaatcatcagctttattctctatgacatggggcatgatgtccagcagatcattggcaaatccaaaaacctcatgacaaatgaaaattaaataggtnnnnnnnnnnnnnnnnnnnnnnnnnnnnnnnnnnnnnnnnnntggaaacataccgtacacaaaatactcaattcctagttttctctttaaaaatggctagaaaaatttcatcaaaatgcagcactttaatcaattatttacaatttctatgttacaatgagaaaatgtacatcttatag

SEQ ID NO: 72618 - DNA, 975 bp, Homo Sapiens
tcggcacgaggcttgggtggaggacaggcccctctgctgtgcccctatgccctgtgtgggcccaaccagtggacaatggagtctgggggagggggaaccccggggacatgcccccacccgggaggggccggtaacccctgggctatcttctagacggggcgaaccagggtcattgacctgccccctgcacagggcagggaccgagtgagccactcctggtcccgaagctcccgcccccactgggccctccttcctcctggtgctaatttggggaccccaggggccgcccccggcctcttctccatcctgcttggaccaggtcctgggtcttcccaaccataccccgagatcaggccccacctgccagctctactgggcttggagcacgtccgggcagtggagggagggacacagcctgggacaggaagcctcttgggttggagcaggagaccctcatttgccacccagaccaatgtgagcctgcccccagccccctctcattggaagtggcaaggggcttccctcctgggggcagctacactcgtccccagaggcacattcgtgcacattctcacagacaccgtctcacacgttggctttggacaaccaggccccaacttggtccctgccctagggacctccagcctggtgcccagtgctcaggccacctcctggtccagtcaccacctgcagcctcggcagggcaggtacaggggccacctcggatgggagcctgggtccctgcctccgctctgcccctgggtggctgggaggagaggccctctcgggggtgacctgggcgtcagccgtggaaccccctcctcctccctggagtctgcctgagtccctcgagccgcgagccttcgctgaagtgcccttgctataaccccctctgcttctggtgtgtgacgaggcccccgatgttcttgattttcccagagaagcaaataaacagcgtgaacagccccaaaaaaa

SEQ ID NO: 72619 - DNA, 1035 bp, Homo Sapiens
  misc_feature (66)..(592): n is a, c, g, or t
gcgacagtatccgtagcgcaggtcgaacagagagcgcaggaggactccagggggaacgcctgttcnnnnnnnnnnnnnnnnnnnnnnnnnnnnnnnnnnnnnnnnnnnnnnnnnnnnnnnnnnnnnnnnnnnnnnnnnnnnnnnnnnnnnnnnnnnnnnnnnnnnnnnnnnnnnnnnnnnnnnnnnnnnnnnnnnnnnnnnnnnnnnnnnnnnnnnnnnnnnnnnnnnnnnnnnnnnnnnnnnnnnnnnnnnnnnnnnnnnnnnnnnnnnnnnnnnnnnnnnnnnnnnnnnnnnnnnnnnnnnnnnnnnnnnnnnnnnnnnnnnnnnnnnnnnnnnnnnnnnnnnnnnnnnnnnnnnnnnnnnnnnnnnnnnnnnnnnnnnnnnnnnnnnnnnnnnnnnnnnnnnnnnnnnnnnnnnnnnnnnnnnnnnnnnnnnnnnnnnnnnnnnnnnnnnnnnnnnnnnnnnnnnnnnnnnnnnnnnnnnnnnnnnnnnnnnnnnnnnnnnnnnnnnnnnnnnnnnnnnnnnnnnnnnnnnnnnnnnnnnnnnnnnnnnnnnnnnnnnnnnnnnnnnnnnnnnnnnnnnnnnnnnnnnnaagaattcggcacgagggatttaaaagcatttaatgacatagcatatatttaacagatagggcaaaagttgagaggtacaggtcgtacgactgagcaccaggcctgagcgaccacctccctgttcaggcccagcctctggagttcattcctatcaatgtcattttgattgtgcagtaagatgaaaatttgtcattacaatagttacagtgacagagaaatgcacactatgtatcaaatagcaaggaaatgaagcaaattataacacagtgtggcaacgcacgagcaagtaaccattagagtaacattactttgtccagtaaatgcttcagttccaccacttgtacacttaccaatgatttaaagggtttattatacatctagttttattatactttgtactagaattatctcaaacgtacaatataatgtatttcagcaaaaa

SEQ ID NO: 72620 - DNA, 984 bp, Homo Sapiens
  misc_feature (74)..(83): n is a, c, g, or t
  misc_feature (526)..(539): n is a, c, g, or t
aagggtgggggaaacacacctaaacactttatctccaagttacaaaagtttgaggtgcagagggaaggccagannnnnnnnnnaatgaaattatatagattagatctcagtatttaaactgttcctcaattttgtgaggctgtgttggaaataacccgcctctagtgctgttggtatgcaaggcagcggtgcttaatcaatatttcctgtgctcaccagaggcaaaatgtaccaatatcctgacaccattctctctccatttacttctggtggttaccctgactcttgactcttagaagtgcccgagatggggctaacctttattaaacagatcgcatattatgatcttgctgcagccacagtgcagctccacattaactctacagaccaaaccatttgtatctggcatcacttactaacacacgacatgcggcttttctgcatcaactgctatgacggttaagaatgtcagtatacaagaaggaatagaaaactgatactgttttaaataatctgtaatttcaannnnnnnnnnnnnngctgaaatacattatattgtacgtttgagataattctagtacaaagtataataaaactagatgtataataaaccctttaaatcattggtaagtgtacaagtggtggaactgaagcatttactggacaaagtaatgttactctaatggttacttgctcgtgcgttgccacactgtgttataatttgcttcatttccttgctatttgatacatagtgtgcatttctctgtcactgtaactatttgtaatgacaaatttttcatcttactgcacaatcaaaatgacattgataggaatgaactccagaaggctgggcctgaaacagggaagggggtcgcctcaggcctggtggctcagtcgtacgaccctgtaacctctcaaactttttgccctatccggtaaaataaatggctaggttcattaaaatgcctttttaaatcttaaaaa

SEQ ID NO: 72621 - DNA, 2667 bp, Homo Sapiens
  misc_feature (235)..(282): n is a, c, g, or t
tatgtagaaaattgatagatgacgtgcatcggctgtttcgggacaagtaccgcacagagatccaacagcaaagtgctttaagtttattaaatggcacttttgatttccaaaatgacttcctgcggctccttcgtgaagcagaggagagcagtaagatccgtgctcccactaccatgaagaaatttgaagattctgaaaaggccaagaaacctgtgaggtccatgattgagacacnnnnnnnnnnnnnnnnnnnnnnnnnnnnnnnnnnnnnnnnnnnnnnnnccaagaaggaaggttctgatggtcctttggctaccagcaaaccagtccctgcagaaaagtcaggtcttccagtgggtcctgagaacggagtagaactttccaaagaggagctgatccgcaggaagcgcgaggagttcattcagaagcatgggaggggtatggagaagtccaacaagtccacgaagtcagatgctccaaaggagaagggcaaaaaagcaccccgggtgtgggaactgggtggctgtgctaacaaagaagtgttggattacagtactcccaccaccaatggaacccctgaggctgccttgtctgaggacatcaacctgattcgagggactgggtctggggggcagcttcaggatctggactgcagcagctctgatgacgaaggggctgctcaaaactctaccaaacctagtgcgaccaagggaacactgggtggcatgttggtatgctgaagggccttgtgggttcaaagagcttgagtcgtgaagacatggaatctgtgctggacaagatgcgtgatcatctcattgctaagaacgtggctgcagacattgccgtccagctctgtgaatctgttgccaacaagttggaagggaaggtgatggggacgttcagcacggtgacttccacagtaaagcaagccctacaggagtccctggtgcagattctgcagccacagcgtcgtgtagacatgctccgggacatcatggatgcccagcgtcgccagcgcccttatgtcgtcaccttctgcggcgttaatggagtggggaaatctactaatcttgccaagatttccttctggttgttagagaatggcttcagtgtcctcattgctgcctgtgatacatttcgtgctggggccgtggagcagctgcgtacacacacccggcgtttgagtgccctacaccctccagagaagcatggtggccgcaccatggtgcagttgtttgaaaagggctatggcaaggatgctgctggcattgccatggaagccattgcttttgcacgtaaccaaggctttgacgtggtgctggtggacacggcaggccgcatgcaagacaatgcccctctgatgactgccctggccaaactcattactgtcaatacacctgatttggtgctgtttgtaggagaagccttagtaggcaatgaagccgtggaccagctggtcaagttcaacagagccttggctgaccattctatggctcagacacctcggctcattgatggcattgttcttaccaaatttgataccattgatgacaaggtgggagctgctatttctatgacgtacatcacaagcaaacccatcgtctttgtgggcaccggccagacctactgtgacctacgcagcctcaatgccaaggctgtggtggctgccctcatgaaggcttaacgtggctcttgcccaataccaaatcgccgctttccccacaagcccttcttcctgtatcaagaatgtgctttagagtatgtgagcaacctgtcttcagtgtagtacaaaggcagagtgagggggcttgtggctccttccaaccccactccccgttcagcacagccgccatctgcaaggaaggcctaatcatgttacaatcactgcccactgaccctctcccagcgggcctcccccttcctactcaggcacccccttcactctgcctacagactcagtcttattacagctttgaccaatggttggaacccaacaccagagctttgctaataattagtgtggtcaagagccgtctgagcctaatgagtcccagctgcattaggttaagagactcttccagagccagcgccaggtcttgaatggcacctctccctaggatacacagcctgcaggtccccaggacctggatgacacccgcctcactgtggcagtgtattgcctgttaattgctgctaattctaattctgatgatgactcctactccattgtttaccccaaagcatcagctaggctggagtgatttgttacaaatgagcaaaagatgagtccttgcttccctcagaaataaaaggagctcagctgcagcgttgcattgggcttcttggcctcccaactcttcccactcccagaatccagaagtaagctctgcatgttccccttcctgggaggaaaccaattgtcagaaggatgtatgatgaccccctcccctcccatccttcacctcctaagcagtcctggcttttcctcatcactcccctctacagtgcctggtagacaagtgctacattgaagaacacaaacctcttgttaagacttgtcctgtagcttgatattacagatgtgctattagtgcaataaggtgaaggctgtctgcccagagaaataagtaatttatataagaaaataaatttcataaataaattgcc

SEQ ID NO: 72622 - DNA, 428 bp, Homo Sapiens
aagaagtggggttcatgatggtcttttggctaccagcaaaccagtccgtgcagaacagtgaggtcttccagtgggtcctaaggtcgaagtagcactttccacagaggagctgatccgcagcaagcgcgaggagttcatccaaaagtcagctctgcatgttcccgtttgtgggaggaaaccaattgtcagaagaatgtataatgaccctccccctcccatccttcacctcctaagcagtcctggcttttcctcatcactcccctctacagtgcctggtagacaagtgctacattgaagaacacaaacctcttgttaagacttgtcctgtagcttgatattacagatgtgctattagtgcaataaggtgaaggctgtctgcccagagaaataagtaatttatataagaaaataaatttcataaataaaaa

SEQ ID NO: 72623 - DNA, 776 bp, Homo Sapiens
ttaagggggagagagtatgaagtcgacggcgcgccgaattcggcacgaggcgcagcaggaagcggcggcgaacgcggcctgaattcccggcgccggccccagctcctctgccgctgccgccatgctcgacttcttcaccattttctccaagggcgggcttgtgctctggtgcttccagggcgttagcgactcatgcaccggacccgttaacgcgttgattcgttccgtgctgctgcaggaacggggaggtaacaactccttcacccatgaggcactcacactcaagtataaactggacaaccagtttgagctggtgtttgtggttggttttcagaagatcctgacactgacatatgtagacaaattgatagatgacgtgcatcggctgtttcgggacaagtaccgcacagagatccaacagcaaagtgctttaagtttattaaatggcacttttgatttccaaaatgacttcctgcggctccttcgtgaagcagaggagagcagtaagatccgtgctcccactaccatgaagaaatttgaagattctgaaaaggccaagaaacctgtgaggtccatgattgagacacggggggaaaagcccaaggaaaaagcaaagattatcaataaaaggggccaaaatgaagttctgatggtccttggctaccacaaactatccctgataaattcagtctactatgggtctgaaacggaaaaaacttttaaaatgattatctaagaaccataaattatttaacatgaaggtatgtaaataatat

SEQ ID NO: 72624 - DNA, 795 bp, Homo Sapiens
gcgagagagtatgaagtcgacggcgcgccgaattcggcacgaggcgtgtcccgcgcttggcgcagcaggaagcggcggcgaacgcggcctgaattcccggcgccggccccagctcctctgccgctgccgccatgctcgacttcttcaccattttctccaagggcgggcttgtgctctggtgcttccagggcgttagcgactcatgcaccggacccgttaacgcgttgattcgttccgtgctgctgcaggaacggggaggtaacaactccttcacccatgaggcactcacactcaagtataaactggacaaccagtttgagctggtgtttgtggttggttttcagaagatcctgacactgacatatgtagacaaattgatagatgacgtgcatcggctgtttcgggacaagtaccgcacagagatccaacagcaaagtgctttaagtttattaaatggcacttttgatttccaaaatgacttcctgcggctccttcgtgaagcagaggagagcagtaagatccgtgctcccactaccatgaagaaatttgaagattctgaaaaggccaagaaacctgtgaggtccatgattgagacacggggggaaaagcccaaggaaaaagcaaagaatagccaaaaaaagggggccaagaaggaaggttctgatggttctttggcaacagcaaaccattccctgcaaaaaagtcagtcttctatgggtcctgagaacggattaaactttcaaaaagaactgaccacagaaacgcaagaattctttaaaacttgagagggaggaa

SEQ ID NO: 72625 - DNA, 873 bp, Homo Sapiens
  misc_feature (389)..(445): n is a, c, g, or t
  misc_feature (685)..(685): n is a, c, g, or t
  misc_feature (721)..(721): n is a, c, g, or t
  misc_feature (748)..(748): n is a, c, g, or t
agagtatgaagtcgacggcgcgccgaattcggcacgaggggaacggggaggtaacaactccttcacccatgaggcactcacactcaagtataaactggacaaccagtttgagctggtgtttgtggttggttttcagaagatcctgacactgacatatgtagacaaattgatagatgacgtgcatcggctgtttcgggacaagtaccgcacagagatccaacagcaaagtgctttaagtttattaaatggcacttttgatttccaaaatgacttcctgcggctccttcgtgaagcagaggagagcagtaagatccgtgctcccactaccatgaagaaatttgaagattctgaaaaggccaagaaacctgtgaggtccatgattgagacannnnnnnnnnnnnnnnnnnnnnnnnnnnnnnnnnnnnnnnnnnnnnnnnnnnnnnnngaaggttctgatggtcctttggctaccagcaaaccagtccctgcagaaaagtcaggtcttccagtgggtcctgagaacggagtagaactttccaaagaggagctgatccgcaggaagcgcgaggagttcattcagaagcatgggaggggtatggagaagtccaacaagtccacgaagtcagatgctccaaaggagaagggcaaaaaagcaccccgggtgtgggaactgggtggctgtgcntacaaagaagtgtgggatacagtactcccaccacanatggaaccctgaggctgcctgttctgnagaatcaactgatcgaggaatggtctgggggcagctcagatctgactgcacactctgagactagggctgccaaatcaccaactatgcacaagaacctggtgcagttggagcgaagctgtgttaaa

SEQ ID NO: 72626 - DNA, 879 bp, Homo Sapiens
aaccgctagtacgaggctggggtggaatcggcacgaggatggtgagggtgggggtgagggggcctctctagcttgcggcctgtgtctatggtcgggccctctgcgtcagctgctccggaccgagctcgggtgtatggggccgtaggaacaggctccggggccccgataacgggccgccccacagcaccccgggctggcgtgagggtctcccttgatctgagaatggctacctctcgatatagagccagtggctgaaattggttgtcggtgcctatgtgtgacagtgtacaaggcccgtgatccccacagtggccactattgtggacctcaagagtgtgagagtccccaatggagtgaggaagtggagtgagtgccttcccatcagcacagttcgtgaggtggctttactgaggcgactggaggcttttgagcatcccaatgttgtccggctgatggacgtctgtgccacatcccgaactgaccgggagatcaaggtaaccctggtgtttgagcatgtagaccaggacctaaggacatatctggacaaggcacccccaccaggcttgccagccgaaacgatcaaggatctgatgcgccagtttctaagaggctagatttccttcatgccaattgcatcgttcaccgagatctgaagccagagaacatttctggtgacaagtggtggaacagtcaagctggctgactttggcctggccagaatctacagtaccagatggacttacacccgtggttgttacactctggtacgagctccgaagtcttctgcagtccacatatgcacacctgtgggctgtggagtgtggggtgtatcttgcgaggatgtttcggcggaagccctctctggggaactctgaacga

SEQ ID NO: 72627 - DNA, 1083 bp, Homo Sapiens
  misc_feature (94)..(94): n is a, c, g, or t
gagcgggcctgggtggcgatttcggcacgagggcggtcacgtgccctagacgtccggcgttcgccccgccctcccagtttccgcgcgcctcttnggcagctggtcacatggtgagggtgggggtgagggggcctctctagcttgcggcctgtgtctatggtcgggccctctgcgtccagctgctccggaccgagctcgggtgtatggggccgtaggaaccggctccggggccccgataacgggccgcccccacagcaccccgggctggcgtgagggtctcccttgatctgagaatggctacctctcgatatgagccagtggctgaaattggtgtcggtgcctatgggacagtgtacaaggcccgtgatccccacagtggccactttgtggccctcaagagtgtgagagtccccaatggaggaggaggtggaggaggccttcccatcagcacagttcgtgaggtggctttactgaggcgactggaggcttttgagcatcccaatgttgtccggctgatggacgtctgtgccacatcccgaactgaccgggagatcaaggtaaccctggtgtttgagcatgtagaccaggacctaaggacatatctggacaaggcacccccaccaggcttgccagccgaaacgatcaaggatctgatgcgccagtttctaagaggcctagatttccttcatgccaattgcatcgttcaccgagatctgaagccagagaacattctggtgacaagtggtggaacagtcaagctggctgactttggcctggccagaatctacagctaccagatggcacttacacccgtggttgttacactctggtaccgagctcccgaagttcttctgcagtccacatatgcaacacctgtggacatgtggagtgttggctgtatcctttgcagagatgtttcgtcgaaaggcctctcttctgtggaaactctgaagccgaccagttggggcaaaatctttgacctgatggggttgcctccagaggatgactggctcgaaatgtttccttgccccttggaacctttcccccagagggcccgcccgtgcagtcgtggtactgacgatg

SEQ ID NO: 72628 - DNA, 2152 bp, Homo Sapiens
  misc_feature (1390)..(1401): n is a, c, g, or t
  misc_feature (1603)..(1613): n is a, c, g, or t
  misc_feature (1836)..(1844): n is a, c, g, or t
  misc_feature (1954)..(1954): n is a, c, g, or t
cgaccggagcagtaactataacggttctaaggtagcgaggcctgggtggcgaattcggcacgagggcgtccagctgctccggaccgagctcggggtgtatggggccgtaggaaccggctccggggccccgataacgggccgcccccacagcaccccgggctggcgtgagggtctcccttgatctgagaatggctacctctcgatatgagccagtggctgaaattggtgtcggtgcctatgggacagtgtacaaggcccgtgatccccacagtggccactttgtggccctcaagagtgtgagagtccccaatggaggaggaggtggaggaggccttcccatcagcacagttcgtgaggtggctttactgaggcgactggaggcttttgagcatcccaatgttgtccggctgatggacgtctgtgccacatcccgaactgaccgggagatcaaggtaaccctggtgtttgagcatgtagaccaggacctaaggacatatctggacaaggcacccccaccaggcttgccagccgaaacgatcaaggatctgatgcgccagtttctaagaggcctagatttccttcatgccaattgcatcgttcaccgagatctgaagccagagaacattctggtgacaagtggtggaacagtcaagctggctgactttggcctggccagaatctacagctaccagatggcacttacacccgtggttgttacactctggtaccgagctcccgaagttcttctgcagtccacatatgcaacacctgtggacatgtggagtgttggctgtatctttgcagagatgtttcgtcgaaagcctctcttctgtggaaactctgaagccgaccagttgggcaaaatctttgacctgattgggctgcctccagaggatgactggcctcgagatgtatccctgccccgtggagcctttccccccagagggccccgcccagtgcagtcggtggtacctgagatggaggagtcgggagcacagctgctgctggaaatgctgacttttaacccacacaagcgaatctctgcctttcgagctctgcagcactcttatctacataaggatgaaggtaatccggagtgagcaatggagtggctgccatggaaggaagaaaagctgccatttcccttctggacactgagagggcaatctttgcctttatctctgaggctatggagggtcctcctccatctttctacagagattactttgctgccttaatgacattcccctcccacctctccttttgaggcttctccttctccttcccatttctctacactaaggggtatgttccctcttgtccctttccctacctttatatttggggtccttttttatacaggaaaaacaaaacaaagaaataatggtcnnnnnnnnnnnnaaccaaaccctgcccaatctccgacccaatacaaaaaaatcctgtgcgcccgaccccgcgccctcgagaaaaatttctatacaacttctcttttgtggcgcgcggcccccctaggcgaagtcgcaaaacggggcccactctcgtcttccctacagagaaccctgcgcccaccacaaagagggccgcgagcatctcccccccnnnnnnnnnnncgccccggccgccgacaaacccacccgtttttcgagccaccatccccctcagcggcgcattcttccttggcctcccctttccctggggcttatttatcacaccaagccgcgggacccccataagggccgggcgttctctacgcatatctaaacaccttccccgcccccgccgcccccatcacgtcgcccaccatcttttatcccgatctaccggttggccggnnnnnnnnngcttattaagcatgccctctgtcgttaaccgcccgcgtagatccgctttttcccaacccgcaggcgtgcgcgatcatcactcccgaatcccgcccagcgttgcgcgcctntgtccccatctgcgtgtagacaatccgccaaattaacactacagctctccctcaccgggaccccggaaacggcgcgctcacgggtaaatacccgttatacctatttcccgcccccggtatccccaccccacccgttgtgcgcgcctcctatccccccgcgccttttatccccgcactagcacgtaccgcccgttatca

SEQ ID NO: 72629 - DNA, 1147 bp, Homo Sapiens
caactgcctcagcatggttaatgtattcacttgaagtagaaatgttttgagacttaatgaccatgattaatatccctctgcaccccctccttcctaccacttgggaatctttggggaatagttaggttcagagccacctacaagaaaggtcccaggttgtcattcttcataccttagaggaattctcctgatgctaacacattcccaggtgtttcacagaattccactaaagctggggggtaagattcatcctgtcgtcttctcatcctacccacaacctcaaccagtatgtaccatgctcctgccaggagatacaactgcaccaacaccaggtacctacccactcctagtcctctgccccatccccatgatctcggatctccgctgcagcacccttcgaacacttttggaccatgatgttgtctgtccaggatgcccctgtctttccatcaccagtgaaattacacttggtcactgttccagcctcaagtttggccaatgaatccaggaagggaccatcgccccgagtcttcagccgtaccccggcccccagctcgagttccatcacctccatctctgactcgggcatccagaacgccactgtgtggtcgggggtgaggctctctgtcagcgcgagcagctctggcttgttgaccagccccttcagcgcctcgggcgtgagcctgtcaagtgtcccccttggcttccaccttgtaggacgacatgaggaagcccgtgttcaccttcctggtggcgctgaagttgggctcgatttcatttcccttggcgtcgaatttacggcgatggatgtgactgggccggatatacagcacgtagtagcgctccttcctcccatgagtgtcacaagatgctgtgccgagatacatcgatcagttctccctccagcaggacaccatttcccccctggtgggcggcggggtcccaggcaccctggcagccggacgctatgcaccgccttgttccggagcgcgccgtcgtggtagatgcggctcattctcccgaccgcccgggcaccccggcacagagccggcgcactgggctgggggcgcggcgcgggaagtgctgcagaacgcacgggacccgcgcctcgtgccgaattcatcaacccagcctcgctacctagaca

SEQ ID NO: 72630 - DNA, 753 bp, Homo Sapiens
  misc_feature (12)..(12): n is a, c, g, or t
gcagatgagtgngagactggttgcaaggtgtgaccgcaggaatcctggaggaacagagagtaaagcttctaggcatctgaaacttgcttcatctctgacgctcgcaggactgaagatgggcaaattgtaggcatttctgctgagcagagttggagccagagatctacttgtgacttgttggccttcttcccacatctgcctcagactggagggggctcagctcctcgggtgatatctagcctgcttgtgagctctagcagggataaggagagctgagattggagggaattgtgttgctcctggaggaagcccaggcatcattaaacaagccagtaggtcacctggcttccgtggaccaattcatctttcagacaagctttagcagaaatggactcagggaagagactcacatgctttggttagtatctgtgtttccggtgggtgtaataggggattagccccagaagggactgagctaaacagtgttattatgggaaaggaaatggcattgctgctttcaaccagcgactaatgcaatccattcctctcttgtttatagtaatctaagggttgagcagttaaaacggcttcaggatagaaagctgtttcccacctctgtttgcttttaacattaaaagggaaacgtgcctctgccccacaggtagaggggtgcacgttcctcctggttccttcgcttgtgtttctgtacttaccaaaaatctaccatttcaataaattttgataggagacaaa

SEQ ID NO: 72631 - DNA, 1509 bp, Homo Sapiens
  misc_feature (1241)..(1245): n is a, c, g, or t
  misc_feature (1247)..(1249): n is a, c, g, or t
  misc_feature (1251)..(1252): n is a, c, g, or t
  misc_feature (1254)..(1255): n is a, c, g, or t
  misc_feature (1257)..(1258): n is a, c, g, or t
aatatgaacagtgggtcaaaaagcaggctggtacggtcggaatcccgggatatcgtcgacccacgcgtcgctagccagagactgaactggggaatttgaacattcctttacatgttggagaaatgaagccaaagttattcagatggttttcccaggctaaaggaaagtcacctgcaagagatcccggcactgatctggagcagctgacagggtgggtctcccttaccaaagagaagaaccactctctggcgctggggtgacctgctggctgggcctgtaaggtttccatgttgctgaggccatggagattcccagagctggtcacaccgaccgctctcagggcccgctgccctgggctggcaacaccattctggccttggcctgcagaagctttcagagtcttcactggcagtagggggagatggggagaggaatgatctctgcccagccccttcctttccaaaccatgcaatggaagagcccagatgggtgaagattgattttgccttaactcaagagaattcctgttctccttgtgctatgatttggacacaagattctggatacctggaacttagctgtgtactcctgtaccctaaacagtggatttgagttccagcgtttattcttttttccttttttcagatcaccatctaagttacatctttagctcaggtccatccttctcaagatctccttcttagccccccagcccctggtgctgtctgtggtcaggtgaccttactcaggagcagatatctccttggccgccatggagcctcatccatccacacgtgcctgtagcattccagagctcactgcccttctagatgtgccttcccgcttggcttccagcggcttgtgctcactctgtctgccaggtatgagaagaacacgtaagaccgccaccacactcaccctccctcaaggccctgtgccataggggtggccacccgacctgcccccagaacttttggatactggaggcagttgcataggtctccctctctgggcaccaggactcagtccagcccaagactactctgggcagctcccatcccagtctggggccatttgcagactcaggaaaggatttctacagtgttctataaaagccaaaagagagagtgggtttgggaagagtgagggtggttggggagaggggaccgatgtgcctcattgtttagtggtgattacaaatatgcttttctggataaagtttggttgtttgctcttggaannnnncnnnannannannaaaaaaaagaaactttgtcggcccgccctcgggcccttcggaggaagtcttttctagaacccatttcgttttgggcggccgcggggcccccagttaagggtaaagggggaacattgggtccaataaggctgggtttcccttaggaaaaatcccttggggccatgaaactaagggggctttgggaattctccccacccaaataggaaaaaaaggccccgggggcggggaaaaacccgaagagcgtttcctgg

SEQ ID NO: 72632 - DNA, 717 bp, Homo Sapiens
  misc_feature (36)..(36): n is a, c, g, or t
tacataaggatgtcctttacccaaaatgaggagatntggaactgaaactaatatccagggacacaacagtgggtatcatcaaaggcccacctttaacatcaaggacaagttgatcactgagataagagctgatagttccatttttattcagtctccacttctgcctgaattgcccatgttcagtccatagagctactttagctccaggtgtgtcccggccaccaatcacatcaagacatgtatcactggcctaaaagggttaagaaatgattaattggcagtagtatgtttgctaaagtaagttgaattaggtcccttttatcttaggtaaacaagtcatagacatgaagtgtgtgtgtgtcttatctaaaaaaatactatatagtataatttcagtaagccttttttaatgtcttctttacggctgtgggtaggagatggtacagaaataaaccaactgaaatagaggtacttgtttttaataggatgtctacatctgacaacagatgttcaataaagatttggtgaattggaattaaatgttaaatccctgtttgcttaaaacgtattatgttgagcttggttttcttatgaaaacattgcatgatgggctaaagatatccagacaataattacttttaaaagtttttcatttttgaagcatgagaaaaagtagataatccattggtgatacaataaaacacagtttgaatgtta

SEQ ID NO: 72633 - DNA, 1466 bp, Homo Sapiens
  misc_feature (858)..(858): n is a, c, g, or t
gccgagaatgggtaagttgtctggagtcaggtgggcccacgtaggacagggtcacaaagcctgggtttgtttctgggtactttgcgcctctggggtgctagaggtggggcatggtggctggaagtaaaactgccaactctggccctcagaactctcaggtatagaagcccaggatgtctaataccctgtcccagtgcccgagagctgcctggtgtcaggtagagaggacactgtacctgggtgaatgatcagaccctggtagctaagaaggaacttgtccctttgagtcagtgtgcagaccccctttcaggccatgcctctgtgaaccctgtattgctggggccggaaggagcccctgagcctagccccttcccgtctgccctgtgtcctcactgcgtgtgggtatgacctctgcctggtggctggtgtatcccaactgggcaagagatggcagagggtcccccttgtgggtgcgcttggatgtgcagagccttctccatggattttcttccctgtaagtgccgggcccctcaccccagctgacaggctgttgctgtgcctgctcacacctgctcctgcaggcacactgggctagggacgaggaaggagcagccacaagtggtagaactgccttggtggacaccagcctcgccctgtctttatttcctgaatggtttgtgaacttgctcacctggaccactgtatcctgccactgtccttcctggtctcgcactgccactgcatggcctcctgtcactgtgaatcgtggcccagtctcagtttgtagtttctcattaaattggccctttcactcccccgccctgggcctctgctctcttgcctggcttccttcttttntgagggaaagagggtggggctgcaggcagtctactggcaggacgggaggctgagtcctcagggtctcacaccctcagtgctgatgccatgccaactgcctgggacaacaccaacacgtaaggacctaattaaaccaaaccagagtcgggtgtagaccagccctgggatttccagctgtgactgggccagggcacacgttggtctcggcagtggctgtaaggtcaccttccttcctctgatgctggtttcaaccatctatatatggcatccacgcatgggatctgcaagctggagccctcctacccgcaggcttgagcacagcatcatccagccctggggaggcgcacccttaagcaagacagactgggctgaggctgacaggcagaagactaacagagcgcagtctgcacacgcaggttctgggcgacctctggccctggccatctctgcactaactcatctgaattatgaaggtggcagtcttggtcagtagtttaaagagtttccctactttttaaccctttttgaaataaaacttttacaggtagtagattcctattaataaaattatttaagttcatgtttctcttttagagaatgaattgttt

SEQ ID NO: 72634 - DNA, 1059 bp, Homo Sapiens
  misc_feature (54)..(54): n is a, c, g, or t
  misc_feature (165)..(166): n is a, c, g, or t
  misc_feature (194)..(194): n is a, c, g, or t
  misc_feature (258)..(258): n is a, c, g, or t
  misc_feature (266)..(266): n is a, c, g, or t
  misc_feature (269)..(269): n is a, c, g, or t
gctacactatctcggctgttgtgttgatgtgacgatacatcacacagaacagtngactgtacgattatcgctcctataggattgcctcgagccagaatcgcacgagcagcgaatcagctgtgctgagagatattgtgggcaataggaccactgctcccctgaccnncagccatcagcccatcctgaggctctcntgacacaccaaggatagaacaccgtgtcagggcctacagcgaccagcaattgtcaccctcctcnagatgcgncanggtgaagaggtgtttcagtccctctccaagatcctggatgtggccagtttggaggtgctgaacgaggttaaccgaaggtccctgaagaagctggccagccaggccgactccacggagcaggtggacgacaccatcctgacatgagaggcctgggccagcagcagcattgccgctccacatctttgctcaatgttttcatttttgaaaatacatttgttccaatggggagcttggaagatggcgttcccagaaagtattttaatatcaatagaccacagccaaagccttaaatcaaacccacacacaactgaaaattgcctcctccatctctcaccttttcctgtggagaagagaaggaaaagcacacgcatgcgcctcagcaaatggcagcccaggagctgtttgtccagtttagcatggctaggtctggaactataatagcagggtcagactgtgggttcctcttctcctgtgcttgagctctggtttgagagctggcgctaccaacctttttcctatatcccgagtggggcacagacggtggatctctgcccagtgtggtgtgtctggcttggcttttcaatattgtgaggtctgaatggatctgacccctgtcagatgaaaatgattcacagctctggcagttcccaagtctggggaggggtataggtttgaaaggctgtttgaaagaggaatgtttaataaaggctttgatttaatcttgatataaacagatttttaaaaatctccacccattaaacatgaagcttcctgcatcaggaataaggaa

SEQ ID NO: 72635 - DNA, 792 bp, Homo Sapiens
ggttggcattatgaaaatatcttttaatacatttatttagcaagagaaaaattatcagaaaatgagaagcaccatttatagttcacaagaaatgcaacatggactccaatagaagtagatatcaataactgatacttcctctgtttatgaccccaaacatgctaaaatgctaaagtaatgcttgcaaagaatatgaatgacaaatgttatccagcagctttttggtttaaaatgattgccaatgactagcagcttcaatggtaacagtagggaggaagaacccttcagtacctaacaacgctgctgtctgctcctaagtggctttagttagagtcccatgttttaatggtaatactgcattgattttaaaggcatatgcagcaaaatgcggggggagggagagaaactggaagaaacataaaagttatatggttagtgtctttaaagtctaaaaatttaaactattgtttaaaaaaccttacatagttcacagctatcggcccacacagtaagcaaatatctgtgtgtaggatgggagccttcactttggagtggtttttgtaactctgtttacattaaaaaggacagaagagtgttttgttgcattgacaaggtcccattctttcctgtggagtataatccttgttgtccatgagtctcttgaatttgagatctttccttttgatgaaaacactaattttgctggtttttgagcaggaaaggtggtatttctccagtctttgtagatgaaggtcccatgagtgacgttcctcatccacaggatcctctaga

SEQ ID NO: 72636 - DNA, 1412 bp, Homo Sapiens
acaactttaaatacggaatataaataaattttacatttaaaaaataaaaggaaagcccccaaaaatataatcaccgactttacaaactgaaggaagcaggttttggaaggcgggaagggggaaagtgcagtaggtgggaagggaggtgggagctcagatcccaccccagggggtcttggggatcttttcccttctctcccccattcccagcccacgagctggtttcctaggaggagccaccagaggtggagctcagaaggatcaaagatggggaagtgtgcaagcagggaggggtgcgggcaaaagggctgcaccctcccttggagaccttctcccaggtgtcccacacccacctggaagggcagttgctggagcagaggactttgggaaatggaggtcatgtggacagcagtgttgcctccctgcccctaccacagtctccctcctatttggccactccaagccacaggctgcatcaggggcacagccagtccacaaggagtctttgtgtgaattaggaaaaggatccttttcctctttacctacatctgccagaaattgtcataataaatatacaaatcagctttatctatgatgtgaacagtgctccctgcatacaatgtccttgtgcagtacacaccctgcacaaccttacatggcagtcgtggctgggttggaatatgatgagcaggtcccttgctgccctggcctctagtcttctgccctagagaggagtgactgggatcatctggggccttaataaggggttcaagagccccttggtggagcagactgaagggccaggacaagaggaaaatgcagggtggaggtagagagatgaaaggaaccagaggaagaggtgaatcagagtggagtgtggggaggaaggggtggcaggaggcaggggatacccaggtcaccatctacagccacctcaacagcaaactccatctctaacccacctgagagggcacccagccacttggtgtgctggccacacccaccaagaggagtccacgtcttcaaaacgaaaacgaaaagaagccactgtgcacagaggcaccagggagacgacgtgactggtgtttgggcaccgtgggaggggttttctccaatctgtgtgcccgtctgtggtcttagccatggagtccgaggcagcctggcctgcctggaggtgcctcccctcagagctggccaggggttcagggatcaggcaggctatgctgagaggtcctcagggctcctcaggacagtccacagcgctcaggcgtggcccaggccaggtgcaggggaaggagcccgtttcccccaaagagcgaccccatcagtctctctcacactcttatcccaagttcttggagttaagggaagaagatggcgatggagttcagtccttctttttcttcttgagc

SEQ ID NO: 72637 - DNA, 1549 bp, Homo Sapiens
  misc_feature (420)..(450): n is a, c, g, or t
  misc_feature (503)..(503): n is a, c, g, or t
  misc_feature (1418)..(1441): n is a, c, g, or t
acacagcaaatcccaagccttcccagtctcacacctttccacccattcataaaaaaacacacgaatttctcgcaagttccaatatcactgtctctttatcatctaaatagggccagttggacacctcattgaaacaaaaaggctgatctagatgaagtactctttcttttcttcggagttgttctgtcctccttctgcattgattatagctgtgtctgcgtctgctgcgtcatcggctcctttggcttcatgagtgaagtatgtacctttatgtctggcaaaatagcgccccagaatgatgagcaagcacagcatggcgaacaccaccaccgccacgacgccaccgatcacggcatgatccactgccctgatcgagccttcttcacctgctcgggaatctgtgatgatggtaaggatggnnnnnnnnnnnnnnnnnnnnnnnnnnnnnnntgttgtgggaggagggatagttgtggggggatcgtatacatacagcatataanccgagtgagctttccccactatgtttgaagcttcacagcggtatgtaccataatctgttttgtttaggttattgatgaacaggttgggcccagacagtacggcgtgttgaggcatttcatcatcgactctcacccaagttaccatcacaggctggggcttcccgatggcttcacatgttaactcaagcgcgtccccttcccgggttaagccttgtagaggataagtcatctgaatgtgcacttgaggcttatactgtacttctagataccgctgggtctgcaggtttccagtgaccgcagggtgctccacctggcagatcactgggaccccatcgtcctccttgtgcaccttcagcatcagctgactggtcacagtgtacatgtctgaccactcttccacctccgatttgccttttagctctgtgttccctttgaaccacctgatagtcgtggctggcttgctggccatagcagtgcagttgacttcaatctcctcaccttccaccgcagtgtctttctggatatcgatcatcagattacgtggtgggaccaggactgtgatggtggtgtaacttttcctgtgggggatcggtatagagctggcaaaagtatcttccttcatcagaaattgagacgtttgtcaatgatactttgagttcactgctagaaaaattcagcaactgaaacctgctgtccttcaaaggcctgaagtccctgaaataaatggtctgcctgttgggattcagtagctgaatcacagagtcgtcactcttattgacttggcaactgatggtcgcaacctctccctcgatcactgtcacgtctttcgtaaacagattctgcccatcacctgtggggatcagtgccgcggcggagaagagcaacagcagaagccggagccggagcccgggaggnnnnnnnnnnnnnnnnnnnnnnnnacactgggatccgctcggcagcactacactcgccatgtcgggcacctgcctcagactccccggccgtaatggccgaattcccgggcatatgtccggtaccgtcgactg

SEQ ID NO: 72638 - DNA, 1412 bp, Homo Sapiens
ttaggctagtacgaggctgggtggtgaatcggcaccgaggcgccgcggcagcccccgagcagtggcccggcatcggcgccttcccggcgggcaagagtgagccatggagctacgtgtggggaacaagtaccgcctgggacggaagatcgggagcgggtccttcggagatatctacctgggtgccaacatcgcctctggtgaggaagtcgccatcaagctggagtgtgtgaagacaaagcacccccagctgcacatcgagagcaagttctacaagatgatgcagggtggcgtggggatcccgtccatcaagtggtgcggagctgagggcgactacaacgtgatggtcatggagctgctggggcctagcctcgaggacctgttcaacttctgttcccgcaaattcagcctcaagacggtgctgctcttggccgaccagatgatcagccgcatcgagtatatccactccaagaacttcatccaccgggacgtcaagcccgacaacttcctcatggggctggggaagaagggcaacctggtctacatcatcgacttcggcctggccaagaagtaccgggacgcccgcacccaccagcacattccctaccgggaaaacaagaacctgaccggcacggcccgctacgcttccatcaacacgcacctgggcattgagcaaagccgtcgagatgacctggagagcctgggctacgtgctcatgtacttcaacctgggctccctgccctggcaggggctcaaagcagccaccaagcgccagaagtatgaacggatcagcgagaagaagatgtcaacgcccatcgaggtcctctgcaaaggctatccctccgaattctcaacatacctcaacttctgccgctccctgcggtttgacgacaagcccgactactcttacctacgtcagctcttccgcaacctcttccaccggcagggcttctcctatgactacgtctttgactggaacatgctgaaattcggtgcagcccggaatcccgaggatgtggaccgggagcggcgagaacacgaacgcgaggagaggatggggcagctacgggggtccgcgacccgagccctgccccctggcccacccacgggggccactgccaaccggctccgcagtgccgccgagcccgtggcttccacgccagcctcccgcatccagccggctggcaatacttctcccagagcgatctcgcgggtcgaccgggagaggaaggtgagtatgaggctgcacaggggtgcgcccgccaacgtctcctcctcagacctcactgggcggcaagaggtctcccggatcccagcctcacagacaagtgtgccatttgaccatctcgggaagtgaggagagcccccattggaccagtgtttgcttagtgtcttcactgtattttctttaaaaa

SEQ ID NO: 72639 - DNA, 980 bp, Homo Sapiens
  misc_feature (908)..(908): n is a, c, g, or t
taggcaagtaactctaacgggtttaaggtagcgaggcctgggtggcgaattcggcacgaggctcctttaggcagctgaaaggggatttaggcccggaagatccgagtccatccgcggcggggagagggcaagcgggaccggtaggggccggagcagcggcggcggcgctcggactgtcccatccgccccgtattgaggcgctgggagcggcggggcgacaggaaagcgatggtgaaagcggggccgtgaggggggcggagccgggagccggacccgcagtagcggcagcagcggcgccgcctcccagagttcagacccaggaagcggccgggagggcaggagcgaatcgggccgccgccgccatggagctgagagtcgggaacaggtaccggctgggccggaagatcggcagcggctccttcggagacatctatctcggtacggacattgctgcaggagaagaggttgccatcaagcttgaatgtgtcaaaaccaaacaccctcagctccacattgagagcaaaatctacaagatgatgcagggaggagtgggcatccccaccatcagatggtgcggggcagagggggactacaacgtcatggtgatggagctgctggggccaagcctggaggacctcttcaacttctgctccaggaaattcagcctcaaaaccgtcctgctgcttgctgaccaaatgatcagtcgcatcgaatacattcattcaaagaacttcatccaccgggatgtgaagccagacaacttcctcatgggcctggggaagaaagggcaacctggtgtacatcatcgactttcgggctggccaagaagtacccgggatgcacgcacccacccagcacatccccctaatcgtggaaaacaagaaacctccacgggggaacggcgcggntaacgcccttccattcaaccacgcaccctttggaaattgaaaccaatccccggaaaagaatgactttggaag

SEQ ID NO: 72640 - DNA, 1223 bp, Homo Sapiens
gggccgtgaggggggcggagccgggagccggacccgcagtagcggcagcagcggcgccgcctcccagagttcagacccaggaagcggccgggagggcaggagcgaatcgggccgccgccgccatggagctgagagtcgggaacaggtaccggctgggccggaagatcggcagcggctccttcggagacatctatctcggtacggacattgctgcaggagaagaggttgccatcaagcttgaatgtgtcaaaaccaaacaccctcagctccacattgagagcaaaatctacaagatgatgcagggaggagtgggcatccccaccatcagatggtgcggggcagagggggactacaacgtcatggtgatggagctgctggggccaagcctggaggacctcttcaacttctgctccaggaaattcagcctcaaaaccgtcctgctgcttgctgaccaaatgatcagtcgcatcgaatacattcattcaaagaacttcatccaccgggatgtgaagccagacaacttcctcatgggcctggggaagaagggcaacctggtgtacatcatcgacttcgggctggccaagaagtaccgggatgcacgcacccaccagcacatcccctatcgtgagaacaagaacctcacggggacggcgcggtacgcctccatcaacacgcaccttggaattgaacaatcccgaagagatgacttggagtctctgggctacgtgctaatgtacttcaacctgggctctctcccctggcaggggctgaaggctgccaccaagagacagaaatacgaaaaggattagccgagaagaaaatgtccaccccccatccgaagtggtggggtaaaggcctaccccttccgaaatttgccaccataacctgaaaattctgcccggtccccttgcggttttgaaggaaaaaagctgaaactattacaacacagggagcgacattttgcggaaaatcgtgtttaatgcgaaagggggcttttcccccgtaggaatatcgggtaccggaacgggaacagagcacagacatatcggttgccgcctcagcttccatctcattatttctccaaacgatctatggaccgtaaccacatactgatgatcctttgtgaaaattacccatgcgcagcgcggtatatcaacctggagtaacatggtaacacaggtccgcagtccttctcagaagtagcgcgtataccgaattataat

SEQ ID NO: 72641 - DNA, 2297 bp, Homo Sapiens
  misc_feature (1969)..(1998): n is a, c, g, or t
  misc_feature (2260)..(2260): n is a, c, g, or t
tcccgggattgcgaatcgggccgccgccgccatggagctgagagtcgggaacaggtaccggctgggccggaagatcggcagcggctccttcggagacatctatctcggtacggacattgctgcaggagaagaggttgccatcaagcttgaatgtgtcaaaaccaaacaccctcagctccacattgagagcaaaatctacaagatgatgcagggaggagtgggcatccccaccatcagatggtgcggggcagagggggactacaacgtcatggtgatggagctgctggggccaagcctggaggacctcttcaacttctgctccaggaaattcagcctcaaaaccgtcctgctgcttgctgaccaaatgatcagtcgcatcgaatacattcattcaaagaacttcatccaccgggatgtgaagccagacaacttcctcatgggcctggggaagaagggcaacctggtgtacatcatcgacttcgggctggccaagaagtaccgggatgcacgcacccaccagcacatcccctatcgtgagaacaagaacctcacggggacggcgcggtacgcctccatcaacacgcaccttggaattgaacaatcccgaagagatgacttggagtctctgggctacgtgctaatgtacttcaacctgggctctctcccctggcaggggctgaaggctgccaccaagagacagaaatacgaaaggattagcgagaagaaaatgtccacccccatcgaagtgttgtgtaaaggctacccttccgaatttgccacatacctgaatttctgccgttccttgcgttttgacgacaagcctgactactcgtacctgcggcagcttttccggaatctgttccatcgccagggcttctcctatgactacgtgttcgactggaacatgctcaaatttggtgccagccgggccgccgatgacgccgagcgggagcgcagggaccgagaggagcggctgagacactcgcggaacccggctacccgcggcctcccttccacagcctccggccgcctgcgggggacgcaggaagtggctccccccacacccctcacccctacctcacacacggctaacacctccccccggcccgtctccggcatggagagagagcggaaagtgagtatgcggctgcaccgcggggcccccgtcaacatctcctcgtccgacctcacaggccgacaagatacctctcgcatgtccacctcacagaatagcattcctttcgaacaccacggcaagtagctgctcgtctcccatcggaaggcagcactggattcctggtcgggtggcttccagtggtcttcagtctgtcgtgcaccgatgagaactctccttattgctgtgaagggcagacaatgcatggctgatctactctgttaccaatggctttactagtgacacgtcccccggtctaggatcgaaatgttaacaccgggagctctccaggccactcacccagcgacgctcgtgggggaaacatactaaacggacagactccaagagctgccaccgctggggctgcactgcggccccccacgtgaactcggttgtaacggggctgggaagaaaagcagagagagaattgcagagaatcagactccttttccagggcctcagctccctccagtggtggccgccctgtactccctgacgattccactgtaactaccaatcttctacttggttaagacagttttgtatcattttgctaaaaattattggcttaaatctgtgtaaagaaaatctgtctttttattgtttcttgtctgtttttgcagtcttacaaaaaaaatgttgactaaggaattctgagacaggctggcttggagttagtgtatgaggtggagtcgggcagggagaaggtgcaggtggatctcaagggtgtgtgctgtgtttgttttgcagtgttttattgtccgctttggagaggagatttctcatcaaaagtcnnnnnnnnnnnnnnnnnnnnnnnnnnnnnnggacctcttcaacctgattttggcgtctcaccctccctcctcccgtaattgacatgcctgctgtcaggaactcttgaggccctcggagagcagttagggaccgcaggctgccgcggggcaggggtgcagtgggtgttaccaggcaaagcactgcgcgcttcttccccaggaggtgggcaggcagctgagagcttggaagcagaggctttgagaccctagcaggacaattgggagtcccaagattcaaggtggaagatgcgtntctggtcccttgggagaggactgtgaaccgagaggtg

SEQ ID NO: 72642 - DNA, 791 bp, Homo Sapiens
  misc_feature (718)..(736): n is a, c, g, or t
ccgcgggcaccttgcttgcatgcctcttcctccttcccgtcttcctgtcactcgttctgctgagcacgtgtcccagccacagaggcccctgtgcgtggcgggagacgcaggcgtctagactggggctaggcggtggcggtgcgtcccctccctgcccagcaccgtcactgtggtatctgcctggccggctcccccagccccatgctgaccttctcctgtgctttggctccgacagattcctggtcgggtggcttccagtggtcttcagtctgtcgtgcaccgatgagaactctccttattgctgtgaagggcagacaatgcatggctgatctactctgttaccaatggctttactagtgacacgtcccccggtctaggatcgaaatgttaacaccgggagctctccaggccactcacccagcgacgctcgtgggggaaacatactaaacggacagactccaagagctgccaccgctggggctgcactgcggccccccacgtgaactcggttgtaacggggctgggaagaaaagcagagagagaattgcagagaatcagactccttttccagggcctcagctccctccaagtggtggccgccctgtactccctgacgattccactgtaactaccaatcttctacttggttaagacagttttgtatcattttgctaaaaattattggcttaaatctgtgtaaagaaaatctgtctttttnnnnnnnnnnnnnnnnnnngaccgcgtatgcggccgcaagcttattccctttagttgagggtaattttagctac

SEQ ID NO: 72643 - DNA, 1496 bp, Homo Sapiens
  misc_feature (769)..(780): n is a, c, g, or t
  misc_feature (969)..(1044): n is a, c, g, or t
  misc_feature (1324)..(1380): n is a, c, g, or t
ccgaaaccactcgccctccactgactgcccctgtaccacatcaaacagtctcctctcctccacgcctccggggtctgggaagtctcaccccactgactgcccctgtaccacatcaaacagtctcctctcctccacgcctccggggtctgggaagtctcacctcactgatttcacgtaaaaaagaaggcggaggcccagcagccgccgccgccagctccccaacgtgcaaatccatttcagtttgaccgtgaacccccttccaattcgtgtcctcctccgcccccgcccctagctcccgctgctgcgcttccaacggggttctcgggtcatttcctagccccggtcacactggctggcctcctcccctcaacatctcctcctccggctgcagagggggcaaggggaaaagagggaggaaaaaaaagccccaaacgggaattcgcctgcgtggagtctctcagtcccggcgttcccccaaaacatctgccatcggcccaaattcgtcaccccggagccttctgtcttcatcacgcgtttaaaaaaaagggggggaaggggtgccctgggttctcccctcctttcttgaccaagaagcaaaataaaacaaaacccaaggtggtgaagccaggaaagggggagactcccttcaagtctcttagaaaactaactctcgccctcttgctgggggtgcagacacagtccggaagctcgttggaaagggggaagggggtctcttcaagccaaaggggagccaaactcgaaagtcgcnnnnnnnnnnnngccatcaacaacaacatcaataacaacaatcacaggtcgcccctgtctaccctcttcctcctccgcgtccctccggctgggcagagtgggtccccggcccgggaaggtgggggatgggagcgcgggtccaaaacgccgccgcgctccttgatccgacgacgagaacgcgggcgaacgagccctgcttannnnnnnnnnnnnnnnnnnnnnnnnnnnnnnnnnnnnnnnnnnnnnnnnnnnnnnnnnnnnnnnnnnnnnnnnnnnctcctctcctaccccccccggcccttctccctgcctgcgcgcccttcagtaggtgaaaaccaggttggagatgctggactcgagccagtctcccgagatcatctcgctcacctcgggcgtgcagtagtccgggaactcgaagtgcgagccggagccgggctcgaagttaaaatccaggtcccggtcgagcgccgacgacgaactgaagctgcccagggacatgctctcaaagtttgagctggggttcaggtcgagcaggtcgtcttcgaactcgtcgtcnnnnnnnnnnnnnnnnnnnnnnnnnnnnnnnnnnnnnnnnnnnnnnnnnnnnnnnnncgcgtgcgagggcgcgctggacggggcgggcgaggcggcgcgcaggctggcgtagccgcggtggtcggcgggcgagcggccggcggcgggggacgaggcggcgctgctgcggccgc

SEQ ID NO: 72644 - DNA, 421 bp, Homo Sapiens
  misc_feature (117)..(173): n is a, c, g, or t
gcggccgcagcagcgccgcctcgtcccccgccgccggccgctcgcccgccgaccaccgcggctacgccagcctgcgcgccgcctcgcccgccccgtccagcgcgccctcgcacgcgnnnnnnnnnnnnnnnnnnnnnnnnnnnnnnnnnnnnnnnnnnnnnnnnnnnnnnnnngacgacgagttcgaagacgacctgctcgacctgaaccccagctcaaactttgagagcatgtccctgggcagcttcagttcgtcgtcggcgctcgaccgggacctggattttaacttcgagcccggctccggctcgcacttcgagttcccggactactgcacgcccgaggtgagcgagatgatctcgggagactggctcgagtccagcatctccaacctggttttcacctactgaagggcgcgcaggca

SEQ ID NO: 72645 - DNA, 2231 bp, Homo Sapiens
  misc_feature (148)..(156): n is a, c, g, or t
  misc_feature (185)..(274): n is a, c, g, or t
  misc_feature (708)..(747): n is a, c, g, or t
  misc_feature (1433)..(1444): n is a, c, g, or t
  misc_feature (1635)..(1710): n is a, c, g, or t
agacgccccccggggtaagagatcccaagggtcgcccactcgcccgggccgggggtcggcggccaaagaggtgcaaacaccccgcctttgagtataaacaaattaaaagttgaaatttttgcccgttcggggaaggggacgtgtaatnnnnnnnnntacccacaagtgccccaaagaagcccggnnnnnnnnnnnnnnnnnnnnnnnnnnnnnnnnnnnnnnnnnnnnnnnnnnnnnnnnnnnnnnnnnnnnnnnnnnnnnnnnnnnnnnnnnntatgttgggccagtataaataccgtccacatataaaatggcatctgattacatttacaaggaaaaagaaatacgaggatggagcatcggtgaaggaaaaaaacacgtcttctcatttacacctataaggaataaacacacacactgagaaaaaatttggtcctgaattgtttttttaaagtccagcacagatttgagttgcgtttgaatcctttaaagagttaagaatgaaaaaaagctggtgataatttcgttgtaggaatcaaacatagcgccatctatctgctttttatattatcctacactattttaaaaactgctcaacagtcttatacagaaatctttaaaagatagacaggataacatgctatattaaccccaccattgaaataatccaacaccatcacgattccgattaagagaagaaaaaaatcnnnnnnnnnnnnnnnnnnnnnnnnnnnnnnnnnnnnnnnnccgaaaccactcgccctccactgactgcccctgtaccacatcaaacagtctcctctcctccacgcctccggggtctgggaagtctcacctcactgatttcacgtagaaaagaaggcggaggcccagcagccgccgccgccagctccccaacgtgcaaatccatttcagtttgaccgtgaacccccttccagttcgtgtcctcctccgcccccgcccctagctcccgctgctgcgcttccaacggggttctcgggtcatttcctagcgccggtcacactggctggcctcctcccctcaacatctcctcctccggctgcagagggggcaaggggaaaagagggaggaaaaaaaagccccaaacgggaattcgcctgcgtggagtctctcagtcccggcgttcccccaaaacatctgccatcggccaaattcgtcaccccggagccttctgtcttcatcacgcgtttaaaaaaagggggggaggggtgcgctgggttctcccctcctttcttgaccaagaagcaaaataaaacaaaaccaaggtggtgatgcaggaagggggagactccttcaagtctctagaaaactaactcgccttcttgctgggggtgcagacaagtccggaagctcgttggaagggggagggggtctcttcaaagccaaaggggaggccaaactcgaaagtcgcnnnnnnnnnnnngccatcaacaacaacatcaataacgacaatcacaggtcgcccctgtctaccctcttcctcctccgcgtccctccggctgggcagagtgggtccccggcccgggaaggtgggggatgggagcgcgggtccaaaacgccgccgcgctccttgatccgacgacgagaacgcgggcgaagccagccctgcttacnnnnnnnnnnnnnnnnnnnnnnnnnnnnnnnnnnnnnnnnnnnnnnnnnnnnnnnnnnnnnnnnnnnnnnnnnnnntcctctcctaccccccccggcttggaggaggcggcggccgaggagctggagttggcgttgccggacttcaccctcttcctgggccggtacttgtagtcggggtagtcagccatgtgcttgaggcgcagccgctccgcctctcgaatgaaagggatcttgtcgctgtctttgagcagcttccagcgtttgcccagccgcttggagatctcggcgttgtgcatgtcgggcgactgctccatgatcttgcgccgctcgatctgcgaccacaccatgaaggcgttcatgggtcgcttgatgtgcccactcggggtcttgcaccagctcgggtcgtcggccttgccgcccgtggaggcggtggagccgggcgtgggggaggaggcgattcccagctcgaggccggcgcccgagtccgagctctcgccggccagcagcgcttccgtgttctcggcattgttggtttgctgcaccatggcctcggctcggcgggcgcccacgcgcgctcacaccctcgcggcggccgc

SEQ ID NO: 72646 - DNA, 495 bp, Homo Sapiens
  misc_feature (117)..(173): n is a, c, g, or t
  misc_feature (458)..(458): n is a, c, g, or t
  misc_feature (461)..(461): n is a, c, g, or t
  misc_feature (464)..(464): n is a, c, g, or t
gcggccgcagcagcgccgcctcgtcccccgccgccggccgctcgcccgccgaccaccgcggctacgccagcctgcgcgccgcctcgcccgccccgtccagcgcgccctcgcacgcgnnnnnnnnnnnnnnnnnnnnnnnnnnnnnnnnnnnnnnnnnnnnnnnnnnnnnnnnngacgacgagttcgaagacgacctgctcgacctgaaccccagctcaaactttgagagcatgtccctgggcagcttcagttcgtcgtcggcgctcgaccgggacctggattttaacttcgagcccggctccggctcgcacttcgagttcccggactactgcacgcccgaggtgagcgagatgatctcgggagactggctcgagtccagcatctccaacctggttttcacctactgaagggcgcgcaggcagggagaagggccggggggggtaggagaggagaaaaanaanagngaaaaaaagaaacgaaaaggacagacgaaga

SEQ ID NO: 72647 - DNA, 255 bp, Homo Sapiens
  misc_feature (81)..(137): n is a, c, g, or t
gccgctcgcccgccgaccaccgcggctacgccagcctgcgcgccgcctcgcccgccccgtccagcgcgccctcgcacgcgnnnnnnnnnnnnnnnnnnnnnnnnnnnnnnnnnnnnnnnnnnnnnnnnnnnnnnnnngacgacgagttcgaagacgacctgctcgacctgaaccccagctcaaactttgagagcatgtccctgggcagcttcagttcgtcgtcggcgctcgaccgggacctggattttaactttc

SEQ ID NO: 72648 - DNA, 439 bp, Homo Sapiens
  misc_feature (117)..(173): n is a, c, g, or t
gcggccgcagcagcgccgcctcgtcccccgccgccggccgctcgcccgccgaccaccgcggctacgccagcctgcgcgccgcctcgcccgccccgtccagcgcgccctcgcacgcgnnnnnnnnnnnnnnnnnnnnnnnnnnnnnnnnnnnnnnnnnnnnnnnnnnnnnnnnngacgacgagttcgaagacgacctgctcgacctgaaccccagctcaaactttgagagcatgtccctgggcagcttcagttcgtcgtcggcgctcgaccgggacctggattttaacttcgagcccggctccggctcgcacttcgagttcccggactactgcacgcccgaggtgagcgagatgatctcgggagactggctcgagtccagcatctccaacctggttttcacctactgaagggcgcgcaggcagggagaagggccgggggg

SEQ ID NO: 72649 - DNA, 416 bp, Homo Sapiens
  misc_feature (117)..(173): n is a, c, g, or t
gcggccgcagcagcgccgcctcgtcccccgccgccggccgctcgcccgccgaccaccgcggctacgccagcctgcgcgccgcctcgcccgccccgtccagcgcgccctcgcacgcgnnnnnnnnnnnnnnnnnnnnnnnnnnnnnnnnnnnnnnnnnnnnnnnnnnnnnnnnngacgacgagttcgaagacgacctgctcgacctgaaccccagctcaaactttgagagcatgtccctgggcagcttcagttcgtcgtcggcgctcgaccgggacctggattttaacttcgagcccggctccggctcgcacttcgagttcccggactactgcacgcccgaggtgagcgagatgatctcgggagactggctcgagtccagcatctccaacctggtttcacctactgaagggcgcgca

SEQ ID NO: 72650 - DNA, 1487 bp, Homo Sapiens
  misc_feature (259)..(326): n is a, c, g, or t
  misc_feature (942)..(969): n is a, c, g, or t
ccgccccgtgcttttccggcgtgcgcccgttcgttgggaaacaccgggtggagatggtggtctgagccgtttccggagtcttctgcgttcacctgggctggcataagtccgggaacttcgaagtgcgatccggaccgggcctcgaagttaaatcgcggtcccggttcgagccccgacgacgacctgaaacgccccagggaacagctctcaaagttgagctggggttcaggtcgagcagtcgtcttcgaactcgtcgtcnnnnnnnnnnnnnnnnnnnnnnnnnnnnnnnnnnnnnnnnnnnnnnnnnnnnnnnnnnnnnnnnnnnngcgcgctggacggggcgggcgagccgcagccgctccgcctctcgaatgaaagggatcttgtcgcttgtctttgagcagcttccagcgtttgcccagccgcttggagatctcggcgttgtgcatgtcgggcgactgctccatgatcttgcgccgctcgatctgcgaccacaccatgaaggcgttcatgggtcgcttgatgtgcccactcggggtcttgcaccagctcgggtcgtcggccttgccgcccgtggaggcggtggagccgggcgtgggggaggaggcgattcccagctcgaggccggcgcccgagtccgagctctcgccggccagcagcgcttccgtgttctcggcattgttaggtttgctgcaccatggcctcggctcggcgggcgcccacgcgcgctcacaccctcgcggcggccgccgcgcgatcgccgggccctcccggttccccgggccaagcacacgccgaacgggaagacgcgcgcggcggccgaactggcccctcaactcctcgcaggggcggaggtgggtaaagagagaaaagtccccaaaagatttggggaaggagttctccgcctctcgcagaggagttatagttcccaggctggagagnnnnnnnnnnnnnnnnnnnnnnnnnnnnaccgcgctgcagtttgctgtctctcggctgagtctggagaccgtgctaaagtagagaggagtttctcgaatgctggttgctgaagcttccaatgcaagtttctcgcggcctcccaggcaagtctttcgggtgagtacatccttgaccctgaagcagttgattccagttcacgagcgctctcggtagctcaggaaagcgacatagtctctagcacttagtccctctcctacaatgcaaagcaaaaaagactgtggctccaggactctctgtgggcggaatcggcactaaggagttggtgcaattattttgttgcaaggtaggaagccaaaaagcctgcatgcaacagactggcatgaataaatgtatgtttccccctcccttctgcaagaagggagctggtaatggcaggagttcctccagtgcagactcttaaagagcgtgcaagaactagagacccgacagcgaaacaggcctcttcccctcacacacagtttctcttgctgcagcttagagcaccc

SEQ ID NO: 72651 - DNA, 569 bp, Homo Sapiens
  misc_feature (471)..(517): n is a, c, g, or t
cgcacgagacccagcggcccgggttggagcgtccagccctgcagcggatcatggtgcagcaggcggagagcttggaagcggagagcaacctgccccgggaggcgctggacacggaggagggcgaattcatggcttgcagcccggtggccctggacgagagcgacccagactggtgcaagacggcgtcgggccacatcaagcggccgatgaacgcgttcatggtatggtccaagatcgaacgcaggaagatcatggagcagtctccggacatgcacaacgccgagatctccaagaggctgggcaagcgctggaaaatgctgaaggacagcgagaagatcccgttcatccgggaggcggagcggctgcggctcaagcacatggccgactaccccgactacaagtaccggccccggaaaaagcccaaaatggacccctcggccaagcccagcgccagccagagcccagagaagnnnnnnnnnnnnnnnnnnnnnnnnnnnnnnnnnnnnnnnnnnnnnnntgccaagacctccaagggctccagcaagaaatgcggcaagctcaaggccccc

SEQ ID NO: 72652 - DNA, 223 bp, Homo Sapiens
ccgaaaccactcgccctccactgactgcccctgtaccacatcaaacagtctcctctcctccacgcctccggggtctgggaagtctcacctcactgatttcacgtagaaaagaaggcggaggcccagcagccgccgccgccagctccccaacgtgcaaatccatttcagtttgaccgtgaacccccttctgtcgtcttctcgcagccgtatagtagtagtaggc

SEQ ID NO: 72653 - DNA, 405 bp, Homo Sapiens
ggccgcagcagcgccgcctcgtcccccgccgccgggcgctcgcccgccgaccaccgcggctacgccagcctgcgcgccgactcgcccgccccgtccagcgcgcactcgcacgcgtactcctcggactcgttccactcctactcttccttctcctccggctcctcgtcctccgacgacgagttcgaagacgacctgctcgacctgaaccccagctcaaactttgagagcatgtccctgggcagcttcagttcgtcgtcggcgctcgaccgggacctggattttaacttcgagcccggctccggctcgcacttcgagttcccggactactgcacgcccgatgtgagcgagatgatctcgggagactggctcgagtccagcatctccaaccaggttttcacctactga

SEQ ID NO: 72654 - DNA, 452 bp, Homo Sapiens
  misc_feature (280)..(336): n is a, c, g, or t
ctcctctctaccaccccccggcccttctccctgcctgcgcgcccttcagtaggtgaaaaccaggttggagatgctggactcgagccagtctcccgagatcatctcgctcacctcgggcgtgcagtagtccgggaactcgaagtgcgagccggagccgggctcgaagttaaaatccaggtcccggtcgagcgccgacgacgaactgaagctgcccagggacatgctctcaaagtttgagctggggttcaggtcgagcaggtcgtcttcgaactcgtcgtcnnnnnnnnnnnnnnnnnnnnnnnnnnnnnnnnnnnnnnnnnnnnnnnnnnnnnnnnncgcgtgcgagggcgcgctggacggggcgggcgaggcggcgcgcaggctggcgtagccgcggtggtcggcgggcgagcggccggcggcgggggacgaggcggcgctgctgcggccgc

SEQ ID NO: 72655 - DNA, 2227 bp, Homo Sapiens
  misc_feature (449)..(457): n is a, c, g, or t
  misc_feature (1102)..(1124): n is a, c, g, or t
  misc_feature (1135)..(1144): n is a, c, g, or t
  misc_feature (1525)..(1559): n is a, c, g, or t
aacaattgacagtttattttattaggccatggcctaagggaagggggccaggggactccttaagacagcctaccatgtgtcaccaattctgaaagattttccttctagtaatgaatacactcaatgggactgggcggtgagggaaaggcacaataaaaccagtctccattcagcctctagccctcaggggaaacgaaatcaaatatatagttaaggtaccattccttaaaaaaatcccatcagcatctaatgggtttaattcatccacaggaagattaattgcttaaaattctatatttcccttctgctctggttctcagttttaacaggggagataaaatgaaaacaggatttacttttttgttccttaaaaattgaactttgattttaatctatcagtccaaatacattcaacaatagcaaccctctgttcaatcttctggatattnnnnnnnnntccaagtgcactgccatccatttgaagtagtaagtcacaggtaaatcatatcctatcattaatgaaatgaaatggggacgaaaagtggcagaaaaggaatacgggagactccctccaacaggtctaatgtgttttctaggagaaagaatattcatgtgttaaactctcaaaagtgttaaacatccaacatcccctatgtggacatttcaacaaatatttttgccaaatatgagacaggctcactctccactgtggatctggaactttcaagaaaaactatcaccaagccaagtctgcctttttaagccaagtctgcctccaggagaatttgttgtgtttgcttgttcttactattgtgttgttatgaaaaccagtaatgagttcagcttgcaacccaggtgggaagttagagaggggaacctgtgtaagttgaagtttgtcacagtaggcagaacagtcgctttgcagcccaggcccatctcagggtgcactgcttcacagctacactgcaaagtgttaaaaatcctcccacccaccccaggaatatatatatatgtatattaaaaaaaatcccctgtccatctctcagtacacaaaaggacctcatcacactgcaaaaatagcagtacccactttggtcaattnnnnnnnnnnnnnnnnnnnnnnngcatacattannnnnnnnnnaaatctgtgtacttacctataataaccaatacagctaaaagcactacctacataggcaaaacttggtattgcataattcgtataaatttgaaacccctcccccccaaatattaattggaagatgaaaaacatgaaaggttaatagaaaaaaacaccaaaatactgaaaatattgctggtcgattacaatttttaagcggcaactatacacagccatgatatgctttataaatgtgagataaaggtataactgtctaaaaaatccatgatgtcacacatttttcttcgtctggagtacaaaatattttgtcataaaaatggtaaagatttaaaatgataataaatgcagcaaaacaagtgtagtgatgtcactttgttgtannnnnnnnnnnnnnnnnnnnnnnnnnnnnnnnnnnagatttcaaggcaaggcacgtaatgtggacattatatcttcgtgcaaattaggattactggaaagagtatttttaattaaaattttaagagacatagaggcaaaatgtgtctgcccatgcacactatggatctgtcaatacaagaaatttgttgaacaaggctaatgtctgaaagcaccatgcaagttttcagcaccctgattacatttgttttctcaagagtgcgtttttatatcctacaccctggcgttcccagtttgtaaactgtaagctttacccttgtgacatggatttgcctgcctctttgtctctataatgcagattttatagaaccttttgtacaccctatgggttcttgatgcaaccagtaattttaaataaataaattctacctccaaggaggctgcagctaaaccaacataagtgctgtgttttcattaattttatttttctcaagcacatgatttgtcttgatttaatgcctttttaatgccctcaaaaactgaggggaaaataaattcgttcaaaattattttaaattctttttaatcccctcaatttagagtccaagggctgaaggacttataatcatgattcccctttagatataaatttataaattgcacttgcctctgttaagtgtttcttttgtggggaaaaattatatt

SEQ ID NO: 72656 - DNA, 1019 bp, Homo Sapiens
  misc_feature (671)..(698): n is a, c, g, or t
tttttgatttatatatgtacattttattagaattcttcagaactgtcaacaattggacaacatacaggaataaaacacgtggaacaccaacatcctttaaacttacgccgcttatgtatttacacataaagttactgtatatataaaaaatattttcaaggactcatgggcttgggaatattcaaaagacattattgctacatttcaatatttacaaaaaaagccacaaaataatttcaaacattaagccactgcaaagaaacatctgatgtaagaaaaaattataaaaatataaactttcaagaatatccaagacaaaactctcaatgaagtgcccctgaagtacctagacatctataactaacaaccacttttcttactatcattgaagtcaatagaaacacaaaggaatttttcagacaaagtatggcaaacaacaatctcttgggtgacaacacaaccccaaaatctgttaactttggaaaggtgcgagagcatagaactccagtgcaaatggttacttccagataacggccacagttctctaaatgtagtctaagaaatgtagaagggggaaaccataaaggcaacatacctgaatctttcaagacaacacacaaactctgccatgtacacatttgccttttatattgggcagtgaggaaggggannnnnnnnnnnnnnnnnnnnnnnnnnnnaaagaggtaaactacaagaataatatccaggctacagtctaaagggtaaaatttaaatgtttcagtgagacagtagcattatggaaggtctaaggaacaggtacagtaagatgagtctaaataacagagtgccttaagtgcaggtgaactgcaaatacatagggactgatgccttccacttcctctgcaccactatggaagcttctggtaagctactctagacagctatgtgaaaagaaacaagagcagtactaataatgaaagccaagttacttttcaggtactaaaggaccctcttggactcagggcaaaaatacccct

SEQ ID NO: 72657 - DNA, 1082 bp, Homo Sapiens
  misc_feature (1001)..(1036): n is a, c, g, or t
gtcagttgtcaaaaagcaggtgttaacgaggcagtactatacggtcctaaggtagcgaggcctgggtggcgtgcggtccccgcctgaccgccccgggcttaagggagcctggctaggccggcagccggatggtcccgcagctcggggccggccatgcttcgcggtccgtggcgccagctttggctctttctcctgctgctgctcccgggcgcgcctgagccccgcggcgcctccaggccgtgggagggaaccgacgagccgggctcggcctgggcctggccgggcttccagcgcctgcaggagcagctcagggcggcgggtgccctctccaagcggtactggacgctcttcagctgccaggtgtggcccgacgactgtgacgaggacgaggaggcagccacggggcccctgggctggcgccttcctctgttgggccagcggtacctggacctcctgaccacgtggtactgcagcttcaaagactgctgccctagaggggattgcagaatctccaacaactttacaggcttagagtgggacctgaatgtgcggctgcatggccagcatttggtccagcagctggtcctaagaacagtgaggggctacttagagacgccccagccagaaaaggcccttgctctgtcgttccacggctggtctggcacaggcaagaacttcgtggcacggatgctggtggagaacctgtatcgggacgggctgatgagtgactgtgtcaggatgttcatcgccacgttccactttcctcaccccaaatatgtggacctgtacaaggagcagctgatgagccagatccgggagacgcagcagctctgccaccagaccctgttcatcttcgatgaagcgggagaagctgcacccaagggctgctgggaggtccttggggccacccttaaaaacgcccggccccctgaagggcccaaagggctgaaatcccccatgggaacaaaccctttccggggttcccccagaaaatttccccnnnnnnnnnnnnnnnnnnnnnnnnnnnnnnnnnnnncccccaaaaaattggcccaaaggggtggaaatgggccccccccggg

SEQ ID NO: 72658 - DNA, 2190 bp, Homo Sapiens
  misc_feature (1391)..(1405): n is a, c, g, or t
  misc_feature (2010)..(2128): n is a, c, g, or t
gccggccatgcttcgcggtccgtggctgccagctttggctctttctcctgctgctgctcccggtgcgcgccatgagccctcgtggcgcctccaggccgtgggagggaaccgacgagccgggctcggcctgggcctggccgggcttccagcgcctgcaggagcagctcagtggcggcgggtgccctctccaagcggtacgtggacgctcttcagcgtgccaggtgtggcccgacgactgtgacgaggacgaggaggcagccactggggcccctgggctggcgccttcctctgttgtggccagcggtacctggacctcctgaccacgtggtactgcagcttcaaagactgctgccctagaggggattgcagaatctccaacaactttacaggcttagagtgggacctgaatgtgcggctgcatggccagcatttggtccagcagctggtcctaagaacagtgaggggctacttagagacgccccagccagaaaaggcccttgctctgtcgttccacggctggtctggcacaggcaagaacttcgtggcacggatgctggtggagaacctgtatcgggacgggctgatgagtgactgtgtcaggatgttcatcgccacgttccactttcctcaccccaaatatgtggacctgtacaaggagcagctgatgagccagatccgggagacgcagcagctctgccaccagaccctgttcatcttcgatgaagcggagaagctgcacccagggctgctggaggtccttgggccacacttagaacgccgggcccctgagggccacagggctgagtctccatggactatctttctgtttctcagtaatctcaggggcgatataatcaatgaggtggtcctaaagttgctcaaggctggatggtcccgggaagaaattacgatggaacacctggagccccacctccaggcggagattgtggagaccatagacaatggctttggccacagccgtcttgtgaaggaaaacctgattgactacttcatccccttcctgcctttggagtaccgtcacgtgaggctgtgtgcacgggatgccttcctgagccaggagctcctgtataaagaagagacactggatgaaatagcccagatgatggtgtatgtccccaaggaggaacaactcttttcttcccagggctgcaagtctatttcccagaggattaactacttcctgtcatgaaggctagaggaagacttcctggaactgcctttcttccactaacaggaccctgggacctgtaggagcaccccgtttgggactgtgaggtgtttgagggtgtggactggcatccagcagccactaacaaacacacaactggtgtgtaaaaggcaggccttacattagaagccaagccaatccnnnnnnnnnnnnnnnggaggtcccaccgagatagataggaacttggattgctgaattcaaaaacagagcccattcttaagatcacttggtgccttaaagacacgcattccaaagtggaatgtggttgaagaaagtgggccaggtggttgaagaaagccatgtgggagctcagcaaatcccaagggcttattatgacactccagatggtctccttagcatctcagctcttctgcaaggaagagcttgggtgttaggcctcagaggctgtagggtccttgggttacagagccggggagaacgaagttctgtgacccaggggtggagaatacactctaggtttgcgggctggtgggctttcaaattggtacttccagaggaaagccaagctgcttctgttgtgagcgaatcagccaagagcctgaggctgaagggaaaagtacacagaggaagatattttacaaaccaggtcagtgtaggccaagacttatggtctacagattttggcgggggaggggggaccttttcaaagacaatagggggtcttgacatgtttgttgtatgtaaagatgataagattaaaatttttgatttttctaaaaaacctcgtgccgaattctttnnnnnnnnnnnnnnnnnnnnnnnnnnnnnnnnnnnnnnnnnnnnnnnnnnnnnnnnnnnnnnnnnnnnnnnnnnnnnnnnnnnnnnnnnnnnnnnnnnnnnnnnnnnnnnnnnnnnnnngtgtaagctggggggcctaagagtgactactcaattattgcgttgcccatggcgcttcaatc

SEQ ID NO: 72659 - DNA, 276 bp, Homo Sapiens
gggcagtggtatcaacgcagactggccattacgggccgggttggtacttccagaggaaagccaagctgcttctgttgtgagcgaatcagccaagagcctgaggctgaagggaaaagtacacagaggaagatattttacaaaccaggtcagtgtaggccaagacttatggtctacagattttggcgggggaggggggaccttttcaaagacaatagggggtcttgacatgtttgttgtatgtaaagatgataagattaaaatttttgatttttccaa

SEQ ID NO: 72660 - DNA, 1508 bp, Homo Sapiens
  misc_feature (1306)..(1365): n is a, c, g, or t
agtaactataaccggtttaaggtagcgaggcctgggtggcgaattcggcacgaggactgaaaggtctggggagaaggcgccgtgtccgggtgtggagaggggcgtcgtggaagcgagaagagtggcccgtccctctcctccccctttccctctttcggaaagtggtttctgcggggcccgggagcctcggagtaccgaacctcgatctccggggcggggtccttggtggggactgagcgccccctcccggggacgggcggtctggccgcggagtcccctgcgggagcgtgattggctggaaacggtcccgaacccccaggggagcccgatccctgggggaccctggcttcggactccagtatctgtcgtcgcagggtccctgccctagtggcctatgtcccttgctcggggccatggagacactgcggccagtacggcggcgcctctgtctgaagaaggggaagtgacctccggcctccaggctctggccgtggaggataccggaggcccctctgcctcggccggtaaggccgaggacgagggggaaggaggccgagaggagaccgagcgtgaggggtccgggggcgaggaggcgcagggagaagtccccagcgctgggggagaagagcctgccgaggaggactccgaggactggtgcgtgccctgcagcgacgaggaggtggagctgcctgcggatgggcagccctggatgcccccgccctccgaaatccagcggctctatgaactgctggctgcccacggtactctggagctgcaagccgagatcctgccccgccgggctcccacgccggaggcccagagcgaagaggagagatccgatgaggagccggaggccaaagaagaggaagaggaaaaaccacacatgcccacggaatttgattttgatgatgagccagtgacaccaaaggactccctgattgaccggagacgcaccccaggaagctcagcccggagccagaaacgggaggcccgcctggacaaggtgctgtcggacatgaagagacacaagaagctggaggagcagatccttcgtaccgggagggacctcttcagcctggactcggaggaccccagccccgccagccccccactccgatcctccgggagtagtctcttccctcggcagcggaaatactgattcccactgctcctgcctctagggtgcagtgtccgtacctgctggagcctgggccctccttccccagcccagacattgagaaacttgggaagaagagagaaacctcaagctcccaaacagcacgttgcgggaaagaggaagagagannnnnnnnnnnnnnnnnnnnnnnnnnnnnnnnnnnnnnnnnnnnnnnnnnnnnnnnnnnnctattgaacacctatagagagagtgtgtgtgttttctattgaacatctatatagagagagtgtgtgagtgtgtgttttctattgaacacctattcagagacctggactgaattttctgagtctgaaataaaagatgcagagct

SEQ ID NO: 72661 - DNA, 2864 bp, Homo Sapiens
ggtaccggtccggaattcccgggatatcgtcgaccccgcgtccggtcatccagagtgtcctgcaggccatcaggaagaccgtgtgtgactgggagacggggcatgagcccttcaatgacccagccttgcggggcgagaaggaccccaagagcggcttcgacataaaagtaccacgccgcgccgtgggaccctccagcactcagctttacatggtgagaaccatgctagagtccctcattgcagacaaaagtggttccaagaaaaccttgagaagtagccttgaggggcccaccatattggacatagaaaaatttcatcgagagtcattcttctacactcacttgataaatttcagtgaaacgctgcagcagtgctgtgacctttcgcagctgtggttccgagagttcttcctggagctgaccatgggcaggaggatccagttccccattgagatgtcgatgccctggatcctgacggaccacatcctggagaccaaggaggcatcgatgatggagtacgtgctctactccctggacctgtacaatgacagcgcccactacgcgctcaccaggttcaacaagcagttcctgtacgacgaaattgaggccgaggtgaatctatgttttgaccaatttgtttacaagctagcagaccagatatttgcctattataaggttatggcaggaagtttgcttcttgataaacggttacgatcagaatgcaagaatcagggagccacgatccacctcccgccgtctaaccgctacgagacgctgctgaagcagaggcatgtgcagctcctcggcagatcaatagacctcaatcgtctgatcacccagcgcgtctcagcagccatgtataagtccctagaactggcgattggacgatttgaaagtgaagatttgacctccatagttgagctggatggcctgttggaaatcaaccgcatgacccacaagctgctgagccggtacctgacgctggacggcttcgacgccatgttccgggaggccaaccacaacgtgtcagcgccctacgggaggatcaccctgcacgtcttctgggagctcaactatgacttcctgcccaactactgctacaacggctctaccaaccggtttgttcggacagtgttaccattttctcaggaatttcaaagagataagcagcctaatgcacagcctcagtatctgcatggatccaaggctttgaacttggcctactccagcatttacggcagctaccggaacttcgtgggacctccacactttcaagtcatctgccggcttctcggctaccagggtatcgccgtggtcatggaggagctgctgaaggtcgtcaagagcctgctgcaaggcacaatcctgcagtacgtgaagacgctgatggaggtgatgcccaagatctgccgcctgccccggcacgagtacggctctcctggtatcctggagttcttccaccaccagctgaaggacatcgtggagtacgcagagctgaagacggtgtgcttccagaacctgcgggcaggtggggaacgccatcctcttctgcctgctcatcgagcagagcctgtcttcagaagaagtgtgtgacctgctgcacgcggctcctttccagaacatcttgccgcgagtccatgtgaaagagggggagagacttgatgccaaaatgaaaagactagaatcaaagtacgccccgctgcatcttgtcccactgattgaaagactggggacccctcagcaaattgccatcgcaagagagggggacctgctgacaaaggagcgcctctgctgcggcctgtccatgtttgaggtcatcctgacacggatccggagctttctggatgaccccatctggcgcgggcctctgcccagcaatggggtcatgcatgtggaccagtgtgtggagtttcacagactgtgggagtgccatgcagtttgtctactgcattcccgggggggacacaccagttcacagtcgagcagtgctcttggtgatgggctacactgggctggctgtatgatcatcgtacttcttgggcagcagcggcgttttgctgtgctggatttctgctaccatctacttaaagtccagaaacatgatggcaaagatgagattattaaaaatgtgcctttgaagaagatggtggagagaattcgcaagttccagattctcaatgatgagatcatcaccatcctggataagtacctgaagtcaggcgacggggagggcacgccagtggagcatgtgcgctgcttccagccgcccatccaccagtccctcgccagcagctgagggcacgcgctgcactccgtaactcaacatggcatgcctttctctccgtaaactatttagtgagatttttagggactatttttcagtatctctgtacctgttaaagggggtgcttttcgatctaaaaacttaattttataaaattgacttatttttctagactaaaattgtatatgcttttggtaattaggaactcttgagaatattggctgctgattgttgccatcacgttcctacaaaattgtttttctatgggatgttctggcagctgtgtcataaaatgctgctgggttcattcattcattccataagaaacttaataccagcaaatgcattaaatcccttgccagttaccattaactgtaactatttagcttttgtttagggatctttctgatggtcttttatgagcaatcttagttctaagtcattgttcccatcccttttttgtgtgtttcagaaaatagtgaacttgattcccctgcttccactaaatccagttgtgacaaaatctaacgtgacatcagatcgaaaggttatagaaataaaactaatgagatctaaaaaaa

SEQ ID NO: 72662 - DNA, 1041 bp, Homo Sapiens
gtggaccggtccggaattcccgggatgagagcacaggtcagggctgcaggtacagcactgggccaggcattgcgggccactgtgctggctgtcaagggagctgccctgggctacccatccagccctgccatccaagagatggtgcagtgtgtaacagaactggcagggcaggccctgcaattcactaccctgctcactagcctggctccatgaaggtcctttggcacagctctgctcctcccctgcctgccaaagcccccctttaggccttgggtggctggaaggctttgttaagggactaggagaaatgggggtatctttcccctttcctgccctttctgctcatctcaacctctcacagaggtgtcttctccccctaacctacagctttttgtacaagccattttgtgtaaattatttatatttaatattattccctgctttgtcaggagcaggtactaggctctggggcagtgaggaactagatccttctctcctcagcctagggtggaggtcactgcactaccacccacctctggaagactggctgtgaaaagtcaggtggcagaaacctggggccacatagagcctctctcttttcctgtttcttggctctagaagatcagcactgcactgttagctgagagtgcgggcaagacataaactgtccagagtttgaaggttctcggaaagaccggagggcttctccccacagaaggcggagagagctggggctcagacatgggtgtgcaccttaataaaccctgctgtctgcctccctgactctgcttcttgggagcatggtgagcagccctggtgctcagcagccatacctatgggacacacactacgaaaaggatgcctttagggtttgggggagattttactcctttcttcaacaactattcactggacaagttctctgctcccatgacgcgccaggcacagttctgcaagtatattgtgaatgtattgttctagtgggatacacaaataagtcagttaaaatacataaataaaaacataaacctgccataaaaa

SEQ ID NO: 72663 - DNA, 1057 bp, Homo Sapiens
  misc_feature (23)..(23): n is a, c, g, or t
  misc_feature (92)..(92): n is a, c, g, or t
  misc_feature (106)..(106): n is a, c, g, or t
  misc_feature (164)..(164): n is a, c, g, or t
  misc_feature (179)..(179): n is a, c, g, or t
  misc_feature (250)..(250): n is a, c, g, or t
  misc_feature (253)..(253): n is a, c, g, or t
  misc_feature (314)..(315): n is a, c, g, or t
  misc_feature (334)..(334): n is a, c, g, or t
  misc_feature (810)..(848): n is a, c, g, or t
ttgcctggagccaagatccgccngagcctggtcaaatcaggatgaaaacatatgtggtgattgctcgagagtctatcatggtatcatgagtntgcaagacgctctnccaagagcatccggaagatcacagatgatgcacaatcttgaagatatgggatacagantatgagccaggagtntaaatcagatgtggagttgccttccgatatgtaccacaattctagatgatgcaaaaattatcaagccatgntangaagctactgttgagcagatgatgtgcgattgcaatccagtccgcgctgatcagttttacnntctcttcccccaagagatntttattagatattgcaaggcaaagaaatcaaacccctttgccattgatcaagccatattcaggtcctaggttgccacctgatagatactgcttaacagctccaaactataggctgaaatctttacagaaaaaggcatcaacttctgcgggaagaataacagtcccgcggttaagtgttggttcagttactagcagaccaagtactcccacactaggcacaccaaccccacagaccatgtctgtttcaactaaagtagggactcccatgtccctcacaggtcaaaggtttacagtacagatgcctacttctcagtctccagctgtaaaagcttcaattcctgcaacctcagcagttcagaatgttctgattaatccatcattaatcgggtccaaaaacattcttattaccactaatatgatgtcatcacaaaatactgccaatgaatcatcaaatgcattgaaaagaaaacgtgaannnnnnnnnnnnnnnnnnnnnnnnnnnnnnnnnnnnnnnaatctgtaatctagccttgctgaatgtaacatgtatacttggtcttgaattcattgtactgatattaaacatgcatgctggatgttttcaagttgtgttttagaaaactaataataatgagtaaacacagttaccatacttttcaattgaaatgaaggtttttcatcagccttaaaagtgtaagaaaaataaagttgtcattcattcga

SEQ ID NO: 72664 - DNA, 1347 bp, Homo Sapiens
  misc_feature (1229)..(1246): n is a, c, g, or t
gcggccgctctctcctctgtctccgcggatgacgagtggctggataacatggagtcgggcaagatggcgcctcccaagaacgctccgagagatgccttggtgatggcacagatcctgaaggatatgggaatcacagagtatgaaccaagggttataaatcaaatgttggaatttgctttccgttatgtgactacaattctggatgatgcaaaaatttattcgagccatgctaagaaacctaatgttgatgcagatgatgtgagactggcaatccagtgtcgtgctgaccaatcttttacctctcctcccccaagagattttttactggatatcgcaaggcagaaaaatcaaacccctttgccactgattaagccatatgcaggacctagactgccacctgatagatactgcttaacagctccaaactataggctgaagtccttaattaaaaagggacctaaccaagggagactagttccacgattaagtgttggtgctgttagtagcaaacctactactcctactatagcaaccccacaaacggtgtctgtcccaaataaagttgcaactccaatgtcagtgacaagccaaagatttacggtgcagattccaccttctcagtccacacctgtcaaaccagttcctgcaacaactgcagttcaaaatgttctgattaatccttcaatgattgggcccaaaaatattcttattaccaccaacatggtttcgtcacagaacacagccaatgaagcaaacccactgaagagaaaacatgaagatgatgatgacaatgatattatgtaaggaatatagtctagtctagatgcatttcaaaaggaaagttggttttgagcccagtatactgaactagaatattctagatcttgttttaccttaaaagactgaaatgtagctgcagtatttttcgtcagttaaaaactgttagatctctttagtaaacatacaaatgtgtttttcagtaaggcttcaattacaaacagttaagtacttgtttcttaatagtttcattaatgttgagtcctaatatggcaattctgtttttgagaaacttttctgccttctatcactgatagtagcatttaagtttcagattctacagcctagtcagcagatttatctttgacagcataatttccggatccacatttaaatactaactttatttttataggggaaataatagttaactttactgtccctaacctaannnnnnnnnnnnnnnnnnatccaaatccccttcaaatataagggaaaccttttttttgggcaaaggaatgggatttaaaaagggaaaagatttcctaaatcccatattctgggaaggga

SEQ ID NO: 72665 - DNA, 1295 bp, Homo Sapiens
  misc_feature (19)..(19): n is a, c, g, or t
  misc_feature (118)..(118): n is a, c, g, or t
  misc_feature (120)..(120): n is a, c, g, or t
  misc_feature (122)..(122): n is a, c, g, or t
  misc_feature (129)..(130): n is a, c, g, or t
  misc_feature (137)..(137): n is a, c, g, or t
  misc_feature (144)..(144): n is a, c, g, or t
  misc_feature (154)..(155): n is a, c, g, or t
  misc_feature (186)..(186): n is a, c, g, or t
  misc_feature (206)..(206): n is a, c, g, or t
  misc_feature (259)..(259): n is a, c, g, or t
  misc_feature (910)..(921): n is a, c, g, or t
ttgaaccttatcccgctantggactgagcagagatcattgatcagagcgagtgcatgaccagacacgcagttgagacgagcggacatgttcaaaaaatgtattaaaaataatacacantntnttgccanntaaaatnaagattntaaaattatnncaactcattgcagtataagtacctatgttcnttctatgatatagttgcacntcatgctattgaaattgtatttagaatacatttcagctttgttgtatactttntatcatatgtttcagattcttgggtaattcatagcttggctttggggggctttcttctctgttaacagtttcctgcaacaacttgcagttcaaaatgttctgattaatccttcaatgattgggcccaaaaaattcttattaccaccaacatggtttcgtcacaagaaccaccagccaatgaagcaaacccactgaagagaaaacatgaagatgatgatgacaatgatattatgtaaggaatatagtctagtctagatgcatttcaaaaggaaagttggttttgagcccagtatactgaactagaatattctagatcttgttttaccttaaaagactgaaatgtagctgcagtatttttcgtcagttaaaactgttagatctctttagtaaacatacaaatgtgtttttcagtaggcttcaactacaaacagttaagtacttgtttcttaatagtttcattaatgttgagtcctaatatggcaattctgtttttgagacacttttctgccttctatcactgatagtagcatttaagtttcagattctacagcctagtcagcagatttatctttgacagcataatttctgatctacatttaaatactactttattttataaggtaatatagttacttactgtcactagctaannnnnnnnnnnnataccaaatctctcaatataggaaacattttttggaaaggatggatttagaggagagattctaaatccatttgggatgtataaggtaacttggacttccttaacttccaaactcaactccctttctagatcccattcattttctggacacctccgcccataggctgagtactcatccatggctattaaatgtagaaggccatacatggaattttaaaaatattattccgggtaatacagactcagggtcaatatcctattttaaaaaaagtgctctaaatgccataaggtctggtgatccactttaaaccgtgatggatagcatatagcgtgatattaacacatctaatggtaaaacaagtggggtttaacccc

SEQ ID NO: 72666 - DNA, 959 bp, Homo Sapiens
cagtcgacggtaccggacatatgcccgggaattcggccattacggtccgggggaagccgtcgcggcggggaccatgttgcttccgaacatcctgctcaccggtacaccaggggttggaaaaaccacactaggcaaagaacttgcgtcaaaatcaggactgaaatacattaatgtgggtgatttagctcgagaagagcaattgtatgatggctatgatgaagagtatgactgtcccattttagatgaagacagagtagttgatgagttagataaccaaatgagagaaggtggagttattgttgattaccatggttgtgatttcttccctgaacgctggtttcatatagtttttgtgctgagaacagataccaatgtattgtacgaaagacttgaaacaaggggttataatgagaagaaactaacagacaatattcagtgtgagatttttcaagttctttatgaagaagccacagcatcctacaaggaagaaatcgtgcatcagctgcccagtaataaaccagaagagctagaaaataatgtagatcagatcttgaaatggattgagcagtggatcaaagatcataactcttgacttataaggctagctacttaataatcactcttgttgatatctctgccgacatcatagaaattgttcaagtgtcagtaacactttattaaaatcatgttgcagaaccagcaggtggatagtatataggtttatgcctgtgtttctttttctccatgagaaagctaaacatgaaatataatgaatatagtattattaaggattgagacaaaaactgtgattttaatacttaaattgctaaagaataaataaatctgacaaaatgggtggatatcttttaagtttattacagaaaaaaatgcagatgatctcttaaaataaaactaaagataaagccaccgaggattcccttcttttctttctttaaatt

SEQ ID NO: 72667 - DNA, 780 bp, Homo Sapiens
  misc_feature (763)..(763): n is a, c, g, or t
ggggaagccgtcgcggcggggaccatgttgcttccgaacatcctgctcaccggtacaccaggggttggaaaaaccacactaggcaaagaacttgcgtcaaaatcaggactgaaatacattaatgtgggtgatttagctcgagaagtctgatcatcggatatcatggagtctggcaagacggcttctcccaagagcatgccgaaagatgcacagatgatggcacaaatcctgaaggatatggggattacagaatatgagccaagagttataaatcagatgttggagtttgccttccgatatgtgaccacaattctagatgatgcaaaaatttattcaagccatgctaagaaagctactgttgatgcagatgatgtgcgattggcaatccagtgccgcgctgatcagtcttttacctctcctcccccaagagattttttattagatattgcaaggcaaagaaatcaaacccctttgccattgatcaagccatattcaggtcctaggttgccacctgatagatactgcttaacagctccaaactataggctgaaatctttacagaaaaaggcatcaacttctgcgggaagaataacagtcccgcggttaagtgggggttcagttactagcagaccaagtactccccacactagggcacaccaaccccacagaaccatgtctgtttcaactaaagtagggactcccctgtccctcacagggtcaaagggtttaccgtacagaatgcctactttctccagtcttcagnctgtaaaaaagcttcca

SEQ ID NO: 72668 - DNA, 604 bp, Homo Sapiens
  misc_feature (377)..(415): n is a, c, g, or t
ggcaaactagaggctgaaatctttacagaaaaaggcatcaacttctgcgggaagaataacagtcccgcggttaagtgttggttcagttactagcagaccaagtactcccacactaggcacaccaaccccacagaccatgtctgtctcaactaaagtagggactcccatgccccgcacaggtcaaaggtttacagtacagatgcctacttctcagtcgccagctggaaaagcttcaattcctgcaacctcagcagttcagaatgttctgattaatccatcatgaagcgggtccaaaaacattcttattaccactaatatgatgtcatcacaaaatactgccaatgaatcatcaaatgcattgaaaagaaaacgtgaannnnnnnnnnnnnnnnnnnnnnnnnnnnnnnnnnnnnnnaatctgtaatctagccttgctgaatgggaacatggatacttgggcttgaattcattggactgatattaaacatggctgctggatggtttccagggggggtttagaaaactaataataatggaggaaacaccgttaccataccttttcaattgaaatgaagggttttcatccagccttaaaagggggaag

SEQ ID NO: 72669 - DNA, 927 bp, Homo Sapiens
  misc_feature (679)..(717): n is a, c, g, or t
taccgggtggggattacagaatatgagccaagagttataaatcagatgttggagtttgccttccgatatgtgaccacaattctagatgatgcaaaaatttattcaagccatgctaagaaagctactgttgatgcagatgatgtgcgattggcaatccagtgccgcgctgatcagtcttttacctctcctcccccaagagattttttattagatattgcaaggcaaagaaatcaaacccctttgccattgatcaagccatattcaggtcctaggttgccacctgatagatactgcttaacagctccaaactataggctgaaatctttacagaaaaaggcatcaacttctgcgggaagaataacagtcccgcggttaagtgttggttcagttactagcagaccaagtactcccacactaggcacaccaaccccacagaccatgtctgtttcaactaaagtagggactcccatgtccctcacaggtcaaaggtttacagtacagatgcctacttctcagtctccagctgtaaaagcttcaattcctgcaacctcagcagttcagaatgttctgattaatccatcattaatcgggtccaaaaacattcttattaccactaatatgatgtcatcacaaaatactgcccatgaatcatcaaatgcattgaaaagaaaacgtgaannnnnnnnnnnnnnnnnnnnnnnnnnnnnnnnnnnnnnnaatctggaatctagccttggtgaatgtaacatggatacttggggcttgaatcattgtactgatattaaacatggatggtgggaggtttcaaggtggggtttagaaaactactaataatggaggaacgcaggtaccctactttttcattggaatggaggggtttcatccggcctaaaaggggagaaaaaataacggtgggttccattccag

SEQ ID NO: 72670 - DNA, 2217 bp, Homo Sapiens
  misc_feature (2089)..(2097): n is a, c, g, or t
cagtcgacggtaccggacatatgcccgggaattcggccattacggccggggagatacccccggagctccagccgcgcggatcgcgcgctcccgccgctctgcccctaaacttctgccgtagctccctttcaagccagcgaatttattccttaaaaccagaaactgaacctcggcacgggaaaggagtccgcggaggagcaaaaccacagcagagcaagaagagcttcagagagcagccttcccggagcaccaactccgtgtcgggagtgcagaaaccaacaagtgagagggcgccgcgttcccggggcgcagctgcgggcggcgggagcaggcgcaggaggaggaagcgagcgcccccgagccccgagcccgagtccccgagcctgagccgcaatcgctgcggtactctggctccggattcgtgtgcgcgggctgcgccgagcgctgggcaggaggcttcgttttgccctggttgcaagcagcggctgggagcagccggtccctggggaatatgcggcgcgcgtggatcctgctcaccttgggcttggtggcctgcgtgtcggcggagtcgagagcagagctgacatctggataaagacatgtaccttgacaacagctccatgtgaagaagcttcaggagtgtatcctatggatgacgatgactacgcttctgcgtctggctcgggagctgatgaggatgtagaagagtccagagctgacaacatctcgaacacttccaaagatactgttgactaagtgctgctccaaaaggtggaaaccacgaagcttgaatatacagaacaagatacctgctcagacaaagtcacctgaagaaactgataaagagaaagttcacctctctgactcagaaaggaaaatggacccagccgaagaggatacaaatgtgtatactgagaaacactcagacagtctgtttaaacggacagaagtcctagcagctgtcattgctggtggagttattggctttctctttgcaatttttcttatcctgctgttggtgtatcgcatgagaaagaaggatgaaggaagctatgaccttggagaacgcaaaccatccagtgctgcttatcagaaggcacctactaaggagttttatgcgtaaaactccaacttagtgtctctatttatgagatcactgaacttttcaaaataaagcttttgcatagaataatgaagatctttgttttttgttttcattaaagagccattctggcactttaatgataaaatcccattgtatttaaaacatttcatgtatttctttagaacaacataaaattaaaatttaacatctgcagtgttctgtgaatagcagtggcaaaatattatgttatgaaaaccctcgatgttcatggaattggtttaaacttttatgcgcaaatacaaaatgattgtctttttcctatgactcaaagatgaaagctgtttcatttgtgtcagcatgtctcagattgaccttaccaagttggtcttactttgttaatttatctgttgtccccttcctctcctctgccctcccttcttgtgcccttaaaaccaaaccctatgccttttgtagctgtcatggtgcaatttgtctttggaaaattcagataatggtaatttagtgtatatgtgattttcaaatatgtaaactttaacttccactttgtataaatttttaagtgtcagactatccattttacacttgctttatttttcattacctgtagctttgggcagatttgcaacagcaaattaatgtgtaaaattggattattactacaaaaccgtttagtcatatctatctaatcagatcttcttttgggaggatttgatgtaagttactgacaagcctcagcaaacccaaagatgttaacagtattttaagaagttgctgcagattcctttggccactgtatttgttaatttcttgcaatttgaaggtacgagtagaggtttaaagaaaaatcagtttttgttcttaaaaatgcatttaagttgtaaacgtctttttaagcctttgaagtgcctctgattctatgtaacttgttgcagactggtgttaatgagtatatgtaacagtttnnnnnnnnngttggtattttataagcacagacaattctaatggtaacttttgtagtcttatgaatagacataaattgtaatttgggaacataaaaactactgaataaatcatgtggcctaatattgaaa

SEQ ID NO: 72671 - DNA, 1006 bp, Homo Sapiens
  misc_feature (79)..(79): n is a, c, g, or t
  misc_feature (111)..(112): n is a, c, g, or t
  misc_feature (117)..(117): n is a, c, g, or t
taggattgcctcgagcccagaatcgcacgagcggcagtacagcagctgtgtgagacatcgtaggtggcgagcgcacggntgtcgtgccagaattacacgagccagaaagtnncctgntcgacacgcagatggcgcactacctcagtatcgatcaggcgctgtgcagacgacacgctctgcagtgaaggcaccgcgccaacgttccttcaagctcaaccgcaagaagctggaggccgcggggagcggcgcggagccccgccggccgccaaccgccccggcccccaccgcgcacaaagcgaagaaggcagccccgggcgcggccggctcccggcgcgcggacaagaagcccgccaggggccagaagccggagcagcgctcgcacaagaagggcgctggcgccaagaaggacaaaggcggcaaggccaagaagacggcggccgccgggggcaagaaggtgaagaaggcggccaagcccagcgtccccaaagtgcccaagggccgcaagtgagcgtgtcggccggtcagagcggccggcgtgggcttttcggtgtttttgtttttctaccccaagtgacgtagattttgtacggctcacgccggccggggccgcgaggcctggtctgagcctcagggaggggccccgggtcctctcagtctttcccctcccccaacgatgtagcgtttttcgttgtttgctttaggtttttgaaacagccccggcgacgcctctattggctctcggccttggcaacggccgtcgtcatggttactggcccctaggcgccgatggccgaggccgcgcctgcccaccgggcggggtcgctggttggccgggcccaggcgcgcggggacgcggaggccgcgcatcctttcccagctccccaccctccttgcctttgggtgcgcgacaaacaatcgctccgggctcagggctgcgcggctcttcccttcattccatgggcctttttttgggcacaataaagcgtttaaacctttcaacctcgtg

SEQ ID NO: 72672 - DNA, 723 bp, Homo Sapiens
caacggttccttcaagctcaaccgcaagaagctggagggcggcggagagcggcgcggagccccggcggccgccaccgccccggcccccaccgcgcacaaagcgaagaaggcagccccgggcgcggccggctcccggcgcgcggacaagaagcccgccaggggccagaagccggagcagcgctcgcacaagaagggcgctggcgccaagaaggacaaaggcggcaaggccaagaagacggcggccgccgggggcaagaaggtgaagaaggcggccaagcccagcgtccccaaagtgcccaagggccgcaagtgagcgtgtcggccggggccgcgaggcctggtctgagcctcagggaggggccccgggtcctctcagtctttcccctcccccaacgatgtagcgtttttcgttgtttgctttaggtttttgaaacagccccggcgacgcctctattggctctcggccttggcaacggccgtcgtcatggttactggcccctaggcgccgatggccgaggccgcgcctgcccaccgggcggggtcgctggttggccgggcccaggcgcgcggggacgcggaggccgcgcatcctttcccagctccccaccctccttgcctttgggtgcgcgacaaacaatcgctccgggctcagggctgcgcggctcttcccttcattccatgggcctttttttgggcacaataaagcgtttaaacctttaacct

SEQ ID NO: 72673 - DNA, 1149 bp, Homo Sapiens
  misc_feature (350)..(488): n is a, c, g, or t
ggcgccccgctgcgggcgcggcggcgctggagaggcgcggtccgagaagccagcggccggagaaggggctccaagaagcacaagttggcgctggccccggaccaggctgttgttgttctcaacgtggtccgccatgaagctataaaaagccgagagaagcgccctcccgtccagaccgcagcgcgcacgcccagcgagttccagaggcgccagtggaagctgcggcggcggtgtctcgcgttcggcgggatttctcttcgctccggctcggcctaggtctacgtccccagctccagccgccggctcggactcggtctctgacccccaactcggtcccctagtccggcccnnnnnnnnnnnnnnnnnnnnnnnnnnnnnnnnnnnnnnnnnnnnnnnnnnnnnnnnnnnnnnnnnnnnnnnnnnnnnnnnnnnnnnnnnnnnnnnnnnnnnnnnnnnnnnnnnnnnnnnnnnnnnnnnnnnnnnnnnnntcgccttcctcttcccggcgcggccccccggcttccgcgcgccgcccgccaccaaccctcttgctaccatgtccgtggagctcgaggaggccctgctagtgacgaccgccgagggaatggccaagaaggtgaccaaggctgggggttcgggcggtgttgtcccccatcccagaacagggaaggaaagccacaagaagaaaccagccggggcgagggacacacagctgggggacggcagaaccatcccgcccgcaggggacgaggcgcgagccggttcggtcgctgggccgaagaagcctcactccctgtcctaccctttgtgtgccgttgtccacctccgtggacgcgcccagctcgtagtcccgcgtgacgcgagacattatttttgatcatggcggcgaacgcgcccgcgcgtaacagttagagccggaagaagacatgacggcggaaaggtagtactgggctcgcaagctgtgcgactgggccctccggaggtgacgcggaaacctatttgggagaaacggattacgtcgcattccggtcagcgacgatggcagggagtgattgcctcggggtgccagcgcggatagaagccgcttcctgccgaccacgccctgttcggcggccgccgccttccagcgaggttacttgtcaacagccc

SEQ ID NO: 72674 - DNA, 1430 bp, Homo Sapiens
  misc_feature (979)..(1020): n is a, c, g, or t
  misc_feature (1065)..(1092): n is a, c, g, or t
aatagcgctcagtacgaggccgggtgttaattcggcacgagggcacccctcggccctcgccttcctcttcccggcgcggccccccggcttccgcgcgccgcccgccaccaatcctcttgctaccatgtccgtggagctcgaggaggccctgccagtgacgaccgccgagggaatggccaagaaggtgaccaaggctggcggctcggcggcgttgtccccatctaagaagaggaagaatagcaagaagaagaaccagccgggcaagtacagccagctggtggtggagaccatccgtaggctgggcgagcgcaacggctcgtcgctggccaagatctacaccgaggccaagaaggttccgtggttcgaccagcagaatgggcgcacctacctcaagtactcgatcaaggcgctggtgcagaacgacacgcttctgcaggtgaagggcaccggcgccaacggttccttcaagctcaaccgcaagaagctggagggcggcggggagcggcgcggagccccggcggccgccaccgccccggcccccaccgcgcacaaagcgaagaaggcagccccgggcgcggccggctcccggcgcgcggacaagaagcccgccaggggccagaagccggagcagcgctcgcacaagaagggcgctggcgccaagaaggacaaaggcggcaaggccaagaagacggcggccgccgggggcaagaaggtgaagaaggcggccaagcccagcgtccccaaaagtgcccaagggccgcaagtgagcgtgtcggccggtcagagcggccggcgtgggcttttcggtgcttttgtttttctaccccaaggggacgtaaattttgtacggctcacgccggccggggccgcaaggcctggtctgagcctcagggaggggccccgaggagctctcagacacgtcccctcccccaaccatgccgccgtttctcgcatggtcgccttcacgcccacgaacccnnnnnnnnnnnnnnnnnnnnnnnnnnnnnnnnnnnnnnnnnnaacagcccgacctgacagcccactggcaccccacatagaccatgnnnnnnnnnnnnnnnnnnnnnnnnnnnntacaccgggcaccgcagacacccaagaccgcactacacgccgccccaacacaggcaacagacgcgaaatacgcacgcaccagacgcggcccccggcctccctcgccgcccccatccagctagagataccgggccacagaccatagcgcccaccggggaatcgtcgatgccccatcacgcgagttaaccagaagaagatcgccacctgaacccctcgtaggacccgcccaacaggtccgcacccgtgagcttaccgccctctaaacacacgctgagcaaccgccgagacgccgctctccgcacaccctcgatccattacgacgcggcgcgtgtccgacg

SEQ ID NO: 72675 - DNA, 793 bp, Homo Sapiens
gcataatcagaactgtttctcttataaaatcagccccttataactactacagataaattgaaaagactcagtttatttctactctgaccaggaaaaacaagacaaggccgttctccaagcagaagtgcagcacctgagacaggacaacatgaggctgcaggaggagtcccagaccgcgacagctcagctgcggaaattcacagaatggtttttcaccaccatcgacaaaaaatcttagccaatccgcacctcatcaagggaccactgggaaatgccccttgtccctttgaagtcacaaacatgtggtttttctgtgtgctttcaaccaatcgtagatgtttttgctgttccattctgtgtagcaccattcaccacagcaggatagggagcctcgactctttctcggtaaccacggcagagagcagcgccgatgtgaagatgaatgaatgtaactcctggtgtgaagatgaatgtaaaccctggcgacagttgagacctttttcttttagactctgctaaaacagtgctctggcttgggcttacctcaagagggaagatagttgagttttatttcctgtatatcaggtgacctggtagagatgtaaagcaatttaccatagtttgggctttagtattgtaaaataaacatgagaacaaataatcagacatatactttaatgttaaaggtgctctatttttttggatgtacagtagttttatttccacagccacattaccatagcaataagaaaggaggcatagtacatagttggaaaagctttgtggggggatt

SEQ ID NO: 72676 - DNA, 365 bp, Homo Sapiens
acacaacccaccaccaccaccgcgagctggagcgcgcaccaggccatccagcgtgcagccttgcctcggaggccagcccacccccagaagccaggaagcccccgcgctggactggggcagcttccccagcagccacggctttgcgggccgggcagtcgacttcggggcccagggaccaacctgcatggactgtgaaacctcacccttctggagcacggggcctgggtgaccgccaatacttgaccaccccgtcgagccccatcgggccgctgcccccatgctcgcgctgggcagggaccggcagccctggaaggggcacttgatatttttcaataaaagcctttcgttttgctaaccacaacaag

SEQ ID NO: 72677 - DNA, 892 bp, Homo Sapiens
agcacgggcagtggtcttcagtcgtcttgggacctgggaaggtttgcagcactttgtcatcattcttcatggactcctttcactccttgtaacaaaaaccttgcttccttatcccacctgtatcccagtcgtgaaggtctcttagccaactgtgagatacaaagcaaggagctggtgagcccagcgttgacgtcaggcaggctatgcccttccgtggttaatttcttcccaggggcttccacgaggagtccccatctgccccgccccttcacagagcgcccggggattccaggcccagggcttctactctgcccctggggaatgtgtcccctgcatatcttctcagcaataactccatgggctctgggaccctaccccttccaaccttccctgcttctgagacttcaatctacagcccagctcatccagatgcagactacagtccctgcaattgggtctctggcaggcaatagttgaaggactcctgttccgttggggccagcacaccgggatggatggagggagagcagaggcctttgcttctctgcctacgtccccttagatgggcagcagaggcaactcccgcatcctttgctctgcctgtcggtggtcagagcggtgagcgaggtgggttggagactcagcaggctccgtgcagcccttgggaacagtgagaggttgaaggtcataacgagagtgggaactcaacccagatcccgcccctcctgtcctctgtgttcccgcggaaaccaaccaaaccgtgcgctgtgacccattgctgttctctgtatcgtgatctatcctcaacaacaacagaaaaaaggaataaaatatcctttgtttcctaaaaaaaacctcgtgccgattaacccccggcctcgacctggccgat

SEQ ID NO: 72678 - DNA, 991 bp, Homo Sapiens
  misc_feature (281)..(282): n is a, c, g, or t
tgccagcatccatccaacagtttagttatgttgtctggtcccaagccgcagttctagattcagatccaccatatggccaacccccactgtgatggttgagtgtgcagatcactgagtcagttgagcatgagtatcaaagctgtcgtagatgtcccagcgtgtcaggctcgtgcgtgtgtacgtcgtcaggaatccccaatgcagccagatcctcatgaccctcgtttccagtcaccccagcttccgatttttgcagcagccgcgccgccagccatcgcccnngaaacccccgcccaggtcctggcgcgcaacgacatgagcatcgccgaggagctgctgtacctgcgcgtggtgcgtggcctaatggccgccatgggcaacacggaccacagcaacagccagcggctggccagcctcacgctggagtgcttcgtgcagatgttccccttggtggcggagcacgtgcgcaagtgcatgggggaggaactctaccagctcttcctggctgccgacccgccccccacctgcaacatccctctgccaagcccaactccaagtccagactgccctggcaccccagccgggtcccccttgctcctgtcctcagagcaacgctgaggacttgtacatgaaaatagacagcattcaggcggacatcttggcggccaacacagtcaatgttaccaaagccctgtgcctccatggcagctcctacagcatgaacactctctatggctcgcgcgattcggctcagatggcctacctcacacacttcgaggaggatgtagaatcaaaggagtaacagcccctgtggcaaaccaggaaggccaaggctgcggggcagggaagcctggcaagaggaaggcgcctggggtcaagctcagagccactccacttggctcccaggggggagacggggattaggcatcccagaggggcagaggaagagccgctggctgcgaagagtcaataaacagccttgatacctgtc

SEQ ID NO: 72679 - DNA, 854 bp, Homo Sapiens
  misc_feature (854)..(854): n is a, c, g, or t
cgtcagccaatccagtggactcgcagccaaattgtcatccactgtcacatccctcagtggggctccgacaaatgtgaagaacagcttgaagagaccatcaaaaactgcctgtcagcggcggaggacaagaagctaaagtccgtcgcgttcccgcctttccccagcggcagaaactgctttcccaaacagactgcggcccaggtgaccctcaaagccatctcagcccactttgatgactcgagcgcgtcctcgctgaagaacgtgtacttcctgctcttcgacagcgagagcatcggcatctacgtgcaggagatggccaagctcgacgccaagtagccgccgcactttccagcagggatcggaggacgacccgagtcccaagagtggggttttgctttttaaaaggagagaggaggggtgatggcaggggagtggagggtggccgggcaggtcctgccggcgcagggagccctctgcccttcacactctcctccaaaagagcctccatctgtaaggaagcaggtctccgcgaggggtttctttccatgtgttttcctcctgttgttttagaacttttttaaaaaaacagacctcgttttagatttatagcattgacttttacacacattcacacaagaaaaaaatcctttcaaaattcttaaatcttctgttcctcctttttccaagggaagagggcaaaaagtggcctgggctctgttggtgtgcgtgttccgtggcggagagaagaaaatgggaaagacatctcactggtgcttttctcttttgttttagtgccccccgcccccatccctataatatctgtaactactcctaaaaaggttttgattcaggcn

SEQ ID NO: 72680 - DNA, 702 bp, Homo Sapiens
tatcagctcggcccttttctaaaaagttctaagatgacagttatcactatttgttttatctccatgctgacatttgaaagaaggtactagtatccctctagccagattgcttagtttttcgttggtaatcaaacaacagttgtactaaaggaaagtaaagctaggacctaaatcagaatcatagttgcctgcatatatggtaacaaggtcgtgtgcatttgctttcacagtgatgagtgagaggatgagaagaaattatttgacatttttctgtggttgaatagaagacacctttcttttgtctttaggtttaggaggagatactaagatactggatgtttatcctatcttagtttggttggagtaataagagagaagaagagggtggactttggcttttcagtgttttttcccctaaagagtgatattgctgacgtttctatcaattttacacataatatgtggctatgaaaccatatatctcacttaagtaacaaagtaatcactttgtctatcactaagtaatagacaaaaatcattgtctattatttaaagccaacaaaacagtgtaacagttttaagttcaataatgttaagtattgtatagaaatatattggaggcaaagttcagttgatgacaattgtgtatatgttactgatgctgtaaattatttttaataaagaaaattgtattatcacaaa

SEQ ID NO: 72681 - DNA, 645 bp, Homo Sapiens
ggcacctaaaagataattctcctctgacgcaggttggaaatatttttttctatcacagaagtcatttgcaaagaattttgactgctctgcttttaatttaataccagttttcaggaacccctgaagttttaagttcattattctttataacatttgagagaatcagatgtagtgatatgacagggctggggcaagaacaggggcactagctgccttattagctaatttagtgccctccgtgttcagcttagcctttgaccctttccttttgatccacaaaatacattaaaactctgaattcacatacaatgctattttaaagtcaatagattttagctataaagtgcttgaccagtaatgtggttgtaattttgtgtatgttcccccacatcgcccccaacttcggatgtggggtcaggaggttgaggttcactattaacaaatgtcataaatatctcatagaggtacagtgccaatagatattcaaatgttgcatgttgaccagagggattttatatctgaagaacatacactattaataaataccttagagaaagattttgacctggctttagataaaactgtggcaagaaaaatgtaatgagcaatatatggaaataaacacacctttgttaaagataaaaa

SEQ ID NO: 72682 - DNA, 719 bp, Homo Sapiens
tttttttaggctggatgtttttttattcttaatagttacttggtttaaatcacatttgatactatccttctgaaaagtctgagacagatctacaaactacagtcaaaattatagattaagaggaatgaatgcacctatttggctttaagttgaagatgaattatttctcatgctcattttcttgcggcagttatcttagaaagacccccaaaggctttgtgattgtaagcactgtcatgatcacagaatgcaagcttctggtaccatgatcctcaacttagagaggaagaaaccaagacagagagcttaactcacttctctcagggaaaattaggagttgagcacaggacaggaaatgggctttgccacttttagctccaggcttttctaaccagacttgatttcctcatgttctagaaagatcactaatggtcaagtggaacaagcactacacgactaacccctattggggtttttaacttaagggaggctaatttttaatttaaactgctcgagatatgagttctgcaaaaggtggtccgcatccttggccctctggacattatcactaaattgcttgtgcctgttaacaagaatactgaccagaatgctcttcatgtagcttatacagttggttcacttcatgcggttcttgacatgtttatttctacccttaatgcaatgaaatgtttcattaataaaaaaccactttatataaa

SEQ ID NO: 72683 - DNA, 1716 bp, Homo Sapiens
gctagtacgaggcctgggtttgtgaatcggcacgagcgggggtttgtgggagctgccttgacctgcagctccgccaccgggacccgccttctgccctcagcagcagacgctctgtcccgcccgggcagctctgcgaggcagcggctggagagggaaccatggggactgtgcacgcccggagtttggagcctcttccatcaagtggacctgattttggaggattaggagaagaagctgaatttgttgaagttgagcctgaagctaaacaggaaattcttgaaaacaaagatgtggttgttcaacatgttcattttgatggacttggaaggactaaagatgatatcatcatttgtgaaattggagatgttttcaaggccaaaaacctaattgaggtaatgcggaaatctcatgaagcccgtgaaaaattgctccgtcttggaatttttagacaagtggatgttttgattgacacatgtcaaggtgatgacgcacttccaaatgggttagacgttacctttgaagtaactgaattgaggagattaacgggcagttataacaccatggttgggaacaatgaaggcagtatggtacttggcctcaagcttcctaatcttcttggtcgtgcagaaaaggtgacctttcagttttcctatggaacaaaagaaacttcgtatggcctgtccttcttcaaaccacggcccggaaacttcgaaagaaatttctctgtaaacttatataaagttactggacagttcccttggagctcactgcgggagacggacagaggaatgtcagctgagtacagttttcccatatggaagaccagccacactgtcaagtgggaaggcgtatggcgagaactgggctgcctctcaaggacggcgtcatttgctgttcgaaaagaaagcggacattcactgaaatcatctctttcgcacgccatggtcatcgattctcggaattcttccatcttaccaaggagaggtgctttgctgaaagttaaccaggaactggcaggctacactggcggggatgtgagcttcatcaaagaagattttgaacttcagttgaacaagcaactcatatttgattcagttttttcagcgtctttctggggcggaatgttggtacccattggtgataagccgtcaagcattgctgataggttttacctcgggggacccacaagcgtccgcggattcagcatgcacagcatcgggccacagagcgaaggagactacctaggtggagaagcgtactgggccggcggcctgcacctctacaccccattacctttccggccaggccagggtggctttggagaacttttccgaacacacttctttctcaacgcaggaaacctctgcaacctcaactatggggagggccccaaagctcatattcgtaagctggctgagtgcatccgctggtcgtacggggccgggattgtcctcaggcttggcaacatcgctcggttggaacttaattactgcgtccccatgggagtacagacaggcgacaggatatgtgatggcgtccagtttggagctgggataaggttcctgtagccgacacccctacaggagaagctctgggactggggcagcagcaaggcgcccatgccacacaccgtctctcgaggaaacgcggttcagcgattctttgactgcggaccctgtgggaaaccccgtcaataaatgttaaagacacacacaa

SEQ ID NO: 72684 - DNA, 876 bp, Homo Sapiens
cttgatggcttacatgtgttggagcttgctgcagcggtgctttggtcacaacttcaggtctcatctccatcaaagaaaatacttgaaaattatgcctgttcacctacttatgctactgctgtacatctggcaggtttattcctgctactttctttatgcaacatacggcaccctagcttttttattctcccctttgcggacctggttgacactgctgacacctgttctcattcgttatgtgtggacactgaactccaccaagtttggaatcttcatggtgcagttaaaaagccacctgagctcctgaaggccatgtctcaccactggcagctgggcagaagcccagcctctgtgtctgtagcccaggcctctaccccagtagcaggtggagggccaggattggtgggtgagctttagggagcagctgctcgtttggagtcctggacgttggagggattacccactactgatacctgcagaatggactgcagaaaagtctcaaaaataatgcctttattccttccctccctaaggaggcaaagagttgatttacctttgtgaagagaaaacccttatctaggacatccacagggtagaggttgggtgtgtgtacgggagtgtctgaggcccagtgtgttttttagggttaccccatgtaaagcacttaccgctgtgcttggaattcagcagctgtcaaaggtgcaatttcaggggcagggaacctttgaggatctgggcccgaccctcactacccctgagatattagttcccaggcctgttttcccacaggattgtgggctctctgcttccttagtcggaagtgttttcaactaatcaaataaatgaatgaatgatgaataagaaaaaacctcgtgc

SEQ ID NO: 72685 - DNA, 456 bp, Homo Sapiens
gcgtagtcctcagccgcctcctccacaggcagctcggggttaatggtgatcacctggctttctgggatcggcagtctggagagaagatgcgtctgcagccaacagagggacaatgtcaccaacagtaacgtgaccacctggatcctccagggagtttatgacagtaccgtcataacactcatttacagatggggagactgaggcatggggaggctggtgcatttgtgcaaggtccttcggttggtgagtgacactttggttggtgagtcacctctggaatgctggaagccaggatcctgagccctgggtgacgccgcctgtcagggcagaggaggttcaagggcaagagggagccctgctgctcttggggggctggacgggagggtggccctcctgggtgaatcgggatcatggtggttcctgcgggggccagcattccaacaggagtctttcaat

SEQ ID NO: 72686 - DNA, 1082 bp, Homo Sapiens
tctcccgcctccaacatccctcagagcgagcctgggtggcgaattcggcacgaggcctcctccccgccgccgccctcgccatggccgcgccggccccgggcctcatctcggtgttctcgagttcccaggagctgggtgcggcgctagcgcagctggtggcccagcgcgcagcatgctgcctggcaggggcccgcgcccgtttcgcgctcggcttgtcgggcgggagcctcgtctcgatgctagcccgcgagctacccgccgccgtcgcccctgccgggccagctagcttagcgcgctggacgctgggcttctgcgacgagcgcctcgtgcccttcgatcacgccgagagcacgtacggcctctaccggacgcatcttctctccagactgccgatcccagaaagccaggtgatcaccattaaccccgagctgcctgtggaggaggcggctgaggactacgccaagaagctgagacaggcattccaaggggactccatcccggttttcgacctgctgatcctgggggtgggccccgatggtcacacctgctcactcttcccagaccaccccctcctacaggagcgggagaagattgtggctcccatcagtgactccccgaagccaccgccacagcgtgtgaccctcacgctacctgtcctgaatgcagcacgaactgtcatctttgtggcaactggagaaggcaaggcagctgttctgaagcgcattttggaggaccaggaggaaaacccgctgcccgccgccctggtccagccccacaccgggaaactgtgctggttcttggacgaggcggccgcccgcctcctgaccgtgcccttcgagaagcattccactttgtagctggccagagggacgccgcagctgggaccaggcacgcggcccatggggctgggcccctgctggccgccactctccgggctctcctttcaaaaagccacgtcgtgctgctgctggaagccaacagcctccggccagcagccctacccggggctcaacacacaggctgtggctctggacatccggatattaaaaggagcgttgctggtaatatccgcccgctaccac

SEQ ID NO: 72687 - DNA, 1033 bp, Homo Sapiens
caacctcagattaaaaaattttaagtattgactaaaatttgacaatggaatctccatatgttagaggtgtgttaaaatgggagggttctcttaccacagctgggaatcgattgacactcaatgaggtgttcttcccttataagttgtcaaatagaaacactgaataagttctatttggagtacatcaatattaaccattttacacagatcgtgttgaaaattgccattcaagctaatattttatgtattctgactttgtaaaagttcataagtgttcttgctactgttaagcttatgcagtttatactgtattttttatgtatcctttatatttaccaaacctgactccctgtaaaggagtgctgtcttaaaaacaactgaaggggttaaagtcgtttcttttagtttaatagatgtgcataaggtagctttagcaattaaattctagtgaagttgatatagtctcatttttaattgtcctgtaatggaacagtagcaaattcactaaacttttgtgttcagagttaaattgttctcagtactttcaatgtaggggaatgtaataaacatagtgtgtatgtttgggttttaattacacattttatatatgagccatttagatatgcagtgttaattctatactgcatttgaagtgtatgtaacttagcttatgttaatgcagtcatgaagttggtttgctccagcatccggtagtctttaaacattcttttagtgaaattgtcattgttttatcagtgctaatgtgtgcaagcagtttttttattttgcttttctcctggcatcagaaagtggtggcgttttctgtactggattgcaccaaggaagcttttggggaggaaggaaggacattaaattctttccctggtaatgaaaagagccctttatcaatacagtgctgcaatttctggatatcagctacactttgtttttaagtttgtttttgacatgtttatttggcaaattttataatgaagttttaagttgaaaataaaatgtagcaacattttgaaaa

SEQ ID NO: 72688 - DNA, 1462 bp, Homo Sapiens
  misc_feature (83)..(117): n is a, c, g, or t
caagtgtatagactcatatagggcgctagctcgtcctggagcgaacgacgagcgcagcgagtttgtgagcgaggaagcggcgnnnnnnnnnnnnnnnnnnnnnnnnnnnnnnnnnnncagtcgacggtaccggacatatgcccgggaattcggccattacggccggggagcagtggtgtgtgagagccaggcgtccctctgcctgcccactcagtggcaacacccgggagctgttttgtcctttgtggagcctcagcagttccctctttcagaactcactgccaagagccctgaacaggagccaccatgcagtgcttcagcttcattaagaccatgatgatcctcttcaatttgctcatctttctgtgtggtgcagccctgttggcagtgggcatctgggtgtcaatcgatggggcatcctttctgaagatcttcgggccactgtcgtccagtgccatgcagtttgtcaacgtgggctacttcctcatcgcagccggcgttgtggtctttgctcttggtttcctgggctgctatggtgctaagactgagagcaagtgtgccctcgtgacgttcttcttcatcctcctcctcatcttcattgctgaggttgcagctgctgtggtcgccttggtgtacaccacaatggctgagcacttcctgacgttgctggtagtgcctgccatcaagaaagattatggttcccaggaagacttcactcaagtgtggaacaccaccatgaaagggctcaagtgctgtggcttcaccaactatacggattttgaggactcaccctacttcaaagagaacagtgcctttcccccattctgttgcaatgacaacgtcaccaacacagccaatgaaacctgcaccaagcaaaaggctcacgaccaaaaagtagagggttgcttcaatcagcttttgtatgacatccgaactaatgcagtcaccgtgggtggtgtggcagctggaattgggggcctcgagctggctgccatgattgtgtccatgtatctgtactgcaatctacaataagtccacttctgcctctgccactactgctgccacatgggaactgtgaagaggcaccctggcaagcagcagtgattgggggaggggacaggatctaacaatgtcacttgggccagaatggacctgccctttctgctccagacttggggctagatagggaccactccttttaggcgatgcctgactttccttccattggtgggtggatgggtggggggcattccagagcctctaaggtagccagttctgttgcccattcccccagtctattaaacccttgatatgccccctaggcctagtggtgatcccagtgctctactgggggatgagagaaaggcattttatagcctgggcataagtgaaatcagcagagcctctgggtggatgtgtagaaggcacttcaaaatgcataaacctgttacaatgttaaaaa

SEQ ID NO: 72689 - DNA, 950 bp, Homo Sapiens
  misc_feature (610)..(619): n is a, c, g, or t
aagtaaggccggggtgatcggccgaggggctgattcatcccactgaagccctgggccgggaggctttcctctaagatctgtgggaactgcgcagggccctcctcaatctaggcctcagaattccccctgaggtttggagttgagctagacagcctttaagagaagctctggctgtattcccactggtacctcactttcctcttgtgaggcaaggaggtcttgtctacatgaggggcgggcctgaagttggattctggaggggagccaaatggggcctcagctgtgtggtgcagccctgttggcagtgggcatctgggtgtcaatcgatggggcatcctttctgaagatcttcgggccactgtcgtccagtgccatgcagtttgtcaacgtgggctacttcctcatcgcagccggcgttgtggtctttgctcttggtttcctgggctgctatggtgctaagactgagagcaagtgtgccctcgtgacggtgtgtgaaacccagctccacaggctgatgaccaagagtcccctcgcccttgacaccaggccctgggattcccaaaccctgctttggacccccctaggctcaggcttctgtctcacttttccnnnnnnnnnnattagggcaaggagggcatgagggactgtctctccctaaaagccaagacccctgattccccacaccagttcttctttcattcctcctcctcatcttcatttgctgaggttgcagctgcttgtggtcgcccttggtgtacacccaacaatggtgagcacttcctgacgttgctggtagtggctgccatcagaaagatctgggttcccggcagaattcactcacagtggggacacccccatgaaagggtcagtgctggggttcaccacattcggtttgggctacctacttaaaagaaaggtttccctttgtgagcaaattcaaaggctgaacg

SEQ ID NO: 72690 - DNA, 1419 bp, Homo Sapiens
  misc_feature (717)..(717): n is a, c, g, or t
ggcctgggtggcgaattcggcacgaggtgagtgtgtgttcctgcccgaaacggcgccttcttcgtgaactacgtcattgcctcagcctttatcggcaacgccatggacctgctgcgcatcccaggcctgctcatgtacatgatccggctctgcctggcgcgctcggccgccgagaggcgcaacgtgaagcggcatcaggcctacgagttccagtttggcgcagcctacgcctggatgatgtgcgtcttcacggtggtcatgacctacagtatcacctgccccatcatcgtgcccttcgggctcatgtacatgctgctgaagcacctggtagacaggtacaatctctactacgcctacctgccggccaagctggacaagaagatccactcgggggctgtgaaccaggtggtggccgcgcccatcctctgcctcttctggctgctcttcttttccaccatgcgcacggggttcctagctcccacgtctatgttcacatttgtggtcctggtcatcaccatcgtcatctgtctctgccacgtctgctttggacacttcaaatacctcagtgcccacaactacaagattgagcacacggagacagatactgtggaccccagaagcaatggacggccccccactgctgctgctgtccccaaatctgcgaaatacatcgctcaggtgctgcaggactcagaggtggacggggatggggatggngctcctgggagctcaggggatgagcccccatcatcctcatcccaagatgaggagttgctgatgccacccgacgccctcacggacacagacttccagtcttgcgaggacagcctcatagagaatgagattcaccagtaaaggggagggaggggcccctggaaggcaacatcctgccccaaccccacccccaatcccacggaacactaaaacgctaataatttattagatctaaagccccttcctccccagcccctgctttcattaaggtatttaaacttgggggtttcactgctctccccccatgatggagggagggagccccccaacctcagtgaggagagccccgagccggccccggggcaaagaggggtgcagagggagttcccccagatcagtaccccaccacccctccccagctagtagcatgaccaggagagggttaatgagagccaagaggagtacctggtgcacctggtgccggtggctggagacctggggggcaggtggatctggggctgttcccccccctccgttttttccaccccacagttcctcctgggatctggccctccagggaagtggagcctccagcccctaggggatgcatgaggggggagggggtgctgagtgggaggaagagtcaggctcacagctggggtggcctgggggtgggggtgggcaaggctgacactggaaaatggg

SEQ ID NO: 72691 - DNA, 844 bp, Homo Sapiens
ggtacggatgtctcactctttggagaacctaccgaatttgagtatttgcgaaaagtgctttttgagtatatgatgggtcgtgagactaagaccatggcaaaagttataaccaccgtactgaagttccctgatgatcagactcagaaaattttggaaagagaagatgctcggctgatgtcatggctccgatcttcatcttgaagaagagtgacattgggtgactgctgcttggaaaactgtccacacttgctactctttgagaatgaagttgtcattcagggcccctcatgtagccaaaagaccaagaaaaatctggcccacagataagttgcagactgcctttaaaatagattttatcagtggagaaatggtgatagttttttcttcagttttctcttgggaagagttttatgttgtttaaaagatattttgataacttaacctgctttatgggcttacataatattcctttcatccattctttttaaagaacggcttacctttcctatttatttttagggtgattttttaaaaagacttgtgcaatacattttgaggtgaaacttagtggattttttctgataaattagagcatttaattgactattttattcaggttgatctgttgaatatttgctaaagaccagttctttaagctaagacatgtaaaaaatcccaaatggcagtacctcattgtttacttagcttttgtacttatatttttcagaggaaaaaacactactgtaaattgtgaatagccaatacataactgaattggatgcaaatcctgtgattggtggcagggtcatctctgagaaacagataaataaagtttatttactat

SEQ ID NO: 72692 - DNA, 1100 bp, Homo Sapiens
  misc_feature (75)..(75): n is a, c, g, or t
  misc_feature (111)..(111): n is a, c, g, or t
  misc_feature (133)..(133): n is a, c, g, or t
  misc_feature (145)..(146): n is a, c, g, or t
  misc_feature (217)..(217): n is a, c, g, or t
  misc_feature (234)..(234): n is a, c, g, or t
  misc_feature (249)..(249): n is a, c, g, or t
  misc_feature (277)..(277): n is a, c, g, or t
  misc_feature (342)..(342): n is a, c, g, or t
  misc_feature (345)..(346): n is a, c, g, or t
  misc_feature (376)..(376): n is a, c, g, or t
  misc_feature (394)..(394): n is a, c, g, or t
cccccaaagtgagcggaggaccattgatatgacattttgaccaccgccacgctccacagagcggctttatcatgntcgaaatgaaagacaagagtcagaaacagatccacnataagagaccgttgaagaaatntaaaagatgttnntgcaacaactgtgggacaccttacaaaggtgcaatgtgtaccataccgatgtcctcactctttggagaccntaccgaattggagtatntgcgaaaagtgcttntggagtatatgatgggtcgtgagactangacccatgccaaaagtataacccccccgtactgaagttccctgatgatcagactcagaaaatttngannagagaagatgctcggctgatgttacttcancctcgcagtggatcttcntgagtaaaccatcagtctgtgcttagttaacatgtgtcatggctccgatcttcatcttgaagaagagtgacattgggtgactgctgcttggaaaactgtccacacttgctactctttgagaatgaagttttcattcagggcccctcatgtagccaaaagaccaagaaaaatctggcccacagataagttgcagactgcctttaaaatagattttatcagtggagaaatggtgatagttttttcttcagttttctcttgggaagagttttatgttgtttaaaagatattttgataacttaacctgctttatgggcttacataatattcctttcatccattctttttaaagaacggcttacctttcctatttatttttagggtgattttttaaaaagacttgtgcaatacattttgaggtgaaacttagtggattttttctgataaattagagcatttaattgactattttattcaggttgatctgttgaatatttgctaaagaccagttctttaagctaagacatgtaaaaaatcccaaatggcagtacctcattgtttacttagcttttgtacttatatttttcagaggaaaaaacactactgtaaattgtgaatagccaatacataactgtattgtatgcaaatctgtgattgttggcagtgtcatctctgagaaacagataaataaagtttatttactataaaa

SEQ ID NO: 72693 - DNA, 792 bp, Homo Sapiens
cctgattcctgtttttctcatagtgtttaaataccgtgtatagtgctgggacctgaactcagatctgctcaagtctgcctttcaccgaatcacatgcaggaggctgcatgcaggaggctgcagaaattaaatggctgggttgctggggttcctgttgagctgccatggctcccgcccgctcccagatcttcctgccttccttcccaacaggccaccctggagaaatgtgccacgtgctcccagcccatcctggaccggatcctgcgggctatggggaaggcctaccaccctggctgcttcacctgcgtggtgtgtcaccgcggcctcgacggcatccccttcacagtggatgctacgagccagatccactgcattgaggactttcacaggaagtttgccccaagatgctcagtgtgcggtggggccataatgcctgagccaggtcaggaggagactgtgagaattgttgctctggatcgaagttttcacattggctgttacaagtgcgaggagtgtgggctgctgctctcctctgagggcgagtgtcagggctgctacccgctggatgggcacatcttgtgcaaggcctgcagcgcctggcgcatccaggagctctcagccaccgtcaccactgactgctgagtcttcctagaagtacctgctgggttctcagttccagttcccatcctttgattgatcactctccctgacatccacctgtatgactttgtcaccaaatgctgtcttctctttctccaatcaagaaataataatccctcgagtttacaaaac

SEQ ID NO: 72694 - DNA, 1872 bp, Homo Sapiens
  misc_feature (106)..(116): n is a, c, g, or t
  misc_feature (1814)..(1831): n is a, c, g, or t
aatagtgaatatagaacaagttggtagcagaaagcaggctggtaccggtccggaattcccgggatatcgtcgacccacgcgtccgcaaaattagggaggaagaggnnnnnnnnnnngccagaaaaagttttcttttctgggagtcccagaacgaggtgcgggacggaagagggggtgaaggccagaggctcggggcttcaagaccgctgtctggagtccccctttccaggccatgtcggggcccacctggctgcccccgaagcagccggagcccgccagagcccctcaggggagggcgatcccccgcggcaccccggggccaccaccggcccacggagcagcactccagccccaccccagggtcaatttttgcccccttccatctgagcagtgttaccaggccccagggggaccggaggatcgggggccggcgtgggtggggtcccatggagtactccagcacacgcaggggctccctgcagacagggggggccttcgccctggaagcctggacgccgagatagacttgctgagcagcacgctggccgagctgaatgggggtcggggtcatgcgtcacggcgaccagaccgacaggcatatgagcccccgccacctcctgcctaccgcacgggctccctgaagccaaatccagcctcgccgctcccagcgtctccctatgggggccccactccagcctcttacactaccgccagcaccccggctggcccagccttccccgtgcaagtgaaggtggcacagccagtgaggggctgcggcccacccaggcggggagcctctcaggcctctgggcccctcccgggcccccactttcctctcccaggccgaggtgaagtctgggggcctggctataggagccagagagagccagggccaggggccaaagaggaagctgctgggatctctggccctgcaggaagaggaagaggaggcgagcacgggccccaggtgcccctgagccagcctccagaggatgagctggataggctgacgaagaagctggttcacgacatgaaccacccgcccagcggggagtactttggccagtgtggtggctgcggagaagatgtggttggggatggggctggggttgtggcccttgatcgcgtctttcacgtgggctgctttgtatgttctacatgccgggcccagcttcgcggccagcatttctacgccgtggagaggagggcatattgcgagggctgctacgtggccaccctggagaaatgtgccacgtgctcccagcccatcctggaccggatcctgcgggctatggggaaggcctaccaccctggctgcttcacctgcgtggtgtgtcaccgcggcctcgacggcatccccttcacagtggatgctacgagccagatccactgcattgaggactttcacaggaagtttgccccaagatgctcagtgtgcggtggggccataatgcctgagccaggtcaggaggagactgtgagaattgttgctctggatcgaagttttcacattggctgttacaagtgcgaggagtgtgggctgctgctctcctctgagggcgagtgtcagggctgctacccgctggatgggcacatcttgtgcaaggcctgcagcgcctggcgcatccaggagctctcagccaccgtcaccactgactgctgagtcttcctagaagtacctgctgggttctcagttccagttcccatcctttgattgatcactctccctgacatccacctgtatgactttgtcaccaaatgctgtcttctctttctccaatcaagaaataataatccctcgagtttacaaaacnnnnnnnnnnnnnnnnnnccctcgtgccgaatacgccacccaggcctcgctacctagga

SEQ ID NO: 72695 - DNA, 1020 bp, Homo Sapiens
ttgggcccaaaagttacttcccccgcttggggccgggtgggttttcaagttggtgaaacccaggtttttttcggtccagccctatccccagtctcaattccttttgggagggctggttccaaggggccacctggggggccccgtgcttcgcctttcctttttccctttttccctgcaaggggccagaagatccccaggcaggcttccctctttggcccccctggccccttggctctcttctgggctcctaatagcccaggcccccccagaccttccacctcgggcctggggagagggaaagtggggggccccgggaggggccccagaggccctgagaggctcccccgcctgggtgggccgcagccccctcactggcttgtggccaccttcacttgcacggggaaggctgggccagccggggtgctggcggtagtgtaagaggctggagtggggccccccatagggagacgctgggagcggcgaggctggatttggcttcagggagcccgtgcggtaggcaggaggtggcgggggctcatatgcctgtcggtctggtcgccgtgacgcatgaccccgacccccattcagctcggccagcgtgctgctcagcaagtctatctcggcgtccaggcttccagggcgaaggccccccctgtctgcagggagcccctgcgtgtgctggagtactccatgggaccccacccacgccggcccccgatcctccggtccccctggggcctggtaacactgctcagatggaagggggcaaaaattgaccctggggtggggctggagtgctgctccgtgggccggtggtggccccggggtgccgcgggggatcgccctcccctgaggggctctggcgggctccggctgcttcgggggcagccaggtgggccccgacatggcctggaaagggggactccagacagcggtcttgaagccccgagcctctggccttcaccccctcttccgtcccgcacctcgtttgggactccagaaaagaaaactttttctggc

SEQ ID NO: 72696 - DNA, 2855 bp, Homo Sapiens
  misc_feature (1787)..(1805): n is a, c, g, or t
  misc_feature (2208)..(2218): n is a, c, g, or t
  misc_feature (2725)..(2725): n is a, c, g, or t
ttttgcgatatcgtcgaccacgcgtccgctaacggtcttcttccgacagcttgctgccctagaccagagttggtggctggacctcctgcgacttccgagttgcgatgctgtacttctctttgttttgggcggctcggcctctgcagagatgtgggcagctggtcaggatggccattcgggctcagcacagcaacgcagcccagactcagactggggaagcaaacaggggctggacaggccaggagagcctgtcggacagtgatcctgagatgtgggagttgctgcagagggagaaggacaggcagtgtcgtggcctggagctcattgcctcagagaacttctgcagccgagctgcgctggaggccctggggtcctgtctgaacaacaagtactcggagggttatcctggcaagagatactatgggggagcagaggtggtggatgaaattgagctgctgtgccagcgccgggccttggaagcctttgacctggatcctgcacagtggggagtcaatgtccagccctactccgggtccccagccaacctggccgtctacacagcccttctgcaacctcacgaccggatcatggggctggacctgcccgatgggggccatctcacccacggctacatgtctgacgtcaagcggatatcagccacgtccatcttcttcgagtctatgccctataagctcaaccccaaaactggcctcattgactacaaccagctggcactgactgctcgacttttccggccacggctcatcatagctggcaccagcgcctatgctcgcctcattgactacgcccgcatgagagaggtgtgtgatgaagtccaagcacacctgctggcagacatggcccacatcagtggcctggtggctgccaaggtgattccctcgcctttcaagcacgcggacatcgtcaccaccactactcacaagactcttcgaggggccaggtcagggctcatcttctaccggaaaggggtgaaggctgtggaccccaagactggccgggagatcccttacacatttgaggaccgaatcaactttgccgtgttcccatccctgcaggggggcccccacaatcatgccattgctgcagtagctgtggccctaaagcaggcctgcacccccatgttccgggagtactccctgcaggttctgaagaatgctcgggccatggcagatgccctgctagagcgaggctactcactggtatcaggtggtactgacaaccacctggtgctggtggacctgcggcccaagggcctggatggagctcgggctgagcgggtgctagagcttgtatccatcactgccaacaagaacacctgtcctggagaccgaagtgccatcacaccgggcggcctgcggcttggggccccagccttaacttctcgacagttccgtgaggatgacttccggagagttgtggactttatagatgaaggggtcaacattggcttagaggtgaagagcaagactgccaagctccaggatttcaaatccttcctgcttaaggactcagaaacaagtcagcgtctggccaacctcaggcaacgggtggagcagtttgccagggccttccccatgcctggttttgatgagcattgaaggcacctgggaaatgaggcccacagactcaaagttactctccttccccctacctgggccagtgaaatagaaagcctttctattttttggtgcgggagggaagacctctcacttagggcaagagccaggtatagtctcccttcccagaatttgtaactgagaagatcnnnnnnnnnnnnnnnnnnnggtaacaagacttagaaggagggcccaggcactttctgtttgaacccctgtcatgatcacagtgtcagagacgcgtcctctttcttggggaagttgaggagtgcccttcagagccagtagcaggcaggggtgggtaggcaccctccttcctgtttttatctaataaaatgctaacctgccctgagtttccattactgtgggtggggttcccctgggccaaacagtgatttgtctccctcaatgtgtacaccgctccgctcccaccaccgctaccacaaggacccccggggctgcagcctcctctttctgtctctgatcagagccgacaccagacgtgattagcaggcgcagcaaattcaatttgttaaatgaaattgtattttgccccctctcttcccttaannnnnnnnnnnacgccttccatgcccggccgcgcttcggcccttaagcaacttttctatcccacttccttgtggacctgcgggcccccccatggtaaggggaaaactgcgtcataccccgccttcctagggaaacccttgggttacgggactatgcgcctgggtaactcttcccccactaataaaccgtccgggcggcacatcggcctcccccctgaaacaccatgcctcagcggtaccaccttcagggtctctaccctgggcgtcccctcaccctgcgcatttctgtgccgacgtgtccaacttttatacctaccgccccttccgccggacacttcttctcataggcacccggctgtgtcgttctgctttatatctctcgtgccccgatattgcccacaccggcttatttctccgcgtgagtgcgctggatctccggccgtcgcccctgcaccccttctgtttgatatccgtaagtactcagccggccaactaagcgttaacctcacaatagacccncaccacccccaggtcttgatgattatttatctccccaaccgtgttcgccacccatctcgcatattattctatccctccttctaacgtgtgtgtcaccggacctgtttgtcagtggcgccgcattccgccc

SEQ ID NO: 72697 - DNA, 1053 bp, Homo Sapiens
gtggaccggtccggattccagggatatcgtcgaccacgcgtccgcaaccgagcttcactgcttgcatcaggcaggggtcccggcggcagtgagggctggaaggaggtggaacggcctctgcagagatgtgggcagctggtcaggatggccattcgggctcagcacagcaacgcagcccagactcagactggggaagcaaacaggggctggacaggccaggagagcctgtcggacagtgatcctgagatgtgggagttgctgcagagggagaaggacaggcagtgtcgtggcctggagctcattgcctcagagaacttctgcagccgagctgcgctggaggccctggggtcctgtctgaacaacaagtactcggagggttatcctggcaagagatactatgggggagcagaggtggtggatgaaattgagctgctgtgccagcgccgggccttggaagcctttgacctggatcctgcacagtggggagtcaatgtccagccctactccgggtccccagccaacctggccgtctacacagcccttctgcaacctcacgaccggatcatggggctggacctgcccgatgggggccatctcacccacggctacatgtctgacgtcaagcggatatcagccacgtccatcttcttcgagtctatgccctataagctcaaccccaaaactggcctcattgactacaaccagctggcactgactgctcgacttttccggccacggctcatcatagctggcaccagcgcctatgctcgcctcattgactacgcccgcatgagagaggtgtgtgatgaagtcaaagcacacctgctggcagacatggcccacatcagtggcctggtggctgccaaggtgattccctcgcctttcaagcacgcggacatcgtcaccaccactactcacaagactcttcgagggggcaggtcaggctcatcttctaccggaaagggtgaaggcctgtggaccccaagactggccggaaattccttacacatttggggaccgatcactttggcgggttcccatccctgggggggc

SEQ ID NO: 72698 - DNA, 794 bp, Homo Sapiens
aaggctaggtacgaggctgggtggtaaatcggcacgaggcagagttggtggctggacctcctgcgacttccgagttgctgatgctgtacttctctttgttttggtgcggctcggcctctgcagagatgtgggcagctggtcaggatggccattcgggctcagcacagcaacgcagcccagactcagactggggaagcaaacaggggctggactaggccagtgagagcctgtcgtgacagatgatccgtgagatgtgggagttgctgcagagggagaatggacaggcatgtgtcgtggcctggagctcattgcctcatgagaacttctgcagccgagctgcgctggaggccctggggtcctgtctgaacaacaagtactcggagggttatcctggcaagagatactatgggggagcagaggtggtggatgaaattgagctgctgtgccagctgccgggccttggaagcctttgacctggatcctgcacagtggggagtcaatgtccagccctactcctgggtccccagcgcaacctggactgtctacacagaccttctgcaacctcacgaccggatcatggggctggaccttgccgatgggggccatctcacccacggctacattgtctgacgtcagcggatatcagccacgtccatcttctcgagtctatgcctatagctcaaccccaaaactggctcattgatacaacagttgcctgatgtcgattttcggcaggtaataaaagtggccaggcctttgtgctctattgtagccgttaaagtttgttggtagcc

SEQ ID NO: 72699 - DNA, 854 bp, Homo Sapiens
cggcagtaactactaacggttctaaggtagcgaggcctgggtggcgaattcggcacgaggccagagttggtggctggacctcctgcgacttccgagttgcgatgctgtacttctctttgttttgggcggctcggcctctgcagagatgtgggcagctggtcaggatggccattcgggctcagcacagcaacgcagcccagactcagactggggaagcaaacaggggctggacaggccaggagagcctgtcggacagtgatcctgagatgtgggagttgctgcagagggagaaggacaggcagtgtcgtggcctggagctcattgcctcagagaacttctgcagccgagctgcgctggaggccctggggtcctgtctgaacaacaagtactcggagggttatcctggcaagagatactatgggggagcagaggtggtggatgaaatagagctgctgtgccagcgccgggccttggaagcctttgacctggatcctgcacagtggggagtcaatgtccagccctactccgtggtccccagccaacctggccgtctacacagcccttctgcaacctcacgaccgtgatcatggggcttggacctgcccgatgggggccatctcacccacggctacatgtctgacgtcaagcggatatcagccacgtccatcttcttcgagtcttatgccctataagctcaaacccaaaaagtggctcattggactacaaacagctggcactgactggtcgactttttcccgggccaccggggttcaatccataagcctgggccaccagcgcctatgctcgcctcattgactacgcccgcatgagaagacggtgtgtgatgaagtcaa

SEQ ID NO: 72700 - DNA, 1054 bp, Homo Sapiens
ctctaggctaggtacgaggctgggtgtcgaattcggcacgagggcttgctgccctagaccagagttggtggctggacctcctgcgacttccgagttgcgatgctgtacttctctttgttttgggcggctcggcctctgcagagatgtgggcagctggtcaggatggccattcgggctcagcacagcaacgcagcccagactcagactggggaagcaaacaggggctggacaggccaggagagcctgtcggacagtgatcctgagatgtgggagttgctgcagagggagaaggacaggcagtgtcgtggcctggagctcattgcctcagagaacttctgcagccgagctgcgctggaggccctggggtcctgtctgaacaacaagtactcggagggttatcctggcaagagatactatgggggagcagaggtggtggatgaaattgagctgctgtgccagcgccgggccttggaagcctttgacctggatcctgcacagtggggagtcaatgtccagccctactccgggtccccagccaacctggccgtctacacagcccttctgcaacctcacgaccggatcatggggctggacctgcccgatgggggccatctcacccacggctacatgtctgacgtcaagcggatatcagccacgtccatcttcttcgagtctatgccctataagctcaacccaaaactggctcattgactacaaccagctggcactgactgtcgacttttccggcacggtcatcatagctggcaccagggctatgctcgctcattgactacgcccgcatgagagcacgtgtgtgatgaagtcaaaccacatctggtggagaattggccacatcagtggccgtgggtgcaaggtgatcctcgcttcagcaccgaatcgtacaccatatcaaagattcggggcaggcgggcactctacgaaggggaggtgggccaacgcggaacctccttggcgacatgcgggcctcgcggggcccaagcgggatggcagggccatcgaggaccagtaaggcgagctcacgacatggaacggg

SEQ ID NO: 72701 - DNA, 608 bp, Homo Sapiens
atggaccagcgaaaaggcagaggttgaaaagataattgcagttgcctgggacatttttcagccccttctttttggactaattggagcagaggtatctattgcatctctcagaccagaaactgtaggcctttgtgttgccaccgtaggcattgcagtattgatacgaattttgactacatttctgatggtgtgttttgctggttttaacttaaaagaaaagatatttatttcttttgcatggcttccaaaggccacagttcaggctgcaataggatctgtggctttggacacagcaaggtcacatggagagaaacaattagaagactatggaatggatgtgttgacagtggcatttttgtccatcctcatcacagccccaattggaagtctgcttattggtttactgggccccaggcttctgcagaaagttgaacatcaaaataaagatgaagaagttcaaggagagacttctgtgcaagtttagaggaagcgcggattctattactggaaacgttgggactgaaaggccaaagcttctgggcccaccatcaacgcagctccgctttcatttctttcacatacaactttccacataagatttcatgcgg

SEQ ID NO: 72702 - DNA, 748 bp, Homo Sapiens
  misc_feature (18)..(18): n is a, c, g, or t
  misc_feature (31)..(31): n is a, c, g, or t
  misc_feature (44)..(44): n is a, c, g, or t
  misc_feature (339)..(391): n is a, c, g, or t
agaatcgggcacgaggtntactgtaagtacnttaagatcatttntggaagcaggcgtggtagagtcctgtaaatgaatgctctgggctagatacagcttggagaacctgctggccttgttagacagcacttgggcctttgccagcagcaagaggtgaagcgaagccactcttacctctcccttcccctcccacctgccccctgcgtaggcacccagacttggagagacccgtctgctgttaatacttccatcctcttccttcccaaagagcagatcccaaggcatttactccttggtctgtctcgctttatctgtcgcccctcccagcgctgagagccnnnnnnnnnnnnnnnnnnnnnnnnnnnnnnnnnnnnnnnnnnnnnnnnnnnnncctccttcgctccttccagagctcagcatgtcacggcaaggactgccgcattggtgatggagggccagctgaggggaagttgctggtgagtttccttttctccatttctagcatatggacacctggcctctgcttgagcacttaggtgacaggaacttccgcacctcctgaggccctggatgattctaattgttagaaattctaattgttagaaatccttccttataatgaatgaattctgctttcctataatttctacctattgggccttgttctgttctctggaactaaacagaacaaccatttacccctccttttcaaactagagaataaagatttggttttagaactggaaaa

SEQ ID NO: 72703 - DNA, 1499 bp, Homo Sapiens
  misc_feature (402)..(439): n is a, c, g, or t
  misc_feature (692)..(692): n is a, c, g, or t
  misc_feature (724)..(724): n is a, c, g, or t
ggattcttaatgatcactttaatatgagtggaggtgattaatacttatgttacagactcactagtctgcaaaataattcaagagaagtcaatatttattagacaataaaataattgttccaaaggatatttctaaataacttcaaagaagttaccacaaagttaaaaaggaatatcttccatgttaagtttgtgataaaataatttaaacacatgattgactctacaaatcttttttacaaattacttcagaagttataagaggaaatgtttttctttttcctctgctatctcttattttttaccttcctacttctgatccccttaatatacaatattattgatgtaaactcaagaattcatggtaaaaggcatctttttgcttcacagaaatcatgacctnnnnnnnnnnnnnnnnnnnnnnnnnnnnnnnnnnnnnnttgaacttttttcaaaaaaattacaaaataggatgtataacataatctttggaaaacagacattttctttctactagaaatagcaaaaatcattccacattttttcttccccaattgcatgttcaattagcatacattccaacagtgtgcatgaaaaaatttctaagcccagaggtatttaagtgatttcttcctaagtgttttggctaattcagtggccaagaaactatgatgtttattctctgattggacnagagtcaagaaaacaaaaccagatataattanccaagggataaagctgatatgacccagcaacaatctgtcattacttcagctgttagtcggtcttctcccccccaacccagccccacaaaaaaagttctgctctgcttaagtgtacaagactccagtgaacttccaacagtttggcttcaagtgacctaggaatggagtgagtcatctgtaaagcctggagtggtccaaataacacagataacttcagtaacaactggaaacagctggctccaaatcagggagctaccccatcttcagtgacaaggaggaaacaaagtccaagcttcttaaacacgtaacgacaagtccaggaacgtggccggacataatccaaaaatgtgggatttttcagaggacagtgctgacgtgcataccattcttgagaataaaagcagagtaagactccattgccccagaaaagagaagtccacatcagaacattcccaatcggctttttccgactatcattgaccatgaagttgaaagccattcccaagaacatgaagagcacgaagagcacgggatagaaaaagctcaagccaacagccaaggcatattcgtgtactacagcagatacagccaagacagctaacctggccgcagatttgaatctcttggagaaaaaccagagaaagtccttgtaagcatagtaatatagccagtcctggacccccacattcccggttctataatagttggagtatgacgtggagttccaccaatccttatagaacatcctgtcaccaaagcgtaacatctcagcaaa

SEQ ID NO: 72704 - DNA, 609 bp, Homo Sapiens
tttgactatttaacaaaaatatttaatgctgccaaaaagtataaaaatacagtaggaatggcagtacaatacaaagtaatctctcctaatttatttcttgtacatctttctacatttcatacactcattaaaaacacttaacacatccaattaaaggttctgcaaagtcttctgctggtgggtgctcttcatcccctggatgtaaagtttactttgtaaacaaacaactgtgaggcaatctagagggttagcgagcctcactttagtttccggagtgggcttcaggtcttgctttgcacatcaatggttcaaaatttatagctgcagaatattctcaagtcatgaatattaggtgtctgtcaatcttggcctaaaacataaaataagaagtaatctattcaattcatatttaccaaacacacagacgaacatagatgcacacaaacataaaaggactaacaatgaactgaaaaggtgaccaaaaatcattcccacatgacacattcaaccacactaagtgctgcactgttatcttagggtaaaacggctggggtgctggatttccaaacgatggtggtgtgacgcggcctcatgtggaagcatcgtgac

SEQ ID NO: 72705 - DNA, 1026 bp, Homo Sapiens
  misc_feature (26)..(26): n is a, c, g, or t
  misc_feature (31)..(31): n is a, c, g, or t
  misc_feature (62)..(62): n is a, c, g, or t
  misc_feature (87)..(87): n is a, c, g, or t
  misc_feature (127)..(127): n is a, c, g, or t
  misc_feature (132)..(132): n is a, c, g, or t
  misc_feature (135)..(135): n is a, c, g, or t
  misc_feature (153)..(153): n is a, c, g, or t
  misc_feature (189)..(189): n is a, c, g, or t
  misc_feature (196)..(196): n is a, c, g, or t
  misc_feature (217)..(217): n is a, c, g, or t
  misc_feature (241)..(241): n is a, c, g, or t
ccaacagatgcccagagatgctgttnaaagnaacaggattcagtgtgagctcttgtcagagnatgtgagtcgtatatacagtacatntactacaattagaaaatatcaattgagagaatctgctccnttganccntgaccatgggcctgcgtngatccactgtagtgcagcattgggcgctctgcaccnttctctnttgtagacacttgtcttgttntgatggaaaaaggagatgatatanacataaaacaagtgtacttgaacatgagaaaataccgaatggtcttattcagaccccagatcaactgagattctcatacatggctataatagaaggaagcaaaatgtataaagggagattctagtatacagaaacgatggaaagaactttctaaggaagacttatctcctgcctttgatcattcaccaaacaaaataatgactgaaaaatacaatgggaacagaataggtctagaagaagaaaaactgacaggtgaccgatgtacaggactttcctctaaaatgcaagatacaatggaggagaacagtgagagtgctctacggaaacgtattcgagaggacagaaaggccaccacagctcagaaggtgcagcagatgaaacagaggctaaatgagaatgaacgaaaaagaaaaaggccaagattgacagacacctaatattcatgacttgagaatattctgcagctataaattttgaaccattgatgtgcaaagcaagacctgaagcccactccggaaactaaagtgaggctcgctaaccctctagattgcctcacagttgtttgtttacaaagtaaactttacatccaggggatgaagagcacccaccagcagaagactttgcagaacctttaattggatgtgttaagtgtttttaatgagtgtatgaaatgtagaaagatgtacaagaaataaattaggagagattactttgtattgtactgccattcctactgtatttttatactttttggcagcattaaatatttttgttaaatagtcaaa

SEQ ID NO: 72706 - DNA, 734 bp, Homo Sapiens
  misc_feature (30)..(30): n is a, c, g, or t
  misc_feature (98)..(98): n is a, c, g, or t
  misc_feature (648)..(690): n is a, c, g, or t
atacaaagcatacattgagctgtagtaagnctgaggaagagtacaactgaataatgatgtctttttcatcaagttcctaagagctgacttggagattntattcccagggctccactgctaggattcttctcactagttctaacaaaatctgtgatgttaaatgactgatgctctcaattgtgatccagagttttaaataaatgaaatcaaggtggattttgggaatatatcctgaagttaacatcttgatgtccttcttgttgtaagatgatatttggcaatttaaaatctatgtgctacccacctgggcttgtctcaatccgtggactttttggtgtggcagtttcacctgaattccacacatcagatttgtttggaaatattgtactgtacagggactatgcattatgcagaaagatatagttttctttgaactgctgtaaccttaaattggaaactgattcttgtgagcctactttccttaatcccgccgcccccctcccccacttaatgtaaatgtcttgatgagagataatggatgagtattttgtatgatgaaatcaaacgatttaggaatttgtctccctccgttacacagttgatgcctgaaagaatgttgggggggaggactcaacaccctaattgtannnnnnnnnnnnnnnnnnnnnnnnnnnnnnnnnnnnnnnnnnnctgtaaaaatacatggaaatgtatgcattccacaaccaaaaaaa

SEQ ID NO: 72707 - DNA, 455 bp, Homo Sapiens
  misc_feature (395)..(413): n is a, c, g, or t
gaacctgatatactgtttgtttactctcaactctttgtacaaatattattgtcctaagggccttttcccctcctgcctagaaaataggttgtgtattggttttattcaacctgctgtctgctttaggattggagaaggtacctggatccttgtggactgccactgctggctgcctcctctccaactcatcagaagagcattttgacaaagacagaggacttggaccagggcatgccctgttggggatgtttctgtcagcaaggacatggcatggaatcaagtgggctgatgtgttgttatttaaacagtaccaaagtgcattcttcaatgtatgtttgcctgcttgaagcaaggcccaagttgagaatacagtaaaggaaactcatgaaagtggnnnnnnnnnnnnnnnnnnngcctacagccgcggccgcaagcttattccctgttagtgaggg

SEQ ID NO: 72708 - DNA, 832 bp, Homo Sapiens
  misc_feature (235)..(235): n is a, c, g, or t
ggggaactgccaaaaacggtccaacagccaacagaatctgagccagtcaccataaatatccaagacctactttcctgttctaattttgcagtgcaacacagatatctgtttgaagaagacaatcttttacggtctacacaaaagctttcccattcaacaaaaccttcaggaagccctttggaagaaaaacacgatcaatgcaaatgtgaaaaccttataatgttccagaaccttncaaacgaagaagtaagaaaattaacacagcgcttagaagaaatgacacagagaatggaagccctggaaaatcgcctgagatacagatgaagattagaaatcgcgacacatttgtagtcattgtatcacggagattacaatgaacgcagtgcagagccccaaagctcaggctattgttaaatcaataatgttgtgaagtaaaacaatcagtactgagaaacctggtttgccacagaacaaagacaagaagtatacactaacttgtataaatttatctaggaaaaaaatccttcagaattctaagatgaatttaccaggtgagaatgaataagctatgcaaggtattttgtaatatactgtggacacaacttgcttctgcctcatcctgccttagtgtgcaatctcatttgactatacgataaagtttgcacagtcttacttctgtagaacactggccataggaaatgctgtttttttgtactggactttaccttgatatatgtatatggatgtatgcataaaatcataggacatatgtacttgtggaacaagttggattttttatacaatattaaaattcaccacttcagagaatggt

SEQ ID NO: 72709 - DNA, 2561 bp, Homo Sapiens
ggaattcccgggatatcgtcgacccacgcgtccgagaccgcggaggcctacgtcggacccggaggccctgaatgccccatgcgcaccccacagctcgcgctcctgcaagtgttctttctggtgttccccgatggcgtccggcctcagccctcttcctccccatcaggggcagtgcccacgtctttggagctgcagcgagggacggatggcggaaccctccagtccccttcagaggcgactgcaactcgcccggccgtgcctggactccctacagtggtccctactctcgtgactccctcggcccctgggaataggactgtggacctcttcccagtcttaccgatctgtgtctgtgacttgactcctggagcctgcgatataaattgctgctgcgacagggactgctatcttctccatccgaggacagttttctccttctgccttccaggcagcgtaaggtcttcaagctgggtttgtgtagacaactctgttatcttcaggagtaattccccgtttccttcaagagttttcatggattctaatggaatcaggcagttttgtgtccatgtgaacaactcaaacttaaactatttccagaagcttcaaaaggtcaatgcaaccaacttccaggccctggctgcagagtttggaggcgaatcattcacttcaacattccaaacacaatcaccaccatctttttacagggctggggaccccattcttacttacttccccaagtggtctgtaataagcttgctgagacaacctgcaggagttggagctgggggactctgtgctgaaagcaatcctgcaggtttcctagagagtaaaagtacaacttgcactcgttttttcaagaacctggctagtagctgtaccttggattcagccctcaatgctgcctcttactataacttcacagtcttaaaggttccaagaagcatgactgatccacagaatatggagttccaggttcctgtaatacttacctcacaggctaatgctcctctgttggctggaaacacttgtcagaatgtagtttctcaggtcacctatgagatagagaccaatgggacttttggaatccagaaagtttctgtcagtttgggacaaaccaacctgactgttgagccaggcgcttccttacagcaacacttcatccttcgcttcagggcttttcaacagagcacagctgcttctctcaccagtcctagaagtgggaatcctggctatatagttgggaagccactcttggctctgactgatgatataagttactcaatgaccctcttacagagccagggtaatggaagttgctcctgttaaaagaacatgaaagtgcagtttggagtgaatgcaatatctggatgcaagctcaggttgaagaaggcagactgcagccacttgcagcaggagatttatcagactcttcatggaaggcccagaccagagtatgttgccatctttggtaatgctgacccagcccagaaaggagggtggaccaggatcctcaacaggcactgcagcatttcagctataaactgtacttcctgctgtctcataccagtttccctggagatccaggtattgtgggcatatgtaggtctcctgtccaacccgcaagctcatgtatcaggagttcgattcctataccagtgccagtctatacaggattctcagcaagttacagaagtatctttgacaactcttgtgaactttgtggacattacccagaagccacagcctccaaggggccaacccaaaatggactggaaatggccattcgacttctttcccttcaaagtggcattcagcagaggagtattctctcaaaaatgctcagtctctcccatccttatcctgtgcctcttactacttggagttctcaacctagagactatgtgaagaaaagaaaataatcagatttcagttttccctatgagaaactctgaggcagccacttatcttggctaaatagaacctcacctgctcatgaccagagagcatttaggataatagaggacctaactgaaggaatccttgtatatgaaaggagttattttagaaaagcaataaaaatattttattcatcatagctctctgctttgggctctgcaggccaccagatacacatgaggcccctacttctcaagctgggaaggccaagagccttccttcagcctttctggttatgttacacctagctgaatgtttacaaggtctggatccatcagccctcaggcacagttgggccaagcagaaagagagaaacacttctgctgtcaccttgaatgaactcaggaatagcttccctctggactgtagaggagctaactgtttggaacagaaaactgctggctgttgattttgtctggttcctttgccaacatctgggcacaccctttgcccagacacgagtggggaaagcagttctttctcctcagtttccaaagtaaatggggaatcccagctttcttttctactagcaaatgaccctaccatttatttctgcctttttcttccgttcattgtgaggaaaaataaaactggttgagagcttt

SEQ ID NO: 72710 - DNA, 1403 bp, Homo Sapiens
ggcctgggtggcgaattccgcacgaggccccaccctgccgcgcgtgctgctggagctggccaatgtctctacccacattgtcgcctttgacgccgtcctgtttgagccaagccgccacgccgcctacatccttctgacaggcccggcagactcagaggcacccggcctggtctctgtgatcaagcacaaggtgcgggaccttgtcccaagcagcagggtggtccgcctgggtgagggtgggccagacagtgaccaagccatcagggaccggttctcccggctgcggtaccagagtgaggcgtagaggcacgccagccagagcctgtggagagactccgcctgctgacactaaacgtcctgggaagtgggcccttccctgggtctctgcactgactcccccactcctgaccctggtgatggtcgccactgggcagcagcagccttaccagtcctccatgatcacacccagggacctgcatgggtgaggggacaccctgggcctctctcccgcccagcatcctccctgagtccccacacagggcctcactctgcaccccaccagggtcccgctcacaccaggcagccttcatagtggtctccctggccaccttgggcagagctgggtcatgcagcaccccatccttacccggtgccctctccttgccagcttctccccaggccagagcggccatcgcgtagaaagaaccagggtgtccccgggacaggccgtcccccaccccatcctgtagaagtccattccccttttccctcctgtgctctgtcccccaaggagtcatggaactcagggtactgggcctcaacgggaacctgagacagctccagcttcgcagcccttcccggagctacagggggatcctctagcatggggggtgtgacttggttcctttgaccaggtcctgtgaggaagcctggagcaagggtctcccccagcaggatgggtggggcctgctctggagctgagcccgtggccgctcacaggtgtccttagtggtgttgcagctgtctactggctgcatgtgctgtgaatatcccaaggaactggctgtggaatgcgtgtttgggtcagtctgtgccctctcagtagacactggagctgctctgtccctgaagaggccccgtgccccaggcatggcaagcgcctgcctctccccttccggtgctcacacgcccacgccgtgccacccgatgcaggactcacctctgtgccttgctgctcctgaggcccaagggcagccatggtgctctgtactgctcgggccgcccaggtcacagagcctgagcttcgtagccaaagcagcctgatgacccacccaccaaggaagaaagcagaataaacatttttgcactgcctgaaaaaccccggtggtcaggcgtgagcctag

SEQ ID NO: 72711 - DNA, 1219 bp, Homo Sapiens
  misc_feature (805)..(813): n is a, c, g, or t
  misc_feature (815)..(816): n is a, c, g, or t
  misc_feature (987)..(995): n is a, c, g, or t
  misc_feature (1024)..(1033): n is a, c, g, or t
  misc_feature (1080)..(1129): n is a, c, g, or t
gcggccgccagcgagatcaagcgggaggagaaggaggacgaggagaacacgtcagcggctgaccactcggaggaggagaagaaggagctgaaggccccccgggcccggaccagcagtacggacgaggtgctgtccctggaggagaaagacctgagggaccgggagaggcgcatggccaataacgcgcgggagcgggtgcgcgtgcgggatattaacgaggccttccgggagctggggcgcatgtgccagatgcacctcaagtcggacaaagcgcagaccaagctgctcatcctgcagcaggccgtgcaggtcatcctggggctggagcagcaggtgcgagagcggaacctgaatcccaaagcagcctgtttgaaacggcgagaagaggaaaaggtgtcaggtgtggttggagacccccagatggtgctttcagctccccacccaggcctgagcgaagcccacaaccccgccgggcacatgtgaaaggtatgcctccgtgggacgagccacccgctttcagccctgtgctctggccccagaacggccactcgagaccccgggcttcatccacatccacacctcacacacctgttgtcagcatcgagccaacaccaacctgacaaggttcggagtgatgggggcggccaaggtgacactgggtccaggagctccctggggccctggcctaccactcactggcctcgctccccctgtccccgaatctcagccaccgtgtcactctgtgacctgtcccatggatcctgaaactgcatcttggccctgttgcctgggctgacaggagcannnnnnnnncnnccagtaaacaaaacctgaaagcaagcaacaaaacatacactttgtcagagaagaaaaaaatgccttaactataaaaagcggagaaatggaaacatatcactcaagggggatgctgtggaaacctggcttattcttctaaagccaccagcaaattgtgcctaagcgaaatannnnnnnnnaaggaaaataaaaacattagttacaagannnnnnnnnncttaatgtagatgaaaattagcaaggatgctgcctttggtctctggnnnnnnnnnnnnnnnnnnnnnnnnnnnnnnnnnnnnnnnnnnnnnnnnnnataaaagtcccgtgtctctcgctatttctgctgctgttcctagactgagcattgcatttcttgatcaaccagatgattaaacgttgtatt

SEQ ID NO: 72712 - DNA, 192 bp, Homo Sapiens
  misc_feature (97)..(146): n is a, c, g, or t
ctttttaatacaacgtttaatcatctggttgatcaagaaatgcaatgctcagtctaggaacagcagcagaaatagcgagagacacgggacttttatnnnnnnnnnnnnnnnnnnnnnnnnnnnnnnnnnnnnnnnnnnnnnnnnnnccagagaccaaaggcagcatccttgctaattttcatctacattaag

SEQ ID NO: 72713 - DNA, 1115 bp, Homo Sapiens
ggagcgaggctgggtgggattccgacgaggcacagccccgggcccctgtccccttcgggcatgaaggggacctcccagtactacccctcctactccggcagctcccggcggagagcggcagacggcagcctagacacgcagcccaagaaggtccggaaggtcccgccgggtcttccatcctcggtgtacccacccagctcaggtgaggactacggcagggatgccaccgcctacccgtccgccaagacccccagcagcacctatcccgcccccttctacgtggcagatggcagcctgcacccctcagccgagctctggagtcccccgggccaggcgggcttcgggcccatgctgggtgggggctcatccccgctgcccctcccgcccggtagcggcccggtgggcagcagtggaagcagcagcacgtttggtggcctgcaccagcacgagcgtatgggctaccagctgcatggagcagaggtgaacggtgggctcccatctgcatcctccttctcctcagcccccggagccacgtacggcggcgtctccagccacacgccgcctgtcagcggggccgacagcctcctgggctcccgagggaccacagctggcagctccggggatgccctcggcaaagcactggcctcgatctactccccggatcactcaagcaataacttctcgtccagcccttctacccccgtgggctccccccagggcctggcaggaacgtcacagtggcctcgagcaggagcccccggtgccttatcgcccagctacgacgggggtctccacggcctgcagagtaagatagaagaccacctggacgaggccatccacgtgctccgcagccacgccgtgggcacagccggcgacatgcacacgctgctgcctggccacggggcgctggcctcaggtttcaccggccccatgtcgctgggcgggcggcacgcaggcctggttggaggcagccaccccgaggacggcctcgcaggcagcaccagcctcatgcacaaccacgcggccctccccagccagccaggcaccctccctgacctgtctcggcctcccgactcctacagtgggctagggcgagcaggtgccacggcggccgc

SEQ ID NO: 72714 - DNA, 619 bp, Homo Sapiens
ggaccgccgtgcacctgctcgccctagcccactgtaggagtcgggaggccgagacaggtcagggagggtgcctggctggctggggagggccgcgtggttgtgcatgaggctggtgctgcctgcgaggccgtcctcggggtggctgcctccaaccaggcctgcgtgcgcccacccagcgacatgggaccggtgaaacctgaggccagcgccccgtggccaggcagcagcgtgtgcatgtcgccggctgtgccacggcgtgcatgcggacacgtggatggcctcgtccaggtggtcttctatcttactctgcaggccgtggagacccccgtcgtagctgggcgataaggcaccgggggctcctgctcgaggccactgtgacgttcctgccaggcccttgggtggagcacaccgggggtagaagggctggacgagaagttattgcttgagtgatcaggggagtagatcgaggccagtgctttgcagaggcatccccggagctgcagctgtggtcctcaggagccaggagctgtcggcacgctgacggcgcagtgtggctggagacgcgcgtacgtggctcagttgctgatgagaagaggatcagatgggagccacagttcac

SEQ ID NO: 72715 - DNA, 532 bp, Homo Sapiens
  misc_feature (520)..(520): n is a, c, g, or t
gcggccgccagcgagatcaagcgggaggagaaggaggacgaggagaacacgtcagcggctgaccactcggaggaggagaagaaggagctgaaggccccccgggcccggaccagagcagaaggccgagcgggagaaggagcgccgggtggccaataacgcccgggagcggctgcgggtccgtgacatcaacgaggcctttaaggagctggggcgcatgtgccaactgcacctcaacagcgagaagccccagaccaaactgctcatcctgcaccaggctgtctcggtcatcctgaacttggagcagcaagtgcgagcagtacggacgaggtgctgtccctggaggagaaagacctgagggaccgggagaggcgcatggccaataacgcgcgggagcgggtgcgcgtgcgggatattaacgaggccttccgggagctggggcgcatgtgccagatgcacctcaagtcggacaaagcgcagaccaagctgctcatcctgcagcaggccgtgcaggtcatcctgnggctggagcagc

SEQ ID NO: 72716 - DNA, 468 bp, Homo Sapiens
cggggttgtgggcttcgctcaggcctgggtggggagctgaaagcaccatctgggggtctccaaccacacctgacaccttttcctcttctcgccgtttcaaacaggctgctttgggattcaggttccgctctcgcacttgctgctccaagttcaggatgaccgagacagcctggtgcaggatgagcagtttggtctggggcttctcgctgttgaggtgcagttggcacatgcgccccagctccttaaaggcctcgttgatgtcacggacccgcagccgctcccgggcgttattggccacccggcgctccttctcccgctcggccttctgctctggggggagaaggtcgtcctcgtcctcgtctgggctggtccgggcccggggggccttcagctccttcttctcctcctccgagtggtcagccgctgacgtgttctcctcgtcctccttctcctcaagatgatctcgct

SEQ ID NO: 72717 - DNA, 1245 bp, Homo Sapiens
ggtcacacgggggctacggcggaggttctgggggcggctcctcattaccaaggcaaacaaggaggctactcacagtcgaactacaactccccggggtccggccagaactacagtggccctcccagctcctaccagtcctcacaaggcggctatggcagaaacgcagaccacagcatgaactaccagtacagataagcccccgcggggcggagatttctaccttctgcacttactccccatcagaagatcgagttttatgcatcacagttaacatgtcagctggccctccaggcccccgcccccatcccgtccacgttgctgtgtcgtgaggtgcagcgggtcaccctgtggcccgtcctgtgacccatatttagccgtgtttgggactccgtgtcttcaatggtttgttagttgccattacaactttgtctgggtagagtttttgagtttttgcagttcagtatccctctgtctattcacacttcgtgttagtggtaactcagtttgtctttaaatagttacagaagggatacgtcatttgttaatgcttttgtgaagtgagttaaacgagctttctgtattttaatgctttagtgtttcagttttataagtgaagattttattttaaaaaccagtgggaaagagtggggggtttctttttatgtctgggtcattcaggcagtacatctgaattaagctgaatgtagacaaataaagaaaaacaaaactgcgcccgtcttaggcctgggtgtctgacccaccagcagtgcaatgggcaggtttccccactctattcctgctcttgggaaagcagcgtgggccatcaggatggtccctggtccttagagagggtccagttcaggcttctagacattttactcatgctcagcgaaggctggttcctggtcccctgggctgtgtagacccggtgtcccaccaggctccaggctcccaccatctacagaggggcttacagcgcccattctggtcttggggaacccatcacaaaataggctttttctgctccccgattctggtgtagttctaagtacacagtgatgtcctctgtaggggcgtgcctgtggtggaacatacgcagttacaaaagaagggcaggtgagcctgggtaacccagcatggacgtcagtgctggaggagctcgtgttgtgctgagctcagctgtcgcatctgagctcatgatgggagtgggtctatacacgattctaactgattcctcgagactgc

SEQ ID NO: 72718 - DNA, 1724 bp, Homo Sapiens
  misc_feature (756)..(832): n is a, c, g, or t
  misc_feature (839)..(840): n is a, c, g, or t
  misc_feature (842)..(843): n is a, c, g, or t
  misc_feature (845)..(846): n is a, c, g, or t
  misc_feature (875)..(875): n is a, c, g, or t
taccaacctatgggcaaggcagtgctcattggtggcacaatggaacctgtagttatgttcttactggcactgacaagggcatgactgagacctttggaacaacctgtcatggagcgggccgtgcattgtcccgagcaaaatctcgacgtaatttagatttccaggatgtcttagacaaattggcagatatgggaattgcgatccgtgttgcctcacccaaactggttatggaagaggctcctgagtcctataagaatgtgacagatgtggtaaatacctgccatgatgctggaatcagcaagaaagccattaaactgagaccaattgctgtgatcaaaggatagaaccttggacagcagggctgcctgacaccaccaaccctctctgaagtggaagtggactgacatgctcttctgacatcagactcaaggcgggacaagttgcaaagtgtgcagctgtaactgctcacgccaaaatggctgatggggaggctgctgctttcaggggcccgtgcttgtaaaataaccttccaggaagaggcacattgcccacctttggaaagggaggaatatgccttctccttggttgttccacagagttttaggaaaatctgttagggatgggtagatgtcaaactgccttacgcagtcatactgatctttagccatcagattgatcttcttcacaccaagctctgtttacattccgagaggtgtcatgaagaaagttctgttcaataaggttttggaatgttannnnnnnnnnnnnnnnnnnnnnnnnnnnnnnnnnnnnnnnnnnnnnnnnnnnnnnnnnnnnnnnnnnnnnnnnnnnncaaacannannanncccaccgcccccgacccccaagaacacanccaaaacccaccccccaggcgcccccacccaaaagggcaaccgagccgggaccaaaggcgactgccccggaagaaacgggaacgaccaaggcgctgtgggtcctgcaccacattaaaggcgctgcggggatcagcgccaaattcccttgtaaaaacctcaacgggggtgcctgatggagactcttcggaaattctgtcccccccgatgtgcaagcgggggccattaaattgacatgaaaggccagcacccttaagaaaatcaatggcgctaccctggaggagaaaaatccattaagtggtacttgctgtgccaccgcggcgaagacccattgtggggaatgggcccatttcggggaagcccttaaaaagggacaattgcggcccattaaagacccctttgaagtgggcactccacgcgagaaaaacactttttggcctgcctaaggggaaaacacacgggggggattcccaaataaatgataatatgcaccttggcggtggcactggggccttataaaacttcgggaacagacaagcgggccaaatactccatgcgcccactgggcggatatttgccctggtaaaataaaacgcattacccccactcttgttgctccccccctcttgacatacctcgcttattattagtgggaagccctacgaggggcgaggagaggtttcttttacacctccgttgaaacacacagccctctcgccaacatctgggttgctggaaacaaccacactatttgtgttgagagcaaaacaatagtcggcgcgcggggcaaaaaacacgcctcgctcagctgggcgagtgctctatatgactactacacatacagaaacaat

SEQ ID NO: 72719 - DNA, 1877 bp, Homo Sapiens
cagtcgacggtaccggacatatgcccgggaattcggccattacggccggggggaaggcggtgctctgagaagccggactacgcggcagcggctcttcaaagcggagccgggagtttttgctacagttttcgccaccatgagtcgcagctataatgatgagctgcagttcttggagaagatcaataaaaactgctggaggatcaagaagggcttcgtgcccaacatgcaggttgaaggtgttttctatgtgaatgatgctctggagaaattgatgtttgaggaattaaggaatgcctgtcgaggtggtggtgttggtggcttcctgccagccatgaaacagattggcaatgtggcagccctgcctggaattgttcatcgatctattgggcttcctgatgtccattcaggatatgggtttgctattgggaacatggcagcctttgatatgaatgaccctgaagcagtagtatccccaggtggtgtcgggtttgacatcaactgtggtgtccgcttgctaagaaccaatttagatgaaagtgatgtccagcctgtgaaggagcaacttgcccaagctatgtttgaccacattcctgttggggtggggtcaaaaggtgtcatcccaatgaatgccaaagacttggaggaggccttggagatgggggtggactggtccttaagagaagggtatgcctgggctgaagacaaggagcactgcgaggagtacggaaggatgctgcaagctgaccccaataaagtttctgcaagggcgaagaaaagaggccttcctcagttggggaccctgggagcaggcaaccattatgcagaaatccaggttgtggatgagattttcaatgagtatgctgctaaaaaaatgggcatcgaccataagggacaggtgtgtgtgatgatccacagtggaagcagaggcttgggccaccaagtagccacagatgcgctggtagctatggagaaggccatgaagagagacaagattatagtcaatgatcggcagttggcttgtgctcgaatcgcttccccagagggtcaagactatctgaagggaatggcagctgctgggaactatgcctgggtcaaccgctcttccatgaccttcttaacccgtcagggctttcgccaaggtcttcaacacaacccctgatgacttggacctacatgtgatctatgatgtttctcacaacattgccaaagtggagcagcatgtggtggacggaaaggaacggacactgttagtacacaggaagggatccacccgcgctttccctcctcaccatcccctcattgctgttgattaccaactcactggacagccagtgctcattggtggcaccatgggaacctgtagttatgttcttactggcactgaacagggcatgactgagacctttggaacaacctgtcatggagcgggccgtgcattgtcccgagcaaaatctcgacgtaatttagatttccaggatgtcttagacaaattggcagatatgggaattgcgatccgtgttgcctcacccaaactggttatggaagaggctcctgagtcctataagaatgtgacagatgtggtaaatacctggccatgatgctggaatcagcaagaaagccattaaactgagaccaaattgctgtgatcaaaggatagaaccctttgggaccagcagggctggcctgacaccaaccaacccctctctggaaggggaaaggggaactgaccatggttccttctggaaattcaaactccaagggggggaacaagttgccaaaggggtggcagcctggaaaagggctccaccgccaaaaattgggctttgaaggggggaagggctgccttggcttttccaggggggccccggggccttggg

SEQ ID NO: 72720 - DNA, 816 bp, Homo Sapiens
gggggaaggcggtgctctgagaagccggactacgcggcagcggctcttcaaagcggagccgggagtttttgctacagttttcgccaccatgagtcgcagctataatgatgagctgcagttcttggagaagatcaataaaaactgctggaggatcaagaagggcttcgtgcccaacatgcaggttgaaggtgttttctatgtgaatgatgctctggagaaattgatgtttgaggaattaaggaatgcctgtcgaggtggtggtgttggtggcttcctgccagccatgaaacagattggcaatgtggcagccctgcctggaattgttcatcgatctattgggcttcctgatgtccattcaggatatgggtttgctattgggaacatggcagcctttgatatgaatgaccctgaaccagtactatccccaggtggtgtcgggtttgacatcaactgtggtgtccgcttgctaagaaccaatttagatgaaagtgatgtccagcctgtgaaggagcaacttgcccaagctatgtttgacccacattcctgttggggtggggtcaaaaggtgtcatccccatgaatgccaaagacttggaggaggccttgggaaagggggttggactggtccttaagaaagggtatgccctgggctgaagaccaagaacactggcgaggagtacggaaagatgctgcaggctgaaccccaataaagtttctgcaaagggcgaaagaaaagaagcctttcctcaggtgggggaccctggggagcaggcaaccaattaaggcaaaaattcccgggttgggggatgagattttc

SEQ ID NO: 72721 - DNA, 896 bp, Homo Sapiens
  misc_feature (531)..(542): n is a, c, g, or t
ttttttatgttttttgttaggaatcagaaagtataataatatgcttggtttctttttcctatagtaacattttacaaaagagctgctaggcaggtattttattctcaaagtgatctcaaactggatgtaaaattttaaattatttttttaatagtagtataagaattctggctgctattagttattgtttgttttctgggttagaagctattcgaaaagtccagtttctgtcccagtgtagcaaaatgtagttcctcggttgtttttctttaaatgctttataattttacactacctttttaatatacaaacctcattcttcattggataacttgaaggctttgatttctttaaaaatttaaattttagtgtgtatattactttgacagttccctcatctttgagatgcactgatcactgtgcttgaaaaagacaatactgaagattgtactatgaagtttattgaataattttcataaattatttatccaaatgagagatttttagatttttgtattctgcttagttttnnnnnnnnnnnntagtagtttaaaagagaggctagtaagtttgatgctattcttgccaaacaaactcagccaaaatctttaaagtaacaagagggaaaaggatgactaatcgttctgcttctgagtacattttccaaaacgttggaaagaaacttctgaattgaaatcttgaatgtattgaatctgtcaaggtacacagcggtgcctttgtaaatgttcattactttatttaatcaggtgataagtggtgtaatgtagcagagcttaagaatagaactcaattatcactttttgtgaacaagttggaattgtcatgttactgtgtaattgatttgctttacaatgaacaataaatttaataaaata

SEQ ID NO: 72722 - DNA, 671 bp, Homo Sapiens
  misc_feature (50)..(50): n is a, c, g, or t
  misc_feature (70)..(70): n is a, c, g, or t
  misc_feature (92)..(92): n is a, c, g, or t
  misc_feature (145)..(189): n is a, c, g, or t
acccaaagtcataaatatattctttactgccttgtggaaattttatagtnttgcctttcacatgtgtctntagtctgtcctgaactgatttntgtgaaaattatgagttagaaattcaacttaacatttttcatattcgaagtgnnnnnnnnnnnnnnnnnnnnnnnnnnnnnnnnnnnnnnnnnnnnnatttgtaacactgcctctttcataaattaaatttttgtgtatgtgtgtgggtcttttgatggtttctattctgactgacatcaatttgtctaatcttgtagcagtacagtacagtcctgattattgcaactttaggaaaaggtctgataaaaaccaagatgcctccacattttgtcataattgtaaccaatttcacctctgtctccagtatcaccacaaaattgttcttccttggagtgtcttggctattcttagccaactgttcctccatattacttctagaattagaccaacaatttataaatcaaacaaacccaagagcattgaaattttgattggatttgtattgaatttatagattaatctggtaaaccatgtcatctttacaatgttgtcttccaatacatgaatatggtacagctcttcatttacttaggcctttgaaatatctttcaataaagtttataattttctccaaaaaa

SEQ ID NO: 72723 - DNA, 2125 bp, Homo Sapiens
  misc_feature (79)..(113): n is a, c, g, or t
aaaagatttaatcactataggcgctactcgtcgtagcgaacgacgagcgcagcgaagtagtgagcgaggaagcggccgnnnnnnnnnnnnnnnnnnnnnnnnnnnnnnnnnnncagtcgacggtaccggacatatgcccgggaattcggccattacggccggggtccctcgccttcctgttcctggcggagccgggctccgctcgtcttctctgtcttagggctggtgctggccctgcccacgcctagggctccggcgcgtcacgggcctcagctgggattcccgcgcccctcggacggccacgagactcggacatctttccaggaacagcgtgaggaggacagaagcacccaacaggactgctcaagccacctgcgaacactgctgctaccatgcccaagagaaaggcaaaaggagatgctaaaggtgataaagcaaaggtgaaggatgagccacagaggagatcagctcggttgtctgctaaaccagctcctccaaaaccagagcccaggcctaaaaaggcctctgcaaagaagggagagaagcttcccaaagggagaaaggggaaagcagatgctggaaaggatgggaacaaccctgcaaaaaaccgagatgcctctacactccagtcccagaaagcggaaggcactggggatgccaagtgaaatgtacatttttgagagctctgtacttatagtgactctactgtttgaaatactatttttttaaatcaagttttataaaagtgtagaattttggcttttttaagttatgttgttagcacacaggacacttccttgttgtcttttgtggaaagggcaagtaccactaatagggtgtatctcagaaactgaattgaaataagggaaaataggattttctgtcctggtttttgaagattgttcttgattcccttgattcccaggagagattctctgacattcacgtgtcagccactttggcacggaagccttacagtgtggggaaccaaaacttcgtgtctcctctttccccgatgccatcagcatagacttgacttccttaaaccgagagttttgatgtggccttggcaaccctaaaatcagctgtgttaggtaacaaaactcaggctttctgttgatgacatcgagatggtgtcacttaaaagagccaagattcctgttttcagtttgtggattcatcctgctggttttactttagtccctccatgtcaaagtgggcctgagaaaagctcatacatgcctcatgtgaagtgtccaccctctctgaaaatctttcttgttcaaaacagcaacgacatatcttgttaacttttacggtgacttttggaggaggggagtttggaaattgtaaaatgttatagattgttgcctatttcctgctgaaagtaaatgtttttaaaaagtatcatataaagctgaatacaaattggtttggggggagatcctttcctacccaaagtcataaatatattctttactgccttgtggaaattttatagttttgcctttcacatttgtctttagtctgtcctgaactgatttttgtgaaaattatgagttagaaattcaacttaacatttttcatattcgaagtggttgtctctgcactatttactgaaaagttcatcctttccccagtgatttgtaacactgcctctttcataaattaaatttttgtgtatgtgtgtgggtctattgatggtttctattctgactgacatcaatttgtctaatcttgtagcagtacagtacagtcctgattactgcaactttaggaaaaggtctgataaaaaccaagatgcctccacattttgtcataattgtaaccaatttcacctctgtctccagtatcaccacaaaattgttcttcctttggagggtctcggctattcttagccaactgttccttccatattaccttctagaaattagacccaacaatttaataaatcaaacaaacccaagagcattgaaattttgattggatttgtattgaatttatagattaatctggtaaaccatgtcatctttacaatgttgtcttccaatacatgaatatggtacagctcttcatttacttaggcctttgaaatatctttcaataaagtttataattttctccg

SEQ ID NO: 72724 - DNA, 625 bp, Homo Sapiens
  misc_feature (51)..(98): n is a, c, g, or t
gacccacacacatacacaaaaatttaatttatgaaagaggcagtgttacannnnnnnnnnnnnnnnnnnnnnnnnnnnnnnnnnnnnnnnnnnnnnnncacttcgaatatgaaaaatgttaagttgaatttctaactcataattttcacaaaaatcagttcaggacagactaaagacaaatgtgaaaggcaaaactataaaatttccacaaggcagtaaagaatatatttatgactttgggtaggaaaggatctccccccaaaccaatttgtattcagctttatatgatactttttaaaaacatttactttcagcaggaaataggcaacaatctataacattttacaatttccaaactcccctcctccaaaagtcaccgtaaaagttaacaagatatgtcgttgctgttttgaacaagaaagattttcagagagggtggacacttcacatgaggcatgtatgagcttttctcaggcccactttgacatggagggactaaagtaaaaccagcaggatgaatccacaaactgaaaacaggaatcttggctcttttaagtgacaccatctcgatgtcatcaacagaaagcctgagttttgttacctaacacagctgattttagggttg

SEQ ID NO: 72725 - DNA, 794 bp, Homo Sapiens
  misc_feature (324)..(336): n is a, c, g, or t
ttatatcaaacacatttattcttaaagtgagaagctcatcaaggatagctagaggagagtgaaatatttacagtagaaaagtatggatgctagccaaacttcaaattctgtcactgcagagttattccgatagtacttttccaccatggcacatcacacatgttaaaattaactgcattcttgtaacacctctcaatggttgtgcacaataatagaagcaacattctgggactctttttcttaagatcctacagaatgaatttatgcacacacaaaaacaagtataatacaaaacattcaaaacaagtcacatccatttttttnnnnnnnnnnnnncagcaagatgaaaataggcaagggatgggttgctacttctatgtgcaaggtactggattcttgcattgagaatcctagtgtcgggcctcacgtcaagcatcacatcaaaaaagtgtgcagaaaaatggagtcacccttcaattatgaaggatgtgaagttgtgtacactgacaacggtctcaaagatacaacattattgcaggaggaatgcctgtgtacagagtggacccatcttatgaggcccaaaaacccatggagttaccagatgaccattcagatatttgggttaaacgatgacagttttctggtttaatcaaggcacttgcaaagagctatctttgacatgacatgaagtccctacgtgttgttagccattaatgatggcatggtttttctataccaagcattctataacaagaacccaagcctgacagtttgatcacaaagtcacttataac

SEQ ID NO: 72726 - DNA, 1745 bp, Homo Sapiens
aagggacccggactagaacaactgctgactaatccgcgggccgcggggaatgggtggcgcgccagccggtcggcaggggtcacgcggccgggtgtgcgcggaatggattcagggttctcgggtcgcgcccgggagctagagtcctgactcccagccggggtccccgaccggcctttcggggttgccgggcgcgctctgcaaaggggaaactgaggcccaaggaaattgagtatctctgcaaagtcaccagctgagttcgaaccagacagatcctgggaccccctactctatccgccaccggaagaatctccgtccttgtctttccattctgccctcccggcttcccagtaagcacacagccccaggaccacccttgaccgtcctcaaccaagcgatgcatgccaggggcccccatggccaactgtccccagcactgcctctggcctcctcagtcctgatgctgctgatgagcaccctgtggctggtgggggccggccccggcctggtcctggccccggagctgttgctggacccctggcaggtgcaccggctgctgacccatgccctgggccacacggccctgccaggcctgctcctgagcctgctgctcctgcccactgtgggctggcagcaggagtgccacctgggcacgctgagattcctgcatgcctcagccctgctcgccctggcttctgggctgctggcagtgctgctggcaggccttgggctgtccagtgcagccggcagctgtggatacatgcctgtccacctggccatgctggctggggagggacaccgccctagacggccccgtggggcactgccaccgtggctgtcgccgtggctgctgcttgccctgaccccactgctcagctctgagccacccttcctgcagctcctttgcggcctccttgccggcctggcctatgcagctggggccttccggtggctggaaccctcagagcgacggctgcaggtgctgcaggagggcgtcttgtgcaggaccttggcggggtgctggcccctgaggctccttgccaccccgggtagcctggcggagctgcctgtcacccatcctgccggagtgaggcctcccatccctggaccgccttatgtggcctcccctgacctctggtcccactgggaagactcagccctgcccccaccaagcctgaggcctgtgcagcccacctgggagggctcctcagaggcaggcctggactgggctggggccagcttctccccagggactccgatgtgggcggccttggatgagcagatgctgcaggagggcatccaggcctcgcttcttgacgggccagcccaggaaccccagagcgcaccatggctgtccaagtcctctgtctcctctctgcggctgcagcagctggagcgcatgggcttccctacggagcaggcggtggtggcactggcagccacaggccgtgtggagggtgccgtgtcactgttggttggaggacaagtgggcactgagaccctggtgacccatggaaagggtgggcctgcccactccgagggtcctgggcctccctagcccaggcagagagtggggcacaggcaggcccttgggtgctaagggctgggctgcatgtgggtagcccgagctcctactctgtctaaagagggccacagtggggagcaggggcacctctggaggcaggagaggccccccagcatgctgccctagtacgtgtttagaataaaaaccagtttgtttttcaaaa

SEQ ID NO: 72727 - DNA, 2395 bp, Homo Sapiens
  misc_feature (1902)..(2150): n is a, c, g, or t
tccggaattcccgggatatcgtcgacccacgcgtccggtggccaggacacgtggtacggaaccggcgccgcgcttgctgctggtaacagggccttgcctagtgggccttccttcccagaaccttcgagatctgcggtctggggtctggttgaaagatggcggccctcactaccctgtttaagtacatagatgaaaatcaggatcgctacattaagaaactcgcaaaatgggtggctatccagagtgtgtctgcgtggccggagaagagaggcgaaatcaggaggatgatggaagttgctgctgcagatgttaagcagttggggggctctgtggaactggtggatatcggaaaacaaaagctccctgatggctcggagatcccgctccctcctattctgctcggcaggctgggctccgacccacagaagaagaccgtgtgcatttacgggcacctggatgtgcagcctgcagccctggaggacggctgggacagcgagcccttcaccctggtggagcgagacggcaagctgtatgggagaggttcgactgatgataagggcccggtggccggctggataaacgccctggaagcgtatcagaaaacaggccaggagattcctgtcaacgtccgattctgcctcgaaggcatggaggagtcaggctctgagggcctagacgagctgatttttgcccggaaagacacattctttaaggatgtggactatgtctgcatttctgacaattactggctgggaaagaagaagccctgcatcacctacggcctcaggggcatttgctactttttcatcgaggtggagtgcagcaacaaagacctccattctggggtgtacgggggctcggtgcatgaggccatgactgatctcattttgctgatgggctctttggtggacaagagggggaacatcctgatccccggcattaacgaggccgtggccgccgtcacggaagaggagcacaagctgtacgacgacatcgactttgacatagaggagtttgccaaggatgtgggggcgcagatcctcctgcacagccacaagaaagacatcctcatgcaccgatggcggtacccgtctctgtccctccatggcatcgaaggcgccttctctgggtctggggccaagaccgtgattcccaggaaggtggttggcaagttctccatcaggctcgtgccgaacatgactcctgaagtcgtcggcgagcaggtcacaagctacctaactaagaagtttgctgaactacgcagccccaatgagttcaaggtgtacatgggccacggtgggaagccctgggtctccgacttcagtcaccctcattacctggctgggagaagagccatgaagacagtttttggtgttgagccagacttgaccagggaaggcggcagtattcccgtgaccttgacctttcaggaggccacgggcaagaacgtcatgctgctgcctgtggggtcagcggatgacggagcccactcccagaatgaaaagctcaacaggtataactacatagagggaaccaagatgctggccgcgtacctgtatgaggtctcccagctgaaggactaggccaagccctctgtgtgccatctccaatgagaaggaatcctgccctcacctcacccttttccaacttgcccagggaagtggaggttccctctttcctttccctcttgtcaggtcatccatgactttagagaacagacacaagtgtatccagctgtccacgggtggagctacccgttgggcttatgagtgacctggagtgacagctgagtcaccctgggtaagttctcagagtggtcaggatggcttgacctgcagaagatacccaaggtccaaaagcacaaggtctgcggaaagttctggttgtcggctgggcaccacnnnnnnnnnnnnnnnnnnnnnnnnnnnnnnnnnnnnnnnnnnnnnnnnnnnnnnnnnnnnnnnnnnnnnnnnnnnnnnnnnnnnnnnnnnnnnnnnnnnnnnnnnnnnnnnnnnnnnnnnnnnnnnnnnnnnnnnnnnnnnnnnnnnnnnnnnnnnnnnnnnnnnnnnnnnnnnnnnnnnnnnnnnnnnnnnnnnnnnnnnnnnnnnnnnnnnnnnnnnnnnnnnnnnnnnnnnnnnnnnnnnnnnnnncaaggtagcaagatcctgtcctctacaagaaaatttttttaaaaatgaagccaagtgtgggtggtggcatgccctggtaatttcccagcttacttccggggacactggaccgtaaggaagggtttggccttggaaaactggacaagtttgggaagcgctgccaaattaaaacccaataaaagtgccccccccttgggaactttccagcccctgggggcgcaacaaaaaaacccaaaaacacccca

SEQ ID NO: 72728 - DNA, 1113 bp, Homo Sapiens
  misc_feature (863)..(863): n is a, c, g, or t
  misc_feature (899)..(899): n is a, c, g, or t
  misc_feature (1049)..(1059): n is a, c, g, or t
aacggcagtaactataacggttctaaggtagcgaggcctgggtggcgaattcggcacgaggccgggacacgtggtacggaaccggcgccgcgcttgctgctggtaacagggccttgcctagtgggccttccttcccaggtcgcccctcagtctccactagagacaggactgaccagttgctcttccttccaagaaccttcgagatctgcggtctggggtctggttgaaagatggcggccctcactaccctgtttaagtacatagatgaaaatcaggatcgctacattaagaaactcgcaaaatgggtggctatccagagtgtgtctgcgtggccggagaagagaggcgaaatcaggaggatgatggaagttgctgctgcagatgttaagcagttggggggctctgtggaactggtggatatcggaaaacaaaagctccctgatggctcggagatcccgctccctcctattctgctcggcaggctgggctccgacccacagaagaagaccgtgtgcatttacgggcacctggatgtgcagcctgcagccctggaggacggctgggacagcgagcccttcaccctggtggagcgagacggcaagctgtatgggagaggttcgactgatgataagggcccggtggccggctggataaacgccctggaagcgtatcagaaaacaggccaggagattcctgtcaacgtccgattctgcctcgaaggcatggaggagtcaggctctgagggcctagacgagctgatttttgccggaaagacacattctttaaggatgtggactatgtctgcatattctgacaattactggctgggaaagagaagccctgcatcacctacggcctcaggngcatttgctactttttcatccgaggtggagtgcagncacaaagactcccattcctggggggtacggggggctcggtgcatgaaggccatgactgatctccatttgctgaagggggctcctttggtgggaacaaggaggggggaacatccctggatcccgggaatttaaacgaaggcccgtggcccnnnnnnnnnnngggaaaaagggagccccaaggcttggaaccaacgaacattccatttttttggac

SEQ ID NO: 72729 - DNA, 1825 bp, Homo Sapiens
gacggtgcagcaccaggactcccaggtgaatgccttggaggtcacaccggaccgcagcatgattgctgctgcagttcagcctgtgtccctaggttaccagcgacatccgcatgtatgatctcaactccaataaccctaaccccatcatcagctacgacggcgtcgaacaagaacatcgcgtctgtgggcttccacgaagacggccgcttggatgtacactgggcggcgaggactgcacagccaggatctgggacctcaggtcccggaacctgcagtgccagcggatcttccaggtgaacgcacccattaactgcgtgtgcctgcaccccaaccaggcagagctcatcgtgggtgaccagagcggggctatccacatctgggacttgaaaacagaccacaacgagcagctgatccctgagcccgaggtctccatcacgtccgcccacatcgatcccgacgccagctacatggcagctgtcaatagcaccggaaactgctatgtctggaatctgacggggggcattggtgacgaggtgacccagctcatccccaagactaagatccctgcccacacgcgctacgccctgcagtgtcgcttcagccccgactccacgctcctcgccacctgctcggctgatcagacgtgcaagatctggaggacgtccaacttctccctgatgacggagctgagcatcaagagcggcaaccccggggagtcctcccgcggctggatgtggggctgcgccttctcgggggactcccagtacatcgtcactgcttcctcggacaacctggcccggctctggtgtgtggagactggagagatcaagagagagtatggcggccaccagaaggctgttgtctgcctggccttcaatgacagtgtgctgggctagcctgtgacccctcgggactgcctggtgcaggtggtggcagctggagggacccatgcagcacccaggtcagagcagaccctcccctgccggcctgcgccagctggacctgatggccccctgtggcgccttgacctgctgggccaggctgccctgggactctcagcccccagttgcttatccagatgtgacagagctcgacccaagccaggctgcacactcctggactgggctagcctgcactgcctgggaaagtcggccgagggcccaaagctgctgaggggtctgaggctggtgcccacccccaagctagtgtgttctctgcccctccctgcccgcgtttcagggcctcggtccatagagaacaccaccaccatggccaggtggaagggtttattagtccctgccagcagctgtcctccctggtgcaggtggcctggccagcccactggattggggacgggccaggctgggccaggtcgggggctcagtctgggaggtaataaaagcagaccgacacgcagatgttgctcgggaagcagatgtcgatgcagagataaatcagccgctgtctccggggcccctctgctcgccgggcccagtagatgggggtcctcatgcacaggcgctgcaccaaagcccccgcctgggcggggtccacttcgaggctcccctgcactgccagcagctcctgggtgtggtgggcgtcctggctggggacccaagcctcttggaccttggaggtatccaccagcagccgcagggtctcccgatcactgtcctccatcaggcggaggaagcagacctggtgctcctcagggcggtaacagatgcagccctggggaggcaggggggtgaggcggagccccccagaccgacacctgccagggtgacccctccctgcccactcacgctctgcccgtcttccacag

SEQ ID NO: 72730 - DNA, 1204 bp, Homo Sapiens
gcataggacataaacagtgtgttacaaaaaagcaggctggtacggtccggaatcccgggatatcgtcgacccacgcgtcgccccggagccaggtatcacgcgtgtgacgcgtgtccctgaacctacctgcgcttcttgtcccaactctaaaatgggaatgataagcgccattcggcagcgccttgtgggtctataatctacttagcacagagagtgtcttctaagtacttcacatccttctctgcagatgctctgacctttgacccctgccgttcagctctagggcccgtgcaggccacaccatgaacacctccccaggcacggtgggcagtgacccggtcatcctggccactgcaggctacgaccacaccgtgcgcttctggcaggcccacagcggcatctgcacccggacggtgcagcaccaggactcccaggtgaatgccttggaggtcacaccggaccgcagcatgattgctgctgcagcctgtgtccctaggttaccagcacatccgcatgtatgatctcaactccaataaccctaaccccatcatcagctacgacggcgtcaacaagaacatcgcgtctgtgggcttccacgaagacggccgctggatgtacacgggcggcgaggactgcacagccaggatctgggacctcaggtcccggaacctgcagtgccagcggatcttccaggtgaacgcacccattaactgcgtgtgcctgcaccccaacaggcagagctcatcgtgggtgaccagagcggggctatccacatctgggacttgaaaacagaccacaacgagcagctgatccctgagcccgaggtctccatcacgtccgcccacatcgatcccgacgccagctacatggcagctgtcaatagcaccggaaactgctatgtctggaatctgacggggggcattggtgacgaggtgacccagctcatccccaagactaagatccctgcccacacgcgctacgccctgcagtgtcgcttcagccccgactccacgtgcgtgcagggcctgctggcccgggagggggcctgctgggctgggggctggccacggtgacgggttctcgatggctcgcttgctctggacacgcccatgtcgccccttaggtcctcgcactgttcgtgatccactgcaaactcgggggtccatctcccgtaagagccgctctgacggccccgggctcccgc

SEQ ID NO: 72731 - DNA, 1093 bp, Homo Sapiens
aagcaggctggtaccggtccggaattcccgggatatcgtcgaccacgcgtccgggcgcccgcgcgtgactcccccctgccggctgcggaggtggaggggggacggcgcccccgccgtgtgcgtggggcggggatggagcacgcgccctggagccccggagccagatgctctgacctttgacccctgccgttcagctctagggcccgtgcaggccacaccatgaacacctccccaggcacggtgggcagtgacccggtcatcctggccactgcaggctacgaccacaccgtgcgcttctggcaggcccacagcggcatctgcacccggacggtgcagcaccaggactcccaggtgaatgccttggaggtcacaccggaccgcagcatgattgctgctgcaggttaccagcacatccgcatgtatgatctcaactccaataaccctaaccccatcatcagctacgacggcgtcaacaagaacatcgcgtctgtgggcttccacgaagacggccgctggatgtacacgggcggcgaggactgcacagccaggatctgggacctcaggtcccggaacctgcagtgccagcggatcttccaggtgaacgcacccattaactgcgtgtgcctgcaccccaaccaggcagagctcatcgtgggtgaccagagcggggctatccacatctgggacttgaaaacagaccacaacgagcagctgatccctgagcccgaggtctccatcacgtccgcccacatcgatcccgacgccagctacatggcagctgtcaatagcaccggaaactgctatgtctggaatctgacgggggggcattgggtgacgaggtgacccagctcatccccaagactaagatccctgacccacacgcgctacgcccctgcagtgtcgcttcaggccccgaactccacgctcctcgccacctagctcggactgatcagaacgtgcaagatctggaggacgtccaaattcttcctgatgacggaagctgagcatcaagagcggcaaccccggggagttctccgcggcggatgtgggtgcgcttctcgggggactcccagacatcgtcacactgttcatg

SEQ ID NO: 72732 - DNA, 969 bp, Homo Sapiens
ggtaccggtccggaattcccgggatcctcgccgtcctggacacggcggagtgcggagccgcccgtaagatgctctgacctttgaccctgccgttcagctctagggcccgtgcaggccacaccatgaacacctccccaggcacggtgggcagtgacccggtcatcctggccactgcaggctacgaccacaccgtgcgcttctggcaggcccacagcggcatctgcacccggacggtgcagcaccaggactcccaggtgaatgccttggaggtcacaccggaccgcagcatgattgctgctgcaggttaccagcacatccgcatgtatgatctcaactccaataaccctaaccccatcatcagctacgacggcgtcaacaagaacatcgcgtctgtgggcttccacgaagacggccgctggatgtacacgggcggcgaggactgcacagccaggatctgggacctcaggtcccggaacctgcagtgccagcggatcttccaggtgaacgcacccattaactgcgtgtgcctgcacccgaaccaggcagagctcatcgtgggtgaccagagcggggctatccacatctgggacttgaaaacagaccacaacgagcagctgatccctgagcccgaggtctccatcacgtccgcccacatcgatcccgacgccagctacatggcagctgtcaatagcaccggaaactgctatgtctggaatctgacggggggcattggtgacgaggtgacccagctcatccccaagactaagatccctgccacacgcgctacgccctgcagtgtcgcttcagccccgactccacgctcctcgccacctgctcggctgatcagacgtgcaagatctggaggacgtccaacttctccctgatgacggagcttgagcatcagagcggcaacccggggaggtctcgcgcgggtggatgtggggctggcccttctcgggggactcccag

SEQ ID NO: 72733 - DNA, 2171 bp, Homo Sapiens
  misc_feature (28)..(28): n is a, c, g, or t
  misc_feature (46)..(46): n is a, c, g, or t
  misc_feature (49)..(50): n is a, c, g, or t
  misc_feature (55)..(429): n is a, c, g, or t
  misc_feature (1102)..(1110): n is a, c, g, or t
cacgcgccttttacgatcttgcctttgntgcctttgctcacatgtntcnntgcgnnnnnnnnnnnnnnnnnnnnnnnnnnnnnnnnnnnnnnnnnnnnnnnnnnnnnnnnnnnnnnnnnnnnnnnnnnnnnnnnnnnnnnnnnnnnnnnnnnnnnnnnnnnnnnnnnnnnnnnnnnnnnnnnnnnnnnnnnnnnnnnnnnnnnnnnnnnnnnnnnnnnnnnnnnnnnnnnnnnnnnnnnnnnnnnnnnnnnnnnnnnnnnnnnnnnnnnnnnnnnnnnnnnnnnnnnnnnnnnnnnnnnnnnnnnnnnnnnnnnnnnnnnnnnnnnnnnnnnnnnnnnnnnnnnnnnnnnnnnnnnnnnnnnnnnnnnnnnnnnnnnnnnnnnnnnnnnnnnnnnnnnnnnnnnnnnnnnnnnnnnnnnnnnnnnnnnngattcgggcaagaggcatccctccgggcctggtgaacggcctggccctgcagctcaggaacaccagccggtcggaggaggaccggaacagggacctggccactgccctggagcagctgctgcaggcctaccctagagacatggagaaggagaagaccatgctggtgctggccctgctgctggccaagaaggtggccagtcacacgccgtccttgctccgtgatgtctttcacacaacagtgaattttattaaccagaacctacgcacctacgtgaggagcttagccagaaatgggatggactgaacggacagttccagaagtgtgactggctaaagctcgatgtggtcacagctgtatagctgcttccagtgtagacggagccctggcatgtcaacagcgttcctagagaagacaggctggaagatagctgtgacttctattttaaagacaatgataaacttataacccactttaaaatatctacattaatatacttgaatgaaaatgtccatttacacgtatttgaatggccttcatatcatccacacatgaatctgcacatctgtaaatctacacacggtgcctttatttccactgtgcaggttcccacttaaaaattaaattggaaagcaggtttcaaggaagtagaaacaaaatacaattttttgggtnnnnnnnnnttactgtttattaaagtacaaccatagaggatggtcttacagcaggcagtatcctgtttgaggaaagcaagaatcagagaaggaacataccccttacaaatgaaaaattccactcaaaatagggactatctatcttaatactaaggaaccaacaatcttcctgtttaaaaaaccacatggcacagagattctgaactaaagtgctgcactcaaatgatgggaagtccggccccagtacacaggggcttgactttttcaacttcgtttcctttgttggagtcaaaaagaaccacttgtggttctaaaaggtgtgaaggtgatttaagggcccaggtcagccactgtttgtttacaaaatcaggtaactaactgcatacactttttctctttccatgacatcaagactttgctaaagacatgaagccacgggtgccagaagctactgcgatgccccgggagttagccccctggtaatagctgtaaacttccaatttctagccatacgctcagctcatccatgcctcagaagtgcatctggagagaacaggtttctaagcataaaagatgaaagagcagttggactttttaaaaattcagcaaagtggttccctctcttagggacagtcaaaaccaagtcacttaggtagtaccaaaataaataaggaaaagcttagctttagaaacagtgcaacactggtctgctgttccagtggtaagctatgtcccaggaatcagtttaaaagcacgacagtggatgctgggtccatatcacacacattgctgtgaacaggaaactcctgtgaccacaacatgaggccactggagacgcatatgagtaagggcactgacggactcatgatttcttcttaccagatgctttcctgttctttaagagtttaaaatcatcagaaaggaaaaacaaactctatattgttcagcatgcaatacataccacgctagggctggctcaattgaaagtgggcaaaagcttacaaatactaaaaagaagtgctgccgcgcagtgtggaggccactgtttggaaataaatcttcctaacact

SEQ ID NO: 72734 - DNA, 1159 bp, Homo Sapiens
taggtagaggcgggtggtgaatcggcacgagggggtagtcgaccgtgtccgcgcgcctgggagacgctgcctcggcccggacgcgcccgcgcccccgcggctggagggtggtcgccactgggacactgtgaaccaggagtgagtcggagctgccgcgctgcccaggccatggactgtgaggtcaacaacggttccagcctcagggatgagtgcatcacaaacctactggtgtttggcttcctccaaagctgttctgacaacagcttccgcagagagctggacgcactgggccacgagctgccagtgctggctccccagtgggagggctacgatgagctgcagactgatggcaaccgcagcagccactcccgcttgggaagaatagaggcagattctgaaagtcaagaagacatcatccggaatattgccaggcacctcgcccaggtcggggacagcatggaccgtagcatccctccgggcctggtgaacggcctggccctgcagctcaggaacaccagccggtcggaggaggaccggaacagggacctggccactgccctggagcagctgctgcaggcctaccctagagacatggagaaggagaagaccatgctggtgctggccctgctgctggccaagaaggtggccagtcacacgccgtccttgctccgtgatgtctttcacacaacagtgaattttattaaccagaacctacgcacctacgtgaggagcttagccagaaatgggatggactgaacggacagttccagaagtgtgactggctaaagctcgatgtggtcacagctgtatagctgcttccagtgtagacggagccctggcatgtcaacagcgttcctagagaagacaggctggaagatagctgtgacttctattttaaagacaatgttaaacttataacccactttaaaatatctacattaatatacttggaatggaaaaatggccattttaccactaatttgaattgggccttccatatctatcccccacatgaaatcttgcaccatcttggtaaaatctaacacacccgggggcgcttttaatttccccctggtggcaagggttccccccccttaagaaaattaaatttggggaaaagacaggggtttccacggggaagtgcgaaaaacccataata

SEQ ID NO: 72735 - DNA, 982 bp, Homo Sapiens
  misc_feature (905)..(905): n is a, c, g, or t
cagtcgacggtaccggacatatgcccgggaattcggccattacggccggggagtcccactccttcgacctctgctgcagcccgtgccgccgccgcctcctgggaagagaggaagcgggagaggagcccacgtcgcctgtcacccaatatctccagccgcgcagtcccgaagagtgtaagatgttcgcctgcgccaagctcgcctgcaccccctctctgatccgagctggatccagagttgcatacagaccaatttctgcatcagtgttatctcgaccagaggctagtaggactggagagggctctacggtatttaatggggcccagaatggtgtgtctcagctaatccaaagggagtttcagaccagtgcaatcagcagagacattgatactgcatgccaaatttatcggtgcaggtgctgcaacagtaggagtggatggttctggtgctggtattggaacagtctttggcaaccttatcattggttatgccagaaacccttcgctgaagcagcagctgttctcatatgctatcctgggatttgccttgtctgaagctatgggtctcttttgtttgatggttgctttcttgattttgtttgccatgtaaccaaatactgcttgacatgttggcattcatattaattacggatgtaattctgtgtatcttactgggactccgaaaactgtaatattggtgggcatgggaagggacgttattttcccaaggccattcctttaaagatggaaacctccggcgcgtttatacggtatgcatgcggagatataccattggtgagcccggcctccggccctctgaagaaagcttttttaaaaaacctattcgcttgtggcgccgcgggggtctccgcgaaggggaaaggtggaaccgtgatggcctacacnctgccgcaccctcagggagaagacactctgcgacgccacagacactacacgggcttttgagtcatgtctcatccaaa

SEQ ID NO: 72736 - DNA, 1111 bp, Homo Sapiens
  misc_feature (771)..(771): n is a, c, g, or t
  misc_feature (773)..(773): n is a, c, g, or t
  misc_feature (777)..(777): n is a, c, g, or t
  misc_feature (785)..(809): n is a, c, g, or t
  misc_feature (811)..(812): n is a, c, g, or t
  misc_feature (815)..(815): n is a, c, g, or t
  misc_feature (817)..(817): n is a, c, g, or t
  misc_feature (823)..(825): n is a, c, g, or t
  misc_feature (827)..(829): n is a, c, g, or t
  misc_feature (831)..(841): n is a, c, g, or t
  misc_feature (846)..(846): n is a, c, g, or t
  misc_feature (851)..(852): n is a, c, g, or t
  misc_feature (871)..(872): n is a, c, g, or t
tccaacccacccacacacccccaacaaccaaaataacggctaaggtagcgaggcctgggtggcaaattcggcacgaggctctgctgcagcccgtgccgccgccgcctcctgggaagagaggaagcgggagaggagcccacgtcgcctgtcacccaatatctccagccgcgcagtcccgaagagtgtaagatgttcgcctgcgccaagctcgcctgcaccccctctctgatccgagctggatccagagttgcatacagaccaatttctgcatcagtgttatctcgaccagaggctagtaggactggagagggctctacggtatttaatggggcccagaatggtgtgtctcagctaatccaaagggagtttcagaccagtgcaatcagcagagacattgatactgctgccaaatttattggtgcaggtgctgcaacagtaggagtggctggttctggtgctggtattggaacagtctttggcagccttatcattggttatgccagaaacccttcgctgaagcagcagctgttctcatatgctatcctgggatttgccttgtctgaagctatgggtctcttttgtttgatggttgctttcttgattttgtttgccatgtaacaaattactgcttgacatgttggcattcatattaattacggatgtaattctgtgtatcttactgtgactccgaaaactgtagtattggtgtcatgggaatgtacgttatttccaaagtcatttcattaaagatgaaaactttaaaaaaacacncnccgnacgaaaannnnnnnnnnnnnnnnnnnnnnnnnannaananaaaaannnannnannnnnnnnnnnttggnaaaanncctcccaccccacaaaaanntttcctaaaccattcctttttggccccccggccccccaaaaaggaaaaggggaccatggggcaaaagcctggtttccccaaagaagaacccggggtacaggaccaagggggcctgggattcctcccccgaataaaaaaaccgcccccgggggggaacaacccggagcgggtttcgtggacaaacacacccccaggaagggaagggttccgcggagaggtcctttttactggcggcaact

SEQ ID NO: 72737 - DNA, 1153 bp, Homo Sapiens
ggctaggtacaggctgggtgtgaattcggcacgaggagtgaatcaggcaccggagtgcaggttcgggggtggaatccttgggccgctgggcaagcggcgagacctggccagggccagcgagccgaggacagagggcgcgcggagggccgggccgcagccccggccgcttgcagaccccgccatggacccgttcctggtgctgctgcactcggtgtcgtccagcctgtcgagcagcgagctgaccgagctcaagttcctatgcctcgggcgcgtgggcaagcgcaagctggagcgcgtgcagagcggcctagacctcttctccatgctgctggagcagaacgacctggagcccgggcacaccgagctcctgcgcgagctgctcgcctccctgcggcgccacgacctgctgcggcgcgtcgacgacttcgaggcgggggcggcggccggggccgcgcctggggaagaagacctgtgtgcagcatttaacgtcatatgtgataatgtggggaaagattggagaaggctggctcgtcagctcaaagtctcagacaccaagatcgacagcatcgaggacagatacccccgcaacctgacagagcgtgtgcgggagtcactgagaatctggaagaacacagagaaggagaacgcaacagtggcccacctggtgggggctctcaggtcctgccagatgaacctggtggctgacctggtacaagaggttcagcaggcccgtgacctccagaacaggagtgggggccatgtccccgatgtcattggaactccggacgcatctacttccgaagcgtctgatgggcgcgttggtttgcgctgttggaccacaggcctcttaccaagcctggactttggctctctccagggaaggtagcccagcattgtgaagacccagaggaagccaggtggttggagcccaaaacaccctgggttttaagcaaaccggggtattaaagggcgtcccggccaagggcggggttgggcccgaccgaaatatcactgttcttcccccatataactgaggcaagatttgtccccaaaaagctcgggcgagaatgtgagagggacatgcgcaccacaaaacaatatcattatgaacacacatagtcacgcacaggagagaacatgtccgatcagtgaa

SEQ ID NO: 72738 - DNA, 2236 bp, Homo Sapiens
  misc_feature (1601)..(1645): n is a, c, g, or t
  misc_feature (1888)..(1900): n is a, c, g, or t
  misc_feature (1984)..(2046): n is a, c, g, or t
  misc_feature (2125)..(2125): n is a, c, g, or t
  misc_feature (2221)..(2221): n is a, c, g, or t
tatagtaatatagaccaggggtacagaaagcaggtggtacggtccggatttcccgggatatcgtcgaccacgcgtcggcgcaagctggagcgcgtgcagagcggcctagacctcttctccatgctgctggagcagaacgacctggagcccgggcacaccgagctcctgcgcgagctgctcgcctccctgcggcgccacgacctgctgcggcgcgtcgacgacttcgaggcgggggcggcggccggggccgcgcctggggaagaagacctgtgtgcagcatttaacgtcatatgtgataatgtggggaaagattggagaaggctggctcgtcagctcaaagtctcagacaccaagatcgacagcatcgaggacagatacccccgcaacctgacagagcgtgtgcggcagtcactgagaatctggaagaacacagagaaggagaacgcaacagtggcccacctggtgggggctctcaggtcctgccagatgaacctggtggctgacctggtacaagaggttcagcaggcccgtgacctccagaacaggagtggggccatgtccccgatgtcatggaactcagacgcatctacctccgaagcgtcctgatgggccgctgctttgcgctggtggaccacaggcatctacacagactggactttgggtctctccaggaaggtagccagcactgtgaagacccagcaggaagccaggctgagtgagccacagaccacctgcttctgaactcaagctgcgtttattaatgcctctcccgcaccaggccgggcttgggccctgcacagatatttccatttcttcctcactatgacactgagcaagatcttgtctccactaaatgagctcctgcgggagtagttggaaagttggaaccgtgtccagcacagaaggaatctgtgcagatgagcagtcacactgttactccacagcggaggagaccagctcagaggcccaggaatcggagcgaagcagagaggtggagaactgggatttgaacccccgccatccttcaccagagcccatgctcaaccactgtggcgttctgctgcccctgcagttggcagaaaggatgttttgtcccatttccttggaggccaccgggacagacctggacactagggtcaggcggggtgctgttgtggtggggagaggcatggctggggtgggggtggggagacctggttggccgtggtccagctcttggcccctgtgtgagttgagtctcctctctgagactgctaagtaggggcagtgatggttgccaggacgaattgagataatatctgtgaggtgctgatgagtgattgacacacagcactctctaaatcttccttgtgaggattatgggtcctgcaattctacagtttcttactgttttgtatcaaaatcactatctttctgataacagaattgccaaggcagcgggatctcgtatctttaaaaagcagtcctcttattcctaaggtaatcctattaaaacacagctttacaacttccatattacaaaaaattttctataaaaaagacaacacacaacgccaaaacactaacccactacaaacatcacaataatacaaaacaaaccnnnnnnnnnnnnnnnnnnnnnnnnnnnnnnnnnnnnnnnnnnnnntttgggacccctccgcccccgcaaaaaattttccacaaacccttttcttggcggcgcgccgcccaaaacaggaaaggcgaaactgggccccaaccttttctctccaagaaaaaaccccggcacctacaaatcagcggcctcgggtttcccacacaacaaaaacaaccccccggtccggccacccgagggttatcctaaacaacccccaaaaaggggatcctccggcgcgccccttactgggannnnnnnnnnnnngggaagtcccacagacgcgttccgaatattaaaaattaaacctgccgcccgccggcagaatatttttattagaaccgggcgttnnnnnnnnnnnnnnnnnnnnnnnnnnnnnnnnnnnnnnnnnnnnnnnnnnnnnnnnnnnnnnngctatcgtgtgaaacacgccgcgctatatcgcccacgcgcctaaaatttacaccacccttttgctctccgcttacgcgncggtaatatatatatttcccgcccctggtgaataacaaccgccgaccacttagaaaaacccttcttcctccatacgccgccgcgccaccccttcanacattatctaacggt

SEQ ID NO: 72739 - DNA, 910 bp, Homo Sapiens
ttcacgagggcgagacctggccagggccagcgagccgaggacagagggcgcgcggagggccgggccgcagccccggccgcttgcagaccccgccatggacccgttcctggtgctgctgcactcggtgtcgtccagcctgtcgagcagcgagctgaccgagctcaagttcctatgcctcgggcgcgtgggcaagcgcaagctggagcgcgtgcagagcggcctagacctcttctccatgctgctggagcagaacgacctggagcccgggcacaccgagctcctgcgcgagctgctcgcctccctgcggcgccacgacctgctgcggcgcgtcgacgacttcgaggcgggggcggcggccggggccgcgcctggggaagaagacctgtgtgcagcatttaacgtcatatgtgataatgtggggaaagattggagaaggctggctcgtcagctcaaagtctcagacaccaagatcgacagcatcgaggacagatacccccgcaacctgacagagcgtgtgcgggagtcactgagaatctggaagaacacagagaaggagaacgcaacagtggcccacctggtggggggctctcaggtcctgccagatgaacctggtgggtgacctggtacaagaggttcagcaggcccgtgacctccagaacaggagtgggggccatgtcccccgatggcatggaactcagacgcatcttacctcccaagcgtcctgatgggccgctgcttttcgctggtggaccacaggcatctacacagcctggaactttgggtctccccaggaaaggaaggccaatcactgtggaaaaccccgcaggaaagcccaggctgcatggagccaccgaacccacctgccttctgaaattcaacttgcgttttattaaattgcctctccccccca

SEQ ID NO: 72740 - DNA, 1069 bp, Homo Sapiens
tgagttcagttccgatggtgcccgtggtcaaaagcgaaaaacatggacaattcctattcattcttagcactttgacatgtcttggggaaaagcttacattttaatgaaaaagaaagatcaattatatccatgcttaacaggatcagcaggagctttataaatgactttacagagactaataagggatttgatctttctttttttgttatcgaggcttttgaaatgtggaacttgtgtgttctgctttatatgttatattcaatatcttttcagatgcagtctatattttatgctgagttttaaaaatgaaatactttatgcaaacaggcaaaattggtaccaaagggaaacattaaccatgaggaagagcatttttctaaggagaacaggtgacaatatacacatgtgcgctaatcgtaaaatgagcatcttagtctttaaaacacatcagaattgaatacgaataatctatttgtcgatgaaataaacacaactctttgaggatttgagactacattcaccctttattcacagtcacttgcagttttgcttttctctgcatttctctgctgtaagatgactgttgcattgttgaattgtattttgagtggatatttttgtttggtaacaatattttaaatggtaaaacgtgtgcctttgtcctttctcttccttctaaacatgtatctctcccacaggtcattctcctgtcaccgtgtgtactgcagactgtttcaaaaccgggcaggcaattagcaatgggaaataagtggtccaccttcaatatttgcttgttgttcatttacatgctcttggcaccaatcctagactcacgtgtgccccagaataacattcagactctcagttggtcttgtgttacacatccatggaccggttcactccatcatatacagctctctgctctgtgtcccctgggctcaagtcaagcagtcggtgacagatttcattcccaataacagaatcggttcgcatgactccccatgcatgttgcagctttgaaaacattcatctcagtgtcaggaataaagacagtaaaaatgcatgtcaa

SEQ ID NO: 72741 - DNA, 1070 bp, Homo Sapiens
  misc_feature (925)..(959): n is a, c, g, or t
  misc_feature (963)..(1014): n is a, c, g, or t
ccgctcggtacagatggcggaagtgagaaggttgccccatccagagccagggcccatgaaccacttgaaggtgactcaggtgagctgtcaatgagggaatcccgcatgctggtggcaatggtgctagctgggcttcattcagctttgaaagacactctccaccacgtgacagctctgtgctggtttgttgtccaggccacagaaggcacaccagtcatttcaccaccatccccagccagcaatcacctcactgcctcggttcaacagtccccgccacaaggggggacttgaagaagagaggacagctcatcctggtctcaaattgaagtcttgggatgcaccagccctccctgattgctgaagacacagtagcttcctactagcacctggtcggccactgtctgtctgaagacttccaccttgagcacatctgccagaatttcttctgtctccctgtccaagtctgggtggaccaaggccacgtagtcattgcaggtggtgacattgcccaaggctgagagccgctcctccacccgcctaatctgcactgtgtctgggaggctgttgcgaatgtgttgcagctcctggtcggtggtattgttgggtaccaggagaccgtgcctgttccccacacacatgcgcccgatgatgcggcagccggcgatagacgcgtgcaccacggggatggtatcggagagctcgccctcgaacacactgtagaagttctctgagcctccgatcgctaccagacagtaggtgttggtgagcttggcaaagcagccgatctcacagttgttctcgaacgaagctcggaccgccatgaggccaagtaaccagtaacaagctccgcacgcggcgactgtaccttggactccccggccgtaatggccgaattcccgggcatatgtccggtaccgtcgactgnnnnnnnnnnnnnnnnnnnnnnnnnnnnnnnnnnncggnnnnnnnnnnnnnnnnnnnnnnnnnnnnnnnnnnnnnnnnnnnnnnnnnnnntagcgcccttaggggggggtgtgtggggaggaggagagggaatcgagaggaaagta

SEQ ID NO: 72742 - DNA, 957 bp, Homo Sapiens
gctggtaccggtccggaattcccgggatatcgtcgacccacgcgtccgcccacgcgtccgctggttacttggcctcatggcggtccgagcttcgttcgagaacaactgtgagatcggctgctttgccaagctcaccaacacctactgtctggtagcgatcggaggctcagagaacttctacagtgtgttcgagggcgagctctccgataccatccccgtggtgcacgcgtctatcgccggctgccgcatcatcgggcgcatgtgtgtggggaacaggcacggtctcctggtacccaacaataccaccgaccaggagctgcaacacattcgcaacagcctcccagacacagtgcagattaggcgggtggaggagcggctctcagccttgggcaatgtcaccacctgcaatgactacgtggccttggtccacccagacttggacagggagacagaagaaattctggcagatgtgctcaaggtggaagtcttcagacagacagtggccgaccaggtgctagtaggaagctactgtgtcttcagcaatcagggagggctggtgcatcccaagacttcaattgaagaccaggatgagctgtcctctcttcttcaagtcccccttgtggcggggactgtgaaccgaggcagtgaggtgattgctgctgggatggtggtgaatgactggtgtgccttctgtggcctggacacaaccagcacagagctgtcagtggtggagagtgtcttcaagctgaatgaagcccagcctagcaccattgccaacagcatgcgggattcccctcatttgacagccctcaccctggagtcacctttcccaagttggttcccatgggcctcctgggctcctgggactgtgggcccaaccctttctcccacattttccggccccaattcttggtaacccgggaggcctttggccaagggaaaggttgtgctcaaaaa

SEQ ID NO: 72743 - DNA, 894 bp, Homo Sapiens
  misc_feature (52)..(52): n is a, c, g, or t
  misc_feature (68)..(68): n is a, c, g, or t
  misc_feature (113)..(113): n is a, c, g, or t
ccacctccaaatggggcggccccagggccaggccgagacctctcagcccagncagcccaccggggccntgcccgcccagcccccccagagccaagggttttgccgtacaccanacatcccaggcggataagccccaggtgaaaaaagggtggggtgccccagcccctcagtccccaggaagctcttttgccacctccctgccagcatccggtacagattgggcggaatggggagaaggttggccacagtccagagccaggagcccagggaacaacttggaaggtgactcaggtgaggctgtcaatgagcgaatcccgcatgctggtggcaatggtgctaggctgggcttcattcagcttgaagacactctccaccactgacagctctgtgctggttgtgtccaggccacagaaggcacaccagtcattcaccaccatcccagcagcaatcacctcactgcctcggttcacagtccccgccacaagggggacttgaagaagagaggacagctcatcctggtcttcaattgaagtcttgggatgcaccagccctccctgattgctgaagacacagtagcttcctactagcacctggtcggccactgtctgtctgaagacttccaccttgagcacatctgccagaatttcttctgtctcccacacacatgcgcccgatgatgcggcagccggcgatagacgcgtgcaccacggggatggtatcggagagctcgccctcgaacacactgtagaagttctctgagcctccgatcgctaccagacagtaggtgttggtgagcttggcaaagcagccgatctcacagttgttctcgaacgaagctcggaccgccatgaggccaagtaaccagtaacaagctccgcacgcggcgactgtacc

SEQ ID NO: 72744 - DNA, 1277 bp, Homo Sapiens
ggctagtacgaggctgggtttgaattcggcacgaggccaagtacagtcgccgcgtgcggagcttgttactggttacttggcctcatggcggtccgagcttcgttcgagaacaactgtgagatcggctgctttgccaagctcaccaacacctactgtctggtagcgatcggaggctcagagaacttctacagtgtgttcgagggcgagctctccgataccatccccgtggtgcacgcgtctatcgccggctgccgcatcatcgggcgcatgtgtgtggggaacaggcacggtctcctggtacccaacaataccaccgaccaggagctgcaacacattcgcaacagcctcccagacacagtgcagattaggcgggtggaggagcggctctcagccttgggcaatgtcaccacctgcaatgactacgtggccttggtccacccagacttggacagggagacagaagaaattctggcagatgtgctcaaggtggaagtcttcagacagacagtggccgaccaggtgctagtaggaagctactgtgtcttcagcaatcagggagggctggtgcatcccaagacttcaattgaagaccaggatgagctgtcctctcttcttcaagtcccccttgtggcggggactgtgaaccgaggcagtgaggtgattgctgctgggatggtggtgaatgactggtgtgccttctgtggcctggacacaaccagcacagagctgtcagtggtggagagtgtcttcaagctgaatgaagcccagcctagcaccattgccaccagcatgcgggattccctcattgacagcctcacctgagtcaccttccaagttgttccatgggctcctggctctggactgtggccaaccttctccacattccgcccaatctgtaccggatgctggcagggaggtggcagagagctcactgggactgaggggctgggcacccaacccttttccacctgtgcttatcgcctggatctatcattactgcaaaaacctgctctgttgtgctggctggcaggccctgtggctgctggctgagggttctgctgtcctgtgccaccccattaaagtgcagttccctccgggccaaaaaaaaaattcaaacacctagtgcacaaatgaaagttatcggacatagcacccgaagtgaaacccccgaaccgccccccctctttcccaattttggtgctacatcccacatatccggcctattttcttttgttggggccgccctgggcccttagaaaaagattttttaaaaactt

SEQ ID NO: 72745 - DNA, 858 bp, Homo Sapiens
  misc_feature (760)..(760): n is a, c, g, or t
aagctaggtacgaggctgggtgtcgaattcggcacgagggctcatggcggtccgaagcttcgttcgagaacaactgtgagatcggctgctttgccaagctcaccaacacctactgtctggtagcgatcggaggctcagagaacttctacagtgtgttcgagggcgagctctccgataccatccccgtggtgcacgcgtctatcgccggctgccgcatcatcgggcgcatgtgtgtgggagacagaagaaattctggcagatgtgctcaaggtggaagtcttcagacagacagtggccgaccaggtgctagtaggaagctactgtgtcttcagcaatcagggagggctggtgcatcccaagacttcaattgaagaccaggatgagctgtcctctcttcttcaagtcccccttgtggcggggactgtgaaccgaggcagtgaggtgattgctgctgggatggtggtgaatgactggtgtgccttctgtggcctggacacaaccagcacagagctgtcagtggtggagagtgtcttcaagctgaatgaagcccagcctagcaccattgccaccagcatgcgggattccctcattgacagcctcacctgagtcaccttccaagttgttccatgggctcctggctctggactgtggcaaccttctccacattccgcccaatctgtaccggatgctggcagggaggtggaagagagctcactgggactgaggggctggcaccaaacctttccacctgtgcttatcngctggatctatcattatggaaaaactgtctgttgtgctgctggcaggcctggggtgtggtgaggtctgtgtctgtgcaccattaagtgagtcctcggg

SEQ ID NO: 72746 - DNA, 1052 bp, Homo Sapiens
accataggcagtacgaggctgggtgttaattcggcacgaggaaacggaaacctttttagggagtccaaggtacagtcgccgcgtgcggagcttgttactggttacttggcctcatggcggtccgagcttcgttcgagaacaactgtgagatcggctgctttgccaagctcaccaacacctactgtctggtagcgatcggaggctcagagaacttctacagtgtgttcgagggcgagctctccgataccatccccgtggtgcacgcgtctatcgccggctgccgcatcatcgggcgcatgtgtgtggggaacaggcacggtctcctggtacccaacaataccaccgaccaggagctgcaacacattcgcaacagcctcccagacacagtgcagattaggcgggtggaggagcggctctcagccttgggcaatgtcaccacctgcaatgactacgtggccttggtccacccagacttggacagggagacagaagaaattctggcagatgtgctcaaggtggaagtcttcagacagacagtggccgaccaggtgctagtaggaagctactgtgtcttcagcaatcagggagggctggtgcatcccaagacttcaattgaagaccaggatgagctgtcctctcttcttcaagtcccccttgtggcggggactgtgaaccgaggcagtgaggtgatttgctgctgggatggtggtgaatgactggtgtgccttctgtggcctggacacaaccagcacagagctgtcagtggtggagagtgtcttcaagctgaatgaagcccagctagcaccattgccacagcatgcgggattcctcattgaaagcctcactgagtcagcttccaagttgttcatgggctcctggctctggactgtgggcaacttctccaattccgccatctgtaccgattctgtcaggagtggcgaaacactcacgggatggggtggacccaccttcaccggtatcgcggtatcatacgcaaccgctctttgtgaagccttctgtcttaggttgggcgcccataaggcccccggaag

SEQ ID NO: 72747 - DNA, 973 bp, Homo Sapiens
acgccaagcggttcaataagcccggaaccacggtggaaaggggggccccaccccagtcccaggggctctgccaccgcccgccagcaccggtacagattgggcgggatgtggagaagttgcccacagtccagaaccagagcccatgaacaactggaagtgactcaggtgaggctgtcaatgagggaatcccgcatgctggtggcaatggtgctagctgggcttcattcagcttgaagacaatctccaccactgacagctctgtgctggttgtgtccaggccacagaaggcacaccagtcattcaccaccatcccagcagcaatcacctcactgcctcggttcacagtccccgccacaagggggacttgaagaagagaggacagctcatcctggtcttcaattgaagtcttgggatgcaccagccctccctgattgctgaagacacagtagcttcctactagcacctggtcggccactgtctgtctgaagacttccaccttgagcacatctgccagaatttcttctgtctccctgtccaagtctgggtggaccaaggccacgtagtcattgcaggtggtgacattgcccaaggctgagagccgctcctccacccgcctaatctgcactgtgtctgggaggctgttgcgaatgtgttgcagctcctggtcggtggtattgttgggtaccaggagaccgtgcctgttccccacacacatgcgcccgatgatgcggcagccggcgatagacgcgtgcaccacggggatggtatcggagagctcgccctcgaacacactgtagaagttctctgagcctccgatcgctaccagacagtaggtgttggtgagcttggcaaagcagccgatctcacagttgttctcgaacgaagctcggaccgccatgaggcctaggggcggcggaggcgggagttcaaggccggcggatcctttcccaagtatcccggcctccgtcccccc

SEQ ID NO: 72748 - DNA, 969 bp, Homo Sapiens
aaagggtttgggtgccccagccccttcaagttccaagtgagctctttgccacctccctgccaagcatccggtaacagattgggccgaaatgtggagaagggttggccccagtccagaggcaaggagcccatggaacaacttggaagggtgactcaggtgaggctgtcaatgaggggaaccccgcatgctggtggcaatggtgctaggctgggcttcattcagctggaagacactctccacccactgacagctctgtgctggttgtgtccaggccacagaaggcacaccagtcattcaccaccatcccagcagcaatcacctcactgcctcggttcacagtccccgccacaagggggacttgaagaagagaggacagctcatcctggtcttcaattgaagtcttgggatgcaccagccctccctgattgctgaagacacagtagcttcctactagcacctggtcggccactgtctgtctgaagacttccaccttgagcacatctgccagaatttcttctgtctccctgtccaagtctgggtggaccaaggccacgtagtcattgcaggtggtgacattgcccaaggctgagagccgctcctccacccgcctaatctgcactgtgtctgggaggctgttgcgaatgtgttgcagctcctggtcggtggtattgttgggtaccaggagaccgtgcctgttccccacacacatgcgcccgatgatgcggcagccggcgatagacgcgtgcaccacggggatggtatcggagagctcgccctcgaacacactgtagaagttctctgagcctccgatcgctaccagacagtaggtgttggtgagcttggcaaagcagccgatctcacagttgttctcgaacgaagctcggaccgccatgaggccaagtaaccagtaacaagctccgcacgcggcgactgtaccttggactccctaaaaaggtttccgtttccccc

SEQ ID NO: 72749 - DNA, 867 bp, Homo Sapiens
gggagggccccaagtgaaaccaacctttgggaagggtggaattcagggggagggcctgtccaatgaagggaaatccccgcatgcttgggtggccaatgggggctagggctggggcttcattcagcttgaaggacatttctccacccactgacagctctgtgctggttgggtcccaggccacagaagggcacaccagtcattcaccaccatcccagcagcaatcacctcactgcctcggttcacagtccccgccacaagggggacttgaagaagagaggacagctcatcctggtcttcaattgaagtcttgggatgcaccagccctccctgattgctgaagacacagtagcttcctactagcacctggtcggccactgtctgtctgaagacttccaccttgagcacatctgccagaatttcttctgtctccctgtccaagtctgggtggaccaaggccacgtagtcattgcaggtggtgacattgcccaaggctgagagccgctcctccacccgcctaatctgcactgtgtctgggaggctgttgcgaatgtgttgcagctcctggtcggtggtattgttgggtaccaggagaccgtgcctgttccccacacacatgcgcccgatgatgcggcagccggcgatagacgcgtgcaccacggggatggtatcggagagctcgccctcgaacacactgtagaagttctctgagcctccgatcgctaccagacagtaggtgttggtgagcttggcaaagcagccgatctcacagttgttctcgaacgaagctcggaccgccatgaggccaagtaaccagtaacaagctccgcacgcggcgactgtaccttggactccctaaaaaggtttccc

SEQ ID NO: 72750 - DNA, 932 bp, Homo Sapiens
taccaagattgggggcgggaaaagtgggaagaaaggtttggccccccattccaagaagccagggagccccatggaaccaacttggaaagggtgactccagggggagggctgtcaatgagggaatccccgcatgctggtggcaatggtgttaggctgggcttccattcagcttgaaagacactctccaccactgacagctctgtgctggttgtgtccaggccacagaagggcacaccagtcattcacccccatcccagcagcaatcacctcactgcctcggttcacagtccccgccacaaggggggacttgaagaagagaggacagctcatcctggtcttcaattgaagtcttgggatgcaccagccctccctgattgctgaagacacagtagcttcctactagcacctggtcggccactgtctgtctgaagacttccaccttgagcacatctgccagaatttcttctgtctccctgtccaagtctgggtggaccaaggccacgtagtcattgcaggtggtgacattgcccaaggctgagagccgctcctccacccgcctaatctgcactgtgtctgggaggctgttgcgaatgtgttgcagctcctggtcggtggtattgttgggtaccaggagaccgtgcctgttccccacacacatgcgcccgatgatgcggcagccggcgatagacgcgtgcaccacggggatggtatcggagagctcgccctcgaacacactgtagaagttctctgagcctccgatcgctaccagacagtaggtgttggtgagcttggcaaagcagccgatctcacagttgttctcgaacgaagctcggaccgccatgaggccaagtaaccagtaacaagctccgcacgcggcgactgtaccttgcctcgtgcggaattcgccacccaggcctcgctaccttaggacc

SEQ ID NO: 72751 - DNA, 782 bp, Homo Sapiens
aaggcatagataatgggcctgtcataaaattatcaattataactggcaccgagggactgccctttttaagctaaactaagccttatctgcttaaggatgttgaactgaatcactccctttactcatcctgtgcatatgtgtacaaatggtcatgtggatcatgtgatgatcatccatcttatttgattgtattaatgcatcatgctaaacatgtagtacaggttaacaataccagatttatgtcctgttcaacaactcagtactctaaatgttgttatgcttttaataagaccttcccagataataatcttggagctcttttcccagctgtctaccatgcatttgcaacaggaggaagatgtaatgaatatgcagtattaagttgatttatgaacagtgctttgatatgccaaagggaaaactgtcccacttaaattagattaagtagggtggctaaaaataaataaaaacactggaaattctttctctcactttctcttgatgcaatgaagggaatatgacactacagtatacagagttgttgttatatgatgcacaaaatattttgatgatttgaataaatgttaacttttaatctgcgccttaataatgactggttatctgtaaatatagaacagatacagattgtatttttctgtgggtttttgtccttttagtgatttttttccaaaaacgagagatggaattaacattgaaaatgggaaatttttctaactgaatcaattgttacatgaaaaataaatttatataacccctttgta

SEQ ID NO: 72752 - DNA, 1229 bp, Homo Sapiens
ggggggggagaaaaccaattacgggctaggtagcgaggcctgggtgttaaattcggcacgaggatcacagactgcggtagtgggtcagggctgcgagggctgccccaagtcctaccgggtttgcacggccgcgcccggctccgcccgcaagtgcgccttcctgacttactgctgggtgcgcggggctgggggtgcgagtaccacccctgaagtctcttcctgagcgacctccggggcctcattctaggcctccttaaagagaaggatctaaattaggaaaaggaagtgcccttatccacgaccaagctcttccacctgcggagctcgcttagtctgcacctcaaccgttcggaaagtgactgccctgtttactgaggaaaaactggggctcagaaagataccatggagtagtttgaaacaggaacaaaatcttctgaaagctcggagcagaagcctttttggtcaacatggaggaaaaaagacggcgagcccgagttcagggagcctgggctgcccctgttaaaagccaggccattgctcagccagctaccactgctaagagccatctccaccagaagcctggccagacctggaagaacaaagagcatcatctctctgacagagagtttgtgttcaaagaacctcagcaggtagtacgtagagctcctgagccacgagtgattgacagagaagggtgtgtatgaaatcagcctgtcacccacaggtgtaatctagggtctgttgtatcctggcttttgttgacgttgaaaagaagctgactggactttggcacagctttgtccacgatgttccctggaaaacaggagggacccggcatcacgagagggatattacttattcaggacccagacttacaggctggttgggaaacatccttaacttatccaaatcctatggtacccaatctctccgtgggaccccgtgttgtggccccataaaaagcgttttaagacaatgtggcgcactacaaccttatttggaagtattgtaggagcagaacagctccggagcgcgagatatccccccctggggggggcactatcttaaatggggccgccccttgtaaagaagccccacagcggcggtttgggtggcagctcgactatgtgaagtgagcaggagggagaacaaacagatactatcttatctcttcgtgttttcttatctgtaactactactctatcttatcatctccttgctgcgtggtg

SEQ ID NO: 72753 - DNA, 2617 bp, Homo Sapiens
  misc_feature (2093)..(2093): n is a, c, g, or t
  misc_feature (2116)..(2116): n is a, c, g, or t
  misc_feature (2167)..(2167): n is a, c, g, or t
  misc_feature (2256)..(2256): n is a, c, g, or t
  misc_feature (2376)..(2376): n is a, c, g, or t
  misc_feature (2379)..(2379): n is a, c, g, or t
  misc_feature (2409)..(2409): n is a, c, g, or t
  misc_feature (2511)..(2511): n is a, c, g, or t
  misc_feature (2576)..(2576): n is a, c, g, or t
aatcggcacgagggcggagctgggtcagtgagctagcgcacgaggctagccaccagaagtcctaccgggtttgcacgggcgcgcccggctccgcccgcaagtgcgccttcctgacttactgctgggtgcgcggggctgggggtgcgagtaccacccctgaagtctcttcctgggcgacctccggggcctcattctaggcctccttaaagagaaggatctaaattaggaaaaggaagtgcccttatccacgaccaagctcttccacctgcggagctcgcttagtctgcacctcaaccgtgcggaaagtgactgccctgtttactgaggaaaaactggggctcagaaagataccatggagtagtttgaaacaggaacaaaatcttctgaaagctcggagcagaagcctttttggtcaacatggaggaaaaaagacggcgagcccgagttcaggcagcctgggctgcccctgttaaaagccaggccattgctcagccagctaccactgctaagagccatctccaccagaagcctggccagacctggaagaacaaagagcatcatctctctgacagagagtttgtgttcaaagaacctcagcaggtagtacgtagagctcctgagccacgagtgattgacagagagggtgtgtatgaaatcagcctgtcacccacaggtgtatctagggtctgtttgtatcctggctttgttgacgtgaaagaagctgactggatattggaacagctttgtcaagatgttccctggaaacagaggaccggcatcagagaggatactaacttatcagcaaccaagacttacagcatggtatggagaacttccttacagcttattcaagaatcactatggaaccaaatcctcactggcaccctgtgctgcgcacactaaagaaccgcattgaagagaacactggccacaccttcaactccttactctgcaatctttatcgcaatgagaaggacagcgtggactggcacagtgatgatgaaccctcactagggaggtgccccattattgcttcactaagttttggtgccacacgcacatttgagatgagaaagaagccaccaccagaagagaatggagactacacatatgtggaaagagtgaagatacccttggatcatggtaccttgttaatcatggaaggagcgacacaagctgactggcagcatcgagtgcccaaagaataccactctagagaaccgagagtgaacctgacctttcggacagtctatccagaccctcgaggggcaccctggtgacgtcagagctttgagagagaagcttcactgaaacggagcaaaccttccactgagaagccacttcaagaggctggtgctgctagatctcatgatgtggctgttgggaagatggtggggtttgtttgccagcttggagtcctattaaatgaaagccagcaactcatgttggtaataggtctactgtgggaacagttatccctaaccacagctcaaaatcgctatcatctttaggcaaattaaaatctatgtggcagtgctcatgacacaaccacaatccgaaacatctccaatatttccctcaccaaaacccgatcgcaaaacgactacaagcacgaaccgccgaatcgtaatggtccccgcgggaacccctatcccctctatagcctagaaatttcttcggtccggtccccccgctttcccaaaaacttttccaaaacaccccccgtttggccgcggcggtctcccttatggcacaataacccttttgtcccatcttgtttttccccccacaaaacccccgggccctacgccccatagggtcctcgcggcttttcttcccaccgataaaaaaaacccccccgcgggtgttaaccacacacaccgcggctctgtaaacaacaaatttccctaaggcagggcggggtccctggggaggagggcctcaactcacctgcgggatcttcctatcccacaaacagagggcgcggcgcctcttgcgcgccggcgcccctccgcccgttcgtctcacaaatttttctccgccctctcacgccctgtccttctaccgcccgcgtgtctgtgttttcgcctgancgccgccgctaccgcgtggttcnttgccaccgcggcctgttctctatttaacgagtgtggccccgtcctcgccnaccactatcacttctgtggaagagagccttatacttattgcgaccccgccgctcttgtctttgcgtcacgccacacttccttgtatttnatttccgccgccgcccgtggctgttctaccccacgacacatcacctttgtgtggtgtccaccccttctcgcgctggtgcacgcgactattattgtctctgacgcgcagcgggagggaganaanacgccgcgcgcggggacgcaccacacaaanataagtgtgcactcataattgccgtgcggcggccgtctcacgagaagattctatgtctgttgggtgcccaccaactcctctccgctcgataattattgtgtnctcccgacccattaccacaataaacacgcgcccctccagtctataacactcttttccaccgccantatatacgccccgcgtctcttctccccgcccctcaaccccg

SEQ ID NO: 72754 - DNA, 1622 bp, Homo Sapiens
tcagtttacagcgtcagggtcagtttacagcgtcagggcatggagatcctatgccctgccctaagaaagacactcccaattctgtttgggagcctgcgaaggcaaaatatgtctttagagatgtggtgcagataacctgtctggatgggtttgaagttgtggagggacgtgttggtgcaacatctttctattcgacttgtcaaagcaatggaaagtggagtaattccaaactgaaatgtcaacctgtggactgtggcattcctgaatccattgagaatggtaaagttgaagacccagagagcactttgtttggttctgtcatccgctacacttgtgaggagccatattactacatggaaaatggaggaggtggggagtatcactgtgctggtaacgggagctgggtgaatgaggtgctgggcccggagctgccgaaatgtgttccagtctgtggagtccccagagaaccctttgaagaaaaacagaggataattggaggatccgatgcagatattaaaaacttcccctggcaagtcttctttgacaacccatgggctggtggagcgctcattaatgagtactgggtgctgacggctgctcatgttgtggagggaaacagggagccaacaatgtatgttgggtccacctcagtgcagacctcacggctggcaaaatccaagatgctcactcctgagcatgtgtttattcatccgggatggaagctgctggaagtcccagaaggacgaaccaattttgataatgacattgcactggtgcggctgaaagacccagtgaaaatgggacccaccgtctctcccatctgcctaccaggcacctcttccgactacaacctcatggatggggacctgggactgatctcaggctggggccgaacagagaagagagatcgtgctgttcgcctcaaggcggcaaggttacctgtagctcctttaagaaaatgcaaagaagtgaaagtggagaaacccacagcagatgcagaggcctatgttttcactcctaacatgatctgtgctggaggagagaagggcatggatagctgtaaaggggacagtggtggggcctttgctgtacaggatcccaatgacaagaccaaattctacgcagctggcctggtgtcctgggggccccagtgtgggacctatgggctctacacacgggtaaagaactatgttgactggataatgaagactatgcaggaaaatagcaccccccgtgaggactaatccagatacatcccaccagcctctccaagggtggtgaccaatgcattaccttctgttccttatgatattctcattatttcatcatgactgaaagaagacacgagcgaatgatttaaatagaacttgattgttgagacgccttgctagaggtagagtttgatcatagaattgtgctggtcatacatttgtggtctgactccttggggtcctttccccggagtacctattgtagataacactatgggtggggcactcctttcttgcactattccacagggataccttaattctttgtttcctctttacctgttcaaaattccatttacttgatcattctcagtatccactgtctatgtacaataaaggatgtttataagc

SEQ ID NO: 72755 - DNA, 1690 bp, Homo Sapiens
  misc_feature (541)..(555): n is a, c, g, or t
  misc_feature (1299)..(1307): n is a, c, g, or t
  misc_feature (1320)..(1548): n is a, c, g, or t
  misc_feature (1552)..(1552): n is a, c, g, or t
  misc_feature (1580)..(1580): n is a, c, g, or t
  misc_feature (1605)..(1605): n is a, c, g, or t
  misc_feature (1617)..(1617): n is a, c, g, or t
  misc_feature (1663)..(1663): n is a, c, g, or t
tgcaacaatcaagtagcagtccgcagaacggaaactggacgcattggattagaaggctgcctttgtcaagatttttataggataagagaccttttatatgaacaatatgccattgtataaaggacatgatgtcaagaagtatctgcttgacctttctaagaaaaagggattcttatcttactctgagcttttgatgttttgttttgtaacatacaaaaagaatctgccagaaaaacttacatgtatcagatttttaaaaatataaatagagaacattttgcaaatgctcaaatgagcattctatcttttggctttcagagtgatagagctcctaacaggtgtacaggcccaagagttgaaggtgattggttttctttacagactccttgttctctagaagggctttttacttgaataaaacaatgcaacttagcaaaccaatttatggccttagagaaacatttttgcatgagttcttacaaactgtttgttatattttctggaatgataagtgagaattatttagaaaagacatgctccnnnnnnnnnnnnnnnctgataaaacagtttttcgaaacttacttttaaaagcatacgtgctatgactctctccagtttgaatatgcaattgttttcacaggcaggatgtctgttttctgcctgtatttcccagtgatttactctagggtaaggtagtacacatttggttcagaaattaatttttatttctcctatatcttgttttatcaagattttgttgtggcatttcaatgtaaattataacaccatcatttgagtatacataattcaaaagaactacttgatgcagtatagtcttaagggttctgcatacattttagaaacatcttagccgtaagttaggtcctgtgttaaactgtttagtgctctgtttttaagaaaacaaatgttgaacctcacacttttatgtggtgacagtgtaatttaattaaaaggtgtaaatgttttcatctcttaggcttgctgtctcctaaggtcacccaagcagtggttggattttatacacattactactaaaataatactgaagttggataaggttatcctttctgtatttgcgtctttcttgtgactaaccaccctgatatagtattaaccactgtgttcaagagtaaaaacaatatatgcaattttcattgaacttaaagagtgaaaaccatgtaaactattgaaactattgtaatccattaatgcttttttagaatggcagaccttgatgtttatttctcaaatggttaagccctcttctttactcttaannnnnnnnngagacagagtcannnnnnnnnnnnnnnnnnnnnnnnnnnnnnnnnnnnnnnnnnnnnnnnnnnnnnnnnnnnnnnnnnnnnnnnnnnnnnnnnnnnnnnnnnnnnnnnnnnnnnnnnnnnnnnnnnnnnnnnnnnnnnnnnnnnnnnnnnnnnnnnnnnnnnnnnnnnnnnnnnnnnnnnnnnnnnnnnnnnnnnnnnnnnnnnnnnnnnnnnnnnnnnnnnnnnnnnnnnnnnnnnnnnnacanggcatgatcacacactagcctaccttanatttttgggaggatcgatcctattnactatgtgtggnacaaccagtatatcagctcgattactattcatctattcaatgctanaagctacatgtgaataagtggtatgaa

SEQ ID NO: 72756 - DNA, 1124 bp, Homo Sapiens
  misc_feature (134)..(134): n is a, c, g, or t
catgatacgaggcgaatgggtgacgccgggcagggagcaggcatgataacccaacattcaagtaacgcatccccaattaatagaaatgtacaaatcagtggcaattccatgccaagaggaagtggctccggatntaagccatttaagggtgacctccgcgacgattctgaaaatgagctctctgccaaggttttaagataatttattgaaatctcctgtaaactttacttgactacttatgaagaggacctctgacttgcttgagagttctgtcagacttttctttttaaaaatttaacatgattgcttttctcaattttggagaagatgtttaaatagttctgttgtaacttttaatagttttgtgtatcattcaactttttttcttgcagcaccgaggcacatttgaaaagatggaattgaagtcgttttgtttaacgctgtgtgaatataaagagtagtttgcagctgtgtggtagtggtttaatttgcagccttagctctgtggtgtctggctctagagttacttctttttaccaagcattttcagcctccattttgaaggctgtctacacttaagaagtcttagctgtctaatttttagagaataagattgttcattgcatttctgagtattatgtaacctatttttgcagaaggtactgttacattaagtgcatctgtgtatcctggtttaaaaaaatgtaatcttttttgaaataaaccttcatattctgtatagttgctaaagtgttgagaacctttttaattgtaaaatgagaaccgattttcagtttagtgtagcagcacacttgttcaggtttgcatggtatgaaaccaaatagattcatgaaaccttggccatgaggtttgtttcacaaggttcttagaccgagttgtgcaggtaagtgcacttttaggtaatctgcactgtttgtttgatggataaattccatctctgggaattgtgtgggtattaatgtttccatgttcccaactatgttgagaagtggaaaaaaacccaggttctagatgggtgaatcagttgggttttgtaaatacttgtatgtggggaagacattgttgtctttttgtgaaaataaaaatccacacctggaaaaaaa

SEQ ID NO: 72757 - DNA, 1852 bp, Homo Sapiens
  misc_feature (22)..(22): n is a, c, g, or t
  misc_feature (39)..(39): n is a, c, g, or t
  misc_feature (43)..(43): n is a, c, g, or t
  misc_feature (45)..(45): n is a, c, g, or t
  misc_feature (52)..(53): n is a, c, g, or t
  misc_feature (59)..(59): n is a, c, g, or t
  misc_feature (79)..(79): n is a, c, g, or t
  misc_feature (81)..(81): n is a, c, g, or t
  misc_feature (85)..(85): n is a, c, g, or t
  misc_feature (90)..(464): n is a, c, g, or t
  misc_feature (1331)..(1344): n is a, c, g, or t
ttttgactctcaggggcggacnttgaaaacccagcacgngccntntacgtcnntgcctntgctgcctttgctcacatgncntccntgcgnnnnnnnnnnnnnnnnnnnnnnnnnnnnnnnnnnnnnnnnnnnnnnnnnnnnnnnnnnnnnnnnnnnnnnnnnnnnnnnnnnnnnnnnnnnnnnnnnnnnnnnnnnnnnnnnnnnnnnnnnnnnnnnnnnnnnnnnnnnnnnnnnnnnnnnnnnnnnnnnnnnnnnnnnnnnnnnnnnnnnnnnnnnnnnnnnnnnnnnnnnnnnnnnnnnnnnnnnnnnnnnnnnnnnnnnnnnnnnnnnnnnnnnnnnnnnnnnnnnnnnnnnnnnnnnnnnnnnnnnnnnnnnnnnnnnnnnnnnnnnnnnnnnnnnnnnnnnnnnnnnnnnnnnnnnnnnnnnnnnnnnnnnnnnnnnnnnnnnnnnnnnnnnnnnnnnnnaagaattcggcacgaggcttccttcaaatccaatagatttttcttacagagtagctgcttgtcttcctattgatgatgtattgagaattcagctccttaaaattggcagtgctatccagcgacttcgctgtgaattagacattatgaataaatgtacttccctttgctgtaaacaatgtcaagaaacagaaataacaaccaaaaatgaaatattcagtttatccttatgtgggccgatggcagcttatgtgaatcctcatggatatgtgcatgagacacttactgtgtataaggcttgcaacttgaatctgataggccggccttctacagaacacagctggtttcctgggtatgcctggactgttgcccagtgtaagatctgtgcaagccatattggatggaagtttacggccaccaaaaaagacatgtcacctcaaaaattttggggcttaacgcgatctgctctgttgcccacgatcccagacactgaagatgaaataagtccagacaaagtaatactttgcttgtaaacagatgtgatagagataaagttagttatctaacaaattggttatattctaagatctgctttggaaattattgcctctgatacatacctaagtaaacataacattaatacctaagtaaacataacattacttggagggttgcagtttctaagtgaaactgtatttgaaacttttaagtatactttaggaaacaagcatgaacggcagtctagaataccagaaacatctacttgggtagcttggtgccattatcctgtggaatctgatatgtctggtagcatgtcattgatgggacatgaagacatctttggaaatgatgagattatttcctgtgttnnnnnnnnnnnnnntcttaaattcctaaaatgtgaaactgaaactaataattggatcctgatgtatgggacagcgtatctgtaccagtgctctaaataacaaaagctagggtgacaagtacatgttccttttggaaagaagcaaggcaatgtatattaattattctaaaagggctttgttcctttccattttctttaacttctctgagatactgatttgtaaattttgaaaattagttaaaatatgcagttttttgagcccacgaatagttgtcatttcctttatgtgcctgttagtaaaaagtagtattgtgtatttgctcagtatctgaactataagcccatttatactgttccatacaaaagctatttttcaaaaattaatttgaaccaaaactactactatagggaaaagatgccaaaacatgtcccctcacccaggctaaacttgatactgtattattttgttcaatgtaaattgaagaaaatctgtaagtaagtaaaccttaagtgtgaaactaaa

SEQ ID NO: 72758 - DNA, 663 bp, Homo Sapiens
  misc_feature (63)..(116): n is a, c, g, or t
ctgtgaatcacagacacgcgggaccccagccgccaaaacttttcaaggcagaagtttcaagannnnnnnnnnnnnnnnnnnnnnnnnnnnnnnnnnnnnnnnnnnnnnnnnnnnnncacgcgcgtgcgcgcttgtggcatagccttcctgtttctgtcaagtcttcccttggcctgggtcctcctggtgagtcattggagctatgaaggggaaggggtcgtatcactttgtctctcctacccccactgccccgagtgtcgggcagcgatgtacatatggaggtggggtggacagggtgctgtgccccttcagagggagtgcagggcttggggtgggcctagtcctgctcctagggctgtgaatgttttcagggtggggggagggagatggagcctcctgtgtgtttggggggaagggtgggtggggcctcccacttggccccggggttcagtggtattttatacttgccttcttcctgtacagggctgggaaaggctgtgtgaggggagagaagggagagggtgggcctgctgtggacaatggcatactctcttccagccctaggaggagggctcctaacagtgtaacttattgtgtccccgcgtatttatttgttgtaaatatttgagtatttttatattgacaaataaaatggagaaaatg

SEQ ID NO: 72759 - DNA, 953 bp, Homo Sapiens
  misc_feature (731)..(784): n is a, c, g, or t
  misc_feature (842)..(842): n is a, c, g, or t
  misc_feature (877)..(877): n is a, c, g, or t
cggtctaggtagcgaggcctgggtggcgaattcggcacgagggctactgagaggaccttggtgtaccccctggagctgcccaaggagcccaccagtccccccttccggccctgtcctgaaccagatgagaaactttgggatcctgtcggttactactattcagatggctcccttaagatagtacctgggcatgcccggtgccagcccggtggggggcccccttcgccacctccaggcatcccaggccagcctctgccttctccaactcggcttcacctggggggtgggcggaactcaaatgccaatggttacgtgcgcttacaactaggaggggaggaccggggagggctcgggcaccccctgcctgagctcgcggatgaactgagacgcaaactgcagcaacgccagccactgcccgactccaaccccgaggagtcatcagtatgaggggaacccccaccgcgtcggcgggaagcgtgggaggtgtagctcctacttttgcacaggcaccagctacctcagggacatggcacgggcacctgctctgtctgggacagatactgcccagcacccacccggccatgaggacctgctctgctcagcacgggcactgccacttggtgtggctcaccagggcaccagcctcgcagaaggcatcttcctcctctctgtgaatcacagacacgcgggaccccagccgccaaaacttttcaaagcagaagtttcaagannnnnnnnnnnnnnnnnnnnnnnnnnnnnnnnnnnnnnnnnnnnnnnnnnnnnncacgcgcgtgcgcgcttgtggcatacccttcctgtttctgtcaagtcttcccttgggnctgggtcctcctggtgagtcattggagctatgaanggggaagggggtcgtatcacttttgtctctcctacccccactgcccccgagtgtcgggcagcgatgttactattgg

SEQ ID NO: 72760 - DNA, 2048 bp, Homo Sapiens
caaaatgtgcctccaaacttcaggcacataattccaatttttattgaatgtagagattttatgaaaacaaatccaaagctgtcccatcatggaacagccctctaccatttggttattttaagactgttcaattacttacatggcagaatacatacactatatttagaaaacataaattgggtttgatatgcaattgttttcatcttacaccatttcaataaatttcacaaattataacaggttgccattttattgaatatctgcgacactttacattgttcaggaagtagctacttccagaaggctgatattctcctccaaattgtctttggctaagtactacagatgtgattcagtccaaactatatgcccaaactgattaaaattctcagtctctcctagcttgagacctcagatcctgagttataactttgacttgatcttcaagttgagatgcttcataaatatttttcttaaaacagggctatttaacataatttctttttcttgaaatatatgagtgtttttgatacaaaaacatatattacacatgagaatgtttaaagcatcaaaataatgattaaattttttacataacttaaatgacaggactacaatatgccccccacttttttgctgtttgaagtaaagaggaaagctctgtaacaatttcaaatacataggatttaacttatgttaatatcctgttataaaaaataactaccatataaagaatttaaaatatgcaaaagtaattagttcatttaaatttatacttatacaccggtgtcaatgaaaatatgcgaagttgccaagaaatttctaaggattaaagtggaagtaaaaaaacctgtttcaggcttcatttattgctacataatgactacttcaagggtcatctggcccgtcgtcagtcactcttagaagtggtaaatacagtggtatagtttggaaggaaaggaggaaaaaaataatgcattgtgatacaaaaatattacctacatataaattattaaagatttataaaacattcagaatatgttcttgctataaaaacaatatacttaaatatagaagcaaaaagtcctgaagcacccgcaattattttaatatccatttaatcagggaaaactatatatgtggatatataatacatacatatgtaataatttgagaagaaaaaaggcaaaattctgattataatccaaaaagagtttatctaattatggaggtaggtctccactccaattatacaaataagttatcagttttattcaaagaattataagtctaagacctcaaaactggtttttgtgccactgaaatacaatttgacagactttagaaaccagtattctaactggcatatacacaaagcagatatttccttcataaggttacatctgaaaagagccttcattaaaatcattattggcataaagaggtatacctaagtgcagatactttggcttagcatttaaataacacagtaaatgctataaatttcttaaaagaaatccttgtctttttagtacttaaattaattgtaaagctacagaaagtatggatctcttaaatttttagatatttaaatattgtgctaatgatttgaaaagatcattcctgcctaaagagcaaagcttatgtgtttcaaaaatcagacatatttatacttttagtgtttgtggcatttcagctttagtgctggagttagttttaacaaattaggttgcaatatgtaatatggcacattctttcactaaaaaagatgttctataatgaaaaacactaattctatttctaatggtaaactagagttggaggtcccaccatggatcacaggtatcagagcactatcaagatcatttagataatgctgaggcagaagttggccttcagatcctgcctgaaattcaacctagaaaaacaaaaaattcttgataagaaaatgagcaatcttgtttaactcggaatgtgaatataaaataagtgaaatattttaaaatacagttcaagcatgttaaataaaatatttgatatatttataa

SEQ ID NO: 72761 - DNA, 1000 bp, Homo Sapiens
gggggcgcgtcggccatgagcgagttgccgggcgacgtgcgggcgtttctgcgggagcacccgagcctgcggctccagacggacgcccgcaaggtgaggtgcatcctgacaggtcacgagctgccctgccgcctgccggagctccaggtctacacccgcggcaaaaagtaccagcggctggtccgcgcctccccggccttcgactatgcagagttcgagccgcacatcgtgcccagcaccaagaacccgcaccagttgttctgcaaactcaccctgcggcacatcaacaagtgcccagaacacgtgctgaggcacacccagggccggcggtaccagcgagctctgtgtaaatatgaagaatgtcagaagcaaggggtggagtacgtgcctgcctgcctggtgcaccggaggaggaggagggaggaccagatggacggtgacgggcctcgcccgcgggaagccttctgggagcccacatccagtgatgaggggggagctgcaagtgatgacagcatgacagacctgtacccacctgagctattcaccagaaaggaccttggaagcacggaggatggggatggcactgatgactttttgacagacaaagaggatgagaaggcaaagcccccaagagagaaggccactgatgagggcaggagagagacgaccgtgtaccgagggctggtccagaagcgcgggaagaagcagttgggctcgttgaaaaagaagttcaagagtcatcaccgcaaacccaagagcttcagctcctgtaaacagccaggttaataaaagcacatgccgtgaaatttcgaagaagccttcagatatttcccccgctcctgatcaaaccgggtgtcttctgaatgatcggctgtccccattgtcttctctacccactaatcttggctcatgacatctgctgcccctttaagcagggcctaagggagtcctgtcccccccacccaggaagcaccagggaattctgagggacttattctcc

SEQ ID NO: 72762 - DNA, 642 bp, Homo Sapiens
gggaaattttagtgagaaaaaatgcactgtaaatatgctttagttttaattcagttgggatgcactacctagcgaaaattgagaaactatatacttctcagagaaatatctgacatctattgtcattccattgctattttttttccccagagacttccataatttaaaataaaatcctagatccagttcttgttttttggcataaatacttaatctattttaaatttataaaatctgagcttctaggatccagctgtgtcaacctttatttagcatatataactataaatcacttattacagatgctaaatagatcaccttttacagatgctgaaatgtttgggatatgtttgttgacaaggtaaatggaaatgagaaactttatacttcagttttcagatatatggatctagatcccaaataaatgattaatcttcattggtttctcaaattcaggttgaaatacaaattaatagcctttattgattttacttttatgagtcattgtagacatctataaatataaaagggcctgtacccaaaggatgccagaatactagtatttttatttatcgtaaacatccacgagtgctgttgcactaccatctattcgtggtaaataaaagtgtcgttttcaaagcc

SEQ ID NO: 72763 - DNA, 670 bp, Homo Sapiens
gttctcctttttcacccaagtaattgcctttccatctaatggcccaaatggtcaaatggcatctactagtctcatatgaccgctgcctctctggcctcgccctgctgctgacgtcagcatgaactggaactgtccactggtccctttcagtaacctgaagctttcaccatagacgtgctgtattgcccagaagccatcatgtcgctggtcggcgtcctgcggaggctggctgcctgccaggagcacaagcgggctcctgaggtctacgtggcctttaccgtccgcaacccaaagacgtgccagctgttcaccaccgagctaggccgggccgggatcagatgggaagcagaacctcatcatgaccagaaactgtttccctacgaagagcacttggagatggcaatgctgaacctcacactgtaggactcacacacgactccaacgggattgtaagaatcaagtcactctcatgggaagaatttttatatgggaaagcggataaaactttcaatggactggaatgtttggagattgttaaattccaaatcaggaaccacaaactgccctttaataagatatcagctgtttaagcgtgtgggtgccgcctttttgccagtagttttggttcttaagaaaagccccataaatcagacatgaaaattttggctcc

SEQ ID NO: 72764 - DNA, 730 bp, Homo Sapiens
ggcacgaggcatggcgcccgaggagaacgcggggaccgaactcttgctgcagagtttcgagcgccgcttcctggcggcacgcacacggcgctccttcccctggcagagcttagaagcaaagttaagagactcatcagattctgagctgctgcgggatatttggcacaagactgtgaagcatcctgtgtgtgtgaagcacccgccgtccgtcaaatatgcccggtgctttctctcagaactcatcaaaaagcacgaggctgtccacacagagcctttggacgagctgtatgaagcgctggcggagaccctgatggccaaggagtccacccagggccaccggagctatttgctgccctcgggaggctcggtcacactctccgagagcacggccatcatctcctacggtaccacaggcctggtcacatgggacgccgccctctaccttgcagaatgggccatcgagaacccggcagtcttcactaacaggactgtcctagagcttggcagtggtgctggcctcacaggcctggccatctgcaagatgtgccgcccccgggcatacatcttcagcgactgtcacagccgggtccttgagcagctccgagggaatgttccttctcaatggcctctcattagaggcagacatcactgccaagttagacagccccaggctgacagtggcccagctggactgggacgtcgcgacggtccatcagctctctgccttcca

SEQ ID NO: 72765 - DNA, 1435 bp, Homo Sapiens
  misc_feature (21)..(21): n is a, c, g, or t
  misc_feature (90)..(115): n is a, c, g, or t
ataacggctaggtacgaggcntgggtgtgtgaattcggcacgagggaggggacggcagaacagtaatacgctagcagggcatggggcgtnnnnnnnnnnnnnnnnnnnnnnnnnnatcaaggccaaccaaagcttcccgggtcacagaaccaattcttttaccaggcagtaccactgctgtcatttcagcttctggccactgggaggtgctgctcgaaagggtttgccctgagactccaagaagaagctgcgggaaggacagcaggggccctggggttttagcctctggcccaggagttatgtgtccataaccaaagggagcacagtctgcacccagctctcatcccatcagagctgctgcgactcccgcaggttcttccggaactggtttagcttgcctgcaggatcaggaaagtttgagaaaagcatctgcaaaaaaataaagagcagagcttacctcattgcctgtccccaccccatcccaggtcaccacctggctgaccccaggtccccgacccaacaacaacccctcccaagtccctaactccctcacttggactcgagacccttcacaccccagcagcactccgcctccaacttgacatcacagtttctggaaacttccccgcatgtcccactttcccacacttggtgccctggagcacctcccggcctctacgtgctgcccattcccctgtgagcaccctcctctcggcctctggccaacgcagtcccacccatctgtgggtaacaagggggtgtcggtgttctttgcagccttgctaaactgtctgaatcaaggatcacaaactacagcctgcaggccaaatccagcccacagcctgtgtttgtaaataaagttttattggaacaaagccacaccccttaatcgaagatgatctgtggctactttcacaccacaacagagtaccatggttctgacagagactaggagacccagtctaaatgacttctgacctggacctttactgaaaatcctgccaatcattctgttggcaagaatgatgtattacttttagcaataagaaacaagtaacctttgcagaattccacccatctttcaaggctggtcccagaagttccctttgcccacgcacctacctgatccgatcacttcctaaactgcagcccggcccacccggctccagcatcatttatggagtgtcagctccataaatccagagggcaggtggggttgtgtcctaactttcccgagcctactgtaccgaaatgggacagcagagtaggaggcctctgtgacttctgctcccccactagcttttccaccagaccccccatggtcccaccctggctgtgggaagcagggatcagggagcgtggctcgatgccagtctccagaaccctgcccaccctggcgtggtggcagacatcccgggaattccggaccggtacc

SEQ ID NO: 72766 - DNA, 1931 bp, Homo Sapiens
ggccagcaagatggcggctcatgcttggtcctgctggcggctgtgtctgctgctgccgcggctgctgctgggaggatggaagcgctggcgccgggggcgggcggcccggcatgtagtagcggtggtgctgggcgacgtgggccgcagcccccgtatgcagtaccacgcgctgtcgttggccatgcacggcttctcggtgaccctcctggggttctgcaactccaaaccccatgatgagctcttgcagaacaacagaattcagattgtggggttgacagaacttcagagtcttgcagttgggccccgagttttccagtacggagtcaaagttgtacttcaggctatgtacttgctgtggaagttgatgtggagggagccaggtgcctatatctttctccagaaccccccaggtctgcctagcattgctgtctgctggttcgtgggctgcctttgtggaagcaagctcgtcattgactggcacaactatggctactccatcatgggtctggtgcatggccccaaccatcccctcgttctgctggccaagtggtacgagaagttctttgggcgcctgtcccacctgaacctgtgtgttaccaatgctatgcgagaagacctggcggataactggcacatcagggctgtgaccgtctacgacaagcccgcatctttctttaaagagacacctctggacctgcagcaccggctcttcatgaagctgggcagcatgcactctccgttcagggcccgctcagaacctgaggacccatcacggagcggtcggccttcacggagcgggatgctgggagcgggctggtgacgcgtctccgtgagcgggcagccctgctgggtcagcagcacgagctggacagaggacgaagacttctccatcctgctggcagctttagaaaagtttgaacaactgactcttgatggacacaaccttccttctctcgtctgtgtgataacaggcaaagggcctctgagggagtattatagccgcctcatccaccagaagcacttccagcacatccaggtctgcaccccctggctggaggccgaggactaccccctgcttctagggtcggcggacctgggtgtctgtctgcacacgtcctccagtggcctggacctgcccatgaaggtggtggacatgttcgggtgctgtttgcctgtgtgtgctgtgaacttcaagtgtttacatgagctggtgaaacatgaagaaaatggcctggtctttgaggactcagaggaactggcagctcagctgcagatgcttttctcaaactttcctgatcctgcgggcaagctaaaccagttccggaagaacctgcgggagtcgcagcagctccgatgggatgagagctgggtgcagactgtgctccctttggttatggacacataactcctgggccagaggctaaaaccccaggacccctgctgtccttcccgcagcttcttcttggagtctcagggcaaaccctttcgagcagcacctcccagtggccagaagctgaaatgacagcagtggtactgcctggtaaaagaattggttctgtgacccgggaagctttggttggccttgatttcttctctggaggcttggaaacgcttcctctcttcttctgttcttcacgccccatgcccctgctagcgtattactgttctgtgacttccctgtgacctctgcagaactcctcatcctgcgtttggtctccaggtgtcccctttctgccgtgttcctaacattttgattcctgtcttgaaaaaagcacctgctgcaccgtaagcccagggatgtggcagctgcagtgggcttggctttgtgaggaactgagtgtgtccacgttgggggaacatcatacttgatacacacgtttttatttgcacaaagaaaatgctatttttggagcccagaattttcatgtctg

SEQ ID NO: 72767 - DNA, 907 bp, Homo Sapiens
agaaaccgagtgtgtcccagggatgtgccagctgcagcggggcttggctttgtgaggaaaacgagtgggtcccagggatgtggcagctgcagcgggcttggctttgtgagaaaccaagtgtgtccacgttggggggaatgtcatacttgatacacacgtttttatttgcacaatgaaaatgctatttttggagccagaattttcatgtctgatttatggtgattttcttaagaaccagaactgctggcagaaagggggaacccacatgcttagatagccgatgtcttattagagcgcagtttgtggttcctgatttggaatttaacattctccaaacattccagtccaatgaaagttttatccgctttcccatataaaaattcttcccacgagagtgacttaattctcacaatcccgttggagtcatgtgtgagtcctacagtgtgaggttcagctttgccatctccaagtgctctctgtagggaaacagtttctggtcatgatgagcttccgcttcccatctgatcccagtccagcatagctcggtggtgaacagctggcacatctctgggttgcagacggtaagggccatgtagaattgaggagcccgctggtgctcccggcaggcagccagcctccgcaggaccccgaccagcgacacgatggcttctgggcaatacagcacgtcagcaaatagctccggtggccctgggtggactccttggccatcagggtctccgccagcacctcgtacagctcatccaaaggctctgtgtggacagcctcgtgcttctgcaaaatatcccgcagcagctcagaatctgatgagtctcttaactttgcttctaagctctgccaggggaaggagcgcagggcgcgcgccgccaggaagcggcgcttgaaactc

SEQ ID NO: 72768 - DNA, 1458 bp, Homo Sapiens
cgcccggtctgccggcaacgctgcggccccgcccacgtcatggcgcccgaggagaacgcggggaccgaactcttgctgcagagtttcgagcgccgcttcctggcggcacgcacactgcgctccttcccctggcagagcttagaagcaaagttaagagactcatcagattctgagctgctgcgggatattttgcacaagactgtgaagcatcctgtgtgtgtgaagcacccgccgtccgtcaaatatgcccggtgctttctctcagaactcatcaaaaagcacgaggctgtccacacagagcctttggacgagctgtatgaagcgctggcggagaccctgatggccaagggagtccacccagggccaccggagctatattgctgccctcgggaggctcggtcacactctccaagagcacggccatcatctcctacggtaccacaggcctggtcacatgggacgccgccctctaccttgcagaatgggccatcgagaacccggcagccttcattaacaggtgacctcggggcacagggcagggcaccgaggcaggcttaccctggtgcagtcgaaaacacggtcccctttcctcccgccaggactgtcctagagcttggcagtggtgccggcctcacaggccttgccatctgcaagatgtgccgcccccgggcatacatcttcagcgaccgtcacagccgggtccttgagcagctccgagggaatgtccttctcaatggcctctcattagaggcagacatcactgccaactttagacagccccagggtgacaagtggcccagctggactgggacgtagcaatggtccatcagctctctgccttccagccagatgttgtcattgcagcaggtaatgcccagccccgggcatcctgtgcaggcggtgtccttgcagctctacccagctcttggctctgggaaaagggaacaatggacactgtcgggcatggacgtgatggggcttccagaagagttactctgggcctccagggtgacatcaaaggacaggggtgcctcttaaggtgaccttcaagccacagccctgttgttggagacaggcatactcccgttacagtcgtcaccacatggctctgtcccagagccatgccctgtgtccttcagagaccacaggaggaaaacaaccacttctgggacgaggacagggcccttgagagaaggtgctgtttggctgggccaccaaaaacccctcacccctgccagcacactcagtcccctctctggtggaacagagctctgcctgtagtcctgggtcccagccctgaaacccacaggtccagcggtggccagggacacaggcccacccctgcaagccagcagaccaatcggcagacacctgaaacacgaagttcacggtagggtcaggctttctgccattcaaagccctctagataggcccagaaccagagctggttttttaagg

SEQ ID NO: 72769 - DNA, 1118 bp, Homo Sapiens
aagagcgagcctgggtggcgaattcggcacgaggcaggaggaaacagtaccggctggaggccggtcttgcaggagcgggggactgctgggcgcggggcttggtggtgaccgctggcggggcggggcctggggctcagaggggtgggctttggagatcagagggtcgacgctgcttcgttgcctggactctggtttccgccctggagcaagccggggcctggtcggcagctgggccgccatggagtccacgctgggcgcgggcatcgtgatagccgaggcgctacagaaccagctagcctggctggagaacgtgtggctctggatcacctttctgggcgatcccaagatcctctttctgttctacttccccgcggcctactacgcctcccgccgtgtgggcatcgcggtgctctggatcagcctcatcaccgagtggctcaacctcatcttcaagtggtttctttttggagacaggcccttttggtgggtccatgagtctggttactacagccaggctccagcccaggttcaccagttcccctcttcttgtgagactggtccaggcagcccttctggacactgcatgatcacaggagcagccctctggcccataatgacggccctgtcttcgcaggtggccactcgggcccgcagccgctgggtaagggtgatgcctagcctggcttattgcaccttccttttggcggttggcttgtcgcgaatcttcatcttagcacatttccctcaccaggtgctggctggcctaataactggcgctgtcctgggctggctgatgactccccgagtgcctatggagcgggagctaagcttctatgggttgactgcactggccctcatgctaggcaccagcctcatctattggaccctctttacactgggcctggatctttcttggtccatcagcctagccttccagtggtgtgagcggcctgagtggatacacgtgggatagcccggcccttttgcctccctgaaccggggactcagggggctgcccctggggcctggggcattgcccttgcactcctccctgctatgcccaaagtgccgtcgggcaacaagctgggggaaatgggcccaaaaagattaacctggcc

SEQ ID NO: 72770 - DNA, 856 bp, Homo Sapiens
gctgcttcgttgcctggactctggtttccgccctggagcaagccggggcctggtcggcagctgggccgccatggagtccacgctgggcgcgggcatcgtgatagccgaggcgctacagaaccagctagcctggctggagaacgtgtggctctggatcacctttctgggcgatcccaagatcctctttctgttctacttccccgcggcctactacgcctcccgccgtgtgggcatcgcggtgctctggatcagcctcatcaccgagtggctcaacctcatcttcaagtggtttctttttggagacaggcccttttggtgggtccatgagtctggttactacagccaggctccagcccaggttcaccagttcccctcttcttgtgagactggtccaggcagcccttctggacactgcatgatcacaggagcagccctctggcccataatgacggccctggtcttcgcaggtggccactcgggcccgcaggcgctgtcctgggctggctgatgactccccgagtgcctatggagcgggagctaagcttctatgggttgactgcactggccctcatgctaggcaccagcctcatctattggaccctctttacactgggcctggatctttcttggtccatcagcctagccttcaagtggtgtgagcggcctgagtggatacacgtggatagccggccctttgcctccctgagccgtgactcaggggctgccctgggcctgggcattgccttgcactctccctgctatgccccaggtgcggtcggcacagcctggggaaatggccaagaagatagccctgccttgtgctgggcaatgggggctgctggggcccccctgggac

SEQ ID NO: 72771 - DNA, 1380 bp, Homo Sapiens
tggagcaagccggggcctggtcggcagctgggccgccatggagtccacgctgggcgcgggcatcgtgatagccgaggcgctacagaaccagctagcctggctggagaacgtgtggctctggatcacctttctgggcgatcccaagatcctctttctgttctacttccccgcggcctactacgcctcccgccgtgtgggcatcgcggtgctctggatcagcctcatcaccgagtggctcaacctcatcttcaagtggtttctttttggagacaggcccttttggtgggtccatgagtctggttactacagccaggctccagcccaggttcaccagttcccctcttcttgtgagactggtccaggcagcccttctggacactgcatgatcacaggagcagccctctggcccataatgacggccctgtcttcgcaggtggccactcgggcccgcagccgctgggtaagggtgatgcctagcctggcttattgcaccttccttttggcggttggcttgtcgcgaatcttcatcttagcacatttccctcaccaggtgctggctggcctaataactggcgctgtcctgggctggctgatgactccccgagtgcctatggagcgggagctaagcttctatgggttgactgcactggccctcatgctaggcaccagcctcatctattggaccctctttacactgggcctggatctttcttggtccatcagcctagccttcaagtggtgtgagcggcctgagtggatacacgtggatagccggccctttgcctccctgagccgtgactcaggggctgccctgggcctgggcattgccttgcactctccctgctatgcccaggtgcgtcgggcacagctgggaaatggccagaagatagcctgccttgtgctggccatggggctgctgggccccctggactggctgggccacccccctcagatcagcctcttctacattttcaatttcctcaagtacaccctctggccatgcctagtcctggccctcgtgccctgggcagtgcacatgttcagtgcccaggaagcaccgcccatccactcttcctgacttcttgtgtgcctccctttcctttccctcccacaaagccaacactctgtgaccaccacactccaggaggcagccccatccccttccagcccctaagtaggccctcccctccctaaatctgcttccgcaccacctggtcttagccccaaagatgggccttctctctcccagataagttggtcctccctctgcctttcctctcaagcccccaaagagcaaaggcaacagcaagaccagcgggttcttgcaacactgtgaggggcagccagggcggccccaataaagcccttgaatactttgaa

SEQ ID NO: 72772 - DNA, 1531 bp, Homo Sapiens
ccgctgcgtccgcccagcgccagctccgcgtccgaccggcccgcggcagcctgcgccgcgccatggccacctccccgcagaagtcgccttctgtccccaagtctcccactcccaagtcgcccccgtcccgcaagaaagatgattccttcttggggaaactcggagggaccctggcccggaggaagaaagccaaggaggtgtccgagctgcaggaggagggaatgaacgccatcaacctgcccctcagcccaattccctttgagctggaccccgaggacacgatgctggaggagaatgaggtgcgaacaatggtggatccaaactcacgcagtgaccccaagcttcaagaactgatgaaggtattaattgactggattaatgatgtgttggttggagaaagaatcattgtgaaagacctagctgaagatttgtatgatggacaagtcctgcagaagcttttcgagaaactggagagtgagaagctaaatgtggctgaggtcacccagtcagagattgctcagaagcaaaaactgcagactgtcctggagaagatcaatgaaaccctgaaacttcctcccaggagcatcaagtggaatgtggattctgttcatgccaagagcctggtggccatcttacacctgctcgttgctctgtctcagtatttccgcgcaccaattcgactcccagaccatgtttccatccaagtggttgtggtccagaaacgagaaggaatcctccagtctcggcaaatccaagaggaaataactggtaacacagaggctctttccgggaggcatgaacgtgatgcctttgacaccttgttcgaccatgccccagacaagctgaatgtggtgaaaaagacactcatcactttcgtgaacaagcacctgaataaactgaacctggaggtcacagaactggaaacccagtttgcagatggggtgtacctggtgctgctcatggggctcctggagggctactttgtgcccctgcacagcttcttcctgaccccggacagctttgaacagaaggtcttgaatgtctcctttgcctttgagctcatgcaagatggagggttggaaaagccaaaaccgcggccagaagacatagtcaactgtgacctgaaatctacactacgagtgttgtacaacctcttcaccaagtaccgtaacgtggagtgaggggctgccctgggcccaccactgcccaagagttcttgctgttggcgtactggaccctcctccgaactgccttaccctgcttattcctgtctcttgcactgtgctctcccacaagtccagctgcaacccagagatagtggaaactgaaattaggaaggaaatcatcaataactcagtgggctgacccatccctcccaggcgctggggaccaacctagcaatgaaggttgggaaggttgttcccttcccggtgccaggtccagatttccctccatgatttgggaaccagcttaggcaaaagagtccccacaagatgaaaataaagatcctagttaccattcaaaggatgct

SEQ ID NO: 72773 - DNA, 1054 bp, Homo Sapiens
  misc_feature (43)..(43): n is a, c, g, or t
  misc_feature (98)..(98): n is a, c, g, or t
  misc_feature (301)..(301): n is a, c, g, or t
  misc_feature (993)..(1014): n is a, c, g, or t
tgagaggtcagtcacaccgagatacacgcggaggtcatctcanttcagatagagtgaagcatgaagactgtgtgcaccagatcactcagcgcatcagntgcactcacgcacatcgcagtgcagagagaagcagaaagtgcaaccctagtgatacactctgtcttcctcaagcgcagcgcaaagcctctgactactgggactcggaccgcttgtgggacccagctccgcccttagtcccccaactctgagcccatgtctgcccccagcccaaaggggacagccctcacctctacccaaaccntagttcccggtcccgagtacagtctgtatcaaacccacgatttctccagctcagaacccagggctctgccccagtcgttagaatataggtctcttctcccagaatcccagccggccaatggaaacctcacgctgggtcctaattaccagtctttaaaggcccagcccctagaaacccaagctcctcctcggaaccgctcacctagagccagaccaacgttactcagggctcctcccagcttgtaggagctgaggtttcacccttaacccaaggagcacaggtcccacctccagcccgggagcctaggaccactcagcccctaggagtatatttccgcacttcagaattccatatcttgcgaatccaagctccctgccccaaataacttcagtcctgctccagaatttggaaatcctagtttcctctccttcgtatcccgagtctgggacacaaaactccgcccccagcctatgagcatcctgagccccgccctcttcctgacgaaactggccccggatcagagcaggacctcccttccgaccctctgggaacctcccagaggtccagcccatctcggagcatcccggaggaaatctgcagagggttaggagtgggtgacaagagcctgatctcttcctgttttgtacatagatttatttttcagttccaagaaagatgaatacattttgttnnnnnnnnnnnnnnnnnnnnnncctgagcaggcggccgcaagcttattccctttagtgaggg

SEQ ID NO: 72774 - DNA, 993 bp, Homo Sapiens
  misc_feature (38)..(38): n is a, c, g, or t
  misc_feature (146)..(146): n is a, c, g, or t
  misc_feature (156)..(156): n is a, c, g, or t
  misc_feature (268)..(268): n is a, c, g, or t
gagccggccttcctcctggtaagtaagggggaatattncagggacctttcccccgggttcccgggcagtcgcccggtggcccgagggaggccccatcggcccactgtgccttgcgggcagtacttggggtccatatatctgccggncccaggccgnaagacctggcccgcttgtggggacccaggctccgccctttagtcccccaacttctgagcccatgttctgcccccagcccaaaggggacaggcctcacctctacccaaaaccntaggttcccggtcccgagtacagtctgtatcaaacccacgattttctccagctcagaacccagggctctgccccagtcgttagaatataggtctcttctcccagaatcccagccggccaatggaaacctcacgctgggtcctaattaccagtctttaaaggcccagcccctagaaacccaagctcctcctcggaaccgctcacctagagccagaccaacgttactcagggctcctcccagcttgtaggagctgaggtttcacccttaacccaaggagcacaggtcccacctccagcccgggagcctaggaccactcagcccctaggagtatatttccgcacttcagaattccatatcttgcgaatccaagctccctgccccaaataacttcagtcctgctccagaatttggaaatcctagtttcctctccttcgtatcccgagtctgggacacaaaactccgcccccagcctatgagcatcctgagccccgccctcttcctgacgaaactggccccggatcagagcaggacctcccttccgaccctctgggaacctcccagaggtccagcccatctcggagcatcccggaggaaatctgcagagggttaggagtgggtgacaagagcctgatctcttcctgttttgtacatagatttatttttcagttccaagaaagatgaatacattcctcgtgccgaaatcgccacccaggcctcgctacctt

SEQ ID NO: 72775 - DNA, 728 bp, Homo Sapiens
cagtggggtctaatccccctctgtccccagaggggctgtgcttggctggcacacctgcttgcgggtggtgatgacctgccggatggcactgacgaagccgctctggtcgtaggggatgaggcccatgaagatcttcttcttggacgagtacaggagcatgagcacgcgcacctcacagggggagatgtgggggaacagcatgcagcccgcctgcgggggccgcgggtcaggaccctgtggtcactgcccggggccactgtgcccccaccaccctggaccgccccacctgtaggggatgaagggagatcatcggtggacagaggcccccacagtcaaggccatggccataggtgaggggcctctgagagcccgtgcagcgcccatcggcatcccccgaccctgccatggctgaggtcagagtggcacccggcacccaggctgcggtgagaatgccaagaaggcactacctcccacccacatcaccccctgccgccagccctcctgactgcctgatggggtgacttggcctgggggttaagagcacaggcagcgccccaccgttctgctgcctcctagctgtgtgacctaacaccagccacctcctgcttctgggcctccatcatctgtaaaaccgggtaatagtgcacacagttggtgccacataaaggctcaacagataaagtgctggtgcctcttgaggatggcgcatgggagaactaagcctgaca

SEQ ID NO: 72776 - DNA, 1486 bp, Homo Sapiens
  misc_feature (1404)..(1418): n is a, c, g, or t
tctcactaccgctagtacgaggcccggtgttaatcggccgaggcccctcggacgcgcttggtacgcgccgggctcccccgctcgcctcagtggttcggccgcggcgaccccactccggcggcgcgtcccccgagcttggaaggtgctcgggtcttcggggcactgggtcccatcggtccctcctcacctgggctcaccctcgggggtctggccgtgagcgagcaccggctcagcaacaagctgctggcttggagcggcgtcctcgagtggcaggagaagcgcagaccctactctgactccactgcaaagctgaagcggaccctgccctgccaagcctacgtgaaccaaggcgagaacctggagaccgaccagtggccgcagaagctgatcatgcagctgatccctcagcagctgctgaccaccctgggccccctgttccggaactcccagttggcacagttccacttcaccaacagagactgcgactcgctcaaggggctctgccgcatcatgggcaacggcttcgcgggctgcatgctgttcccccacatctccccctgtgaggtgcgcgtgctcatgctcctgtactcgtccaagaagaagatcttcatgggcctcatcccctacgaccagagcggcttcgtcagtgccatccggcaggtcatcaccacccgcaagcaggcagtgggacctggtggtgtcaactcaggcccagtccagatcgtcaacaacaagtttctggcatggagtggtgtcatggagtggcaggagcccaggcctgagcccaacagtcggtccaagaggtggctgccatcccacgtctacgtgaaccagggggagatcctgaggaccgagcagtggccaaggaagctgtacatgcagctcatcccgcagcagctgctgaccaccctagtgccgctgttccggaactcgcgcctggtccagttccacttcaccaaggacctggagacactgaagagcctgtgccggatcatggacaatggcttcgccggctgcgtgcacttttcctacaaagcatcgtgtgagatccgcgtgcttatgctcctgtactcttcagagaagaaaatcttcattggcctcatcccccatgaccagggcaactttgtcaacggcatccggcgtgtcattgccaaccagcagcaggtcctgcagcggaacctggagcaggagcaacagcaacgagggatgggggggtagtggttaccccgggctgggcccctccaggagtcacagatgaggcccccgcagagactggtgacacgcttctgagcaggggcccctggggacttcaactgcccagcaacatggaggatggtgtcctgaggcctccaaggacggtccccacccctctacgtttccccaataaagccttttaaaaacctnnnnnnnnnnnnnnngggcgccgctcgcgatctagaactagtccggacgcgtgggtcgacgatatcccgagaattccggaccg

SEQ ID NO: 72777 - DNA, 681 bp, Homo Sapiens
ccaggcctgagcccaacaatcggtccaagaggtggctgccatccccacgtctacgtgaaacacggggagatcctgaggaccgagcagtggccaaggaagctgtacatgcagctcatcccgcagcagctgctgaccaccctagtgccgctgttccggaactcgcgcctggtccagttccacttcaccaaggacctggagacactgaagagcctgtgccggatcatggacaatggcttcgccggctgcgtgcacttttcctacaaagcatcgtgtgagatccgcgtgcttatgctcctgtactcttcagagaagaaaatcttcattggcctcatcccccatgaccagggcaactttgtcaacggcatccggcgtgtcattgccaaccagcagcaggtcctgcagcggaacctggagcaggagcaacagcaacgagggatgggggggtagtggttaccccgggctgggcccctccaggagtcacagatgaggcccccgcagagactgtgcttgggagcctgtggccagcagcccccactgcacccctgcccccaggtgacacgcttctgagcaggggcccctggggacttcaactgcccagcaacatggaggatggtgtcctgaggcctccaaggacggtccccacccctctacgtttccccaataaagccttttaaaaccctt

SEQ ID NO: 72778 - DNA, 1243 bp, Homo Sapiens
atacgcaggtacgaggcctgggttttaaatcggcacgagggcggggacccactccggccgcgcgtccccgagcttggtacggctcagccagtctcccccgaagccgcgcgcccgcgcccgcgcccctcagtcggtggagcccgcagccccccttgtggcccgcggcagctccccgcccgctcggcccgcgcccgccatggtccgtccgcgccgtgccccgtaccgctccggcgccgggggccccctcgggggtcgcggccgccctccgcggcccctcgtggtgcgcgccgtccgctcgcgctcctggcctgccagcccccgaggcccgcagcctccgcggatccgggcccgctcggcccctcccatggaaggtgctcgggtcttcggggcactgggtcccatcggtccctcctcacctgggctcaccctcgggggtctggccgtgagcgagcaccggctcagcaacaagctgctggcttggagcggcgtcctcgagtggcaggagaagcgcagaccctactctgactccactgcaaagctgaagcggaccctgccctgccaagcctacgtgaaccaaggcgagaacctggagaccgaccagtggccgcagaagctgatcatgcagctgatccctcagcagctgctgaccaccctgggccccctgttccggaactcccagttggcacagttccacttcaccaacagagactgcgactcgctcaaggggctctgccgcatcatgggcaacggcttcgcgggctgcatgctgttcccccacatctccccctgtgaggtgcgcgtgctcatgctcctgtactcgtccaagaagagatcttcaatgggctcatcccttagaacagaacggctccgcagtgccacccggcaggtcataccaaccggaagacggcacgtgggaccgggaggtgcacaaccaggcccagcccagactggcaacccacacggttctgggccatggacagcgtgcacagcaccgtgcacaaaccccagggccgcagaccaaacagaggccaacagagagtgggcacacaccagcaaccaaccaccggcgcaacactaggacacagacggcaacagaacagaaggtcactacctgacaaaggcacccactcggtcgaagcagcagacaacctacagacgaacaccacccgacactagcagacgcgaccacaacaggacacagatgacaaacgcgcaaccagtcgacgcgaggcagcaagcacga

SEQ ID NO: 72779 - DNA, 1006 bp, Homo Sapiens
aaggctaggtgagaggcctgcggtgaaatcggcgaggaggccgcagctccgcggatcgggcccgctcggccctcccatggaaggtgctcgggtcttcggggcactgggtcccatcggtccctcctcacctgggctcaccctcgggggtctggccgtgagcgagcaccggctcagcaacaagctgctggcttggagcggcgtcctcgagtggcaggagaagcgcagaccctactctgactccactgcaaagctgaagcggaccctgccctgccaagcctacgtgaaccaaggcgagaacctggagaccgaccagtggccgcagaagctgatcatgcagctgatccctcagcagctgctgaccaccctgggccccctgttccggaactcccagttggcacagttccacttcaccaacagagactgcgactcgctcaaggggctctgccgcatcatgggcaacggcttcgcgggctgcatgctgttcccccacatctccccctgtgaggtgcgcgtgctcatgctcctgtactcgtccaagaagaagatcttcatgggcctcatcccctacgaccagagcggcttcgtcagtgccatccggcaggtcatcaccacccgcaagcaggcagtgggacctggtggtgtcaactcaggcccagtccagatcgtcaacaacaagtttctggcatggagtggtgtcatggagtggcaggagcccaggcctgagcccaacagtcggtccaagaggtggctgcatcccacgtctacgtgaacagggggagatcctgaggaccgaggcagtgggcaaggaaggctgtacatgcagtcatccgcagaggtggtgaccacctaatgccgtgttccggaactcgcgctggtccggttcacttcacagcctggaaacatgaaaacctgtgcggacttggaatggtcgcggggtgcattctacaacatgggaaacggggttgcccgacttaaaaattttggctcccctcagggtttaggcggg

SEQ ID NO: 72780 - DNA, 660 bp, Homo Sapiens
tcctacctcgccaagtggtatgaaattaagtgaccaaatgaagtgcactcttttcttttggaattagattcatgactttctgtataaaattcaaatgcagaatgcctcaatctttgggagagtttcagtactggcatagaatttaaatgtcaaaattctttctgaaaccctttctcctagaaactaggaaataataggtgtagaagactctccctaagggtagccaggaagaagtctcctgattcggacaaccatgaggggtagtggtgctagggagaaggcaaccttcactggttttgaactcagtgcctaagaaagtctctgaaatgttcgtttttaggcaatataggatgtcttaggccctaattcaccatttcttttttaagatctgatatgctatcattgccttaataatggaacaaaatagaagcatatctaacactttttaaattgataattttgtaaaattgattacgttgaatgctttttaagagaagtgtgtaaagtttttatattttcacaattaacgtatgtaaaaccttgtatcagaaatttatcatgtttactgtttaaaatgattgtatttataaaattgtcaatatcttaatgtatttaatgtagaatattgctttttaaaataatgtttttattttgctgtag

SEQ ID NO: 72781 - DNA, 1102 bp, Homo Sapiens
  misc_feature (1041)..(1061): n is a, c, g, or t
tcttttgaaagtttgttctgcaaagacttctaggaggatgctgtgcctcccaagctcaaagcaacctctgtcctggctgtgcacattctcccttgattccacttgtgtggagggattgaacacaggcaaagaggtgctgctttgcttcttcaatggcaccttcattctccgttgtcattgacttcaagatgcctcttctacctcttccaggaagcacaggccagggaatctgggtgtgtgagtgggaggagagggcagaggtcccctgaggtcatgcattgtaatcatcatagaaggagagcccaggcctgccctcacgctctccatcataggctgacaccaagaagactcgtcttggcacaatctcacacagctggggctgtagcaaccctttccaacccctttgctggttgctgggcctcattctagcaccttgttcttagagcagattctagcacatcatggcagtgggaccaagcgtggtcccgaggaagggccagagcctggtagagactagggaagggaggtctcctctagactgactcacattgccttgagcttttcagttaagttgctgtaagcacctgggctgaggaggcagtttttgttccttcctgcgttatagcggggccttgtctcttcctctgcaggacacagatctggaggacgtggactggggtaggaaaccaccctgagggtgttagtacctagtggtgaaatggatgaggtcatttctaaggtgtgttgcccgtggatctgggcacaatcattggaattccttggagccactgggattcatggctttgtatccaactgcatccaggcctgaggctgctgacgtttgacaccagggccagtagagagtgcccttttgtatcttaagccaagaagtgaggcctggggctccgggaggggggaaggggtgggagccaatactgagtgcctgcagcatctactactctgtcttcactattcagaacttgtaactaaagtatttaaagaaactgattttaaatgcaaattaaagggcagatattctcnnnnnnnnnnnnnnnnnnnnncctgagcaggcggccgcaagcttattccctttaggtgaggg

SEQ ID NO: 72782 - DNA, 924 bp, Homo Sapiens
  misc_feature (243)..(337): n is a, c, g, or t
  misc_feature (826)..(852): n is a, c, g, or t
cattttgttcagttgctcatccacgctggattccagagagttttccaatttgggaagccatgagaaaggtttttaaatcttgggaagatggagagagggacataggatagttgactccaacatgacaggaagaggctggagattgggaattggccatcaaccaagcctgtagtagtaaagccatggtcccgcattggaattacttggggaacttatacagttctgatacccaggctctcctannnnnnnnnnnnnnnnnnnnnnnnnnnnnnnnnnnnnnnnnnnnnnnnnnnnnnnnnnnnnnnnnnnnnnnnnnnnnnnnnnnnnnnnnnnnnnnccatgctttttggatgtcaaggcgctgttggaggctgggtgtgacagcacagagccaggttgtcttgtggaaaccacagccacgggtttgccactggctcagcatggcctcactgccagtcccagcctggctgagggacaagatggtttctcttgggagttcctgagtggagcacccttccaggctttttgaaagccagctgatctgtggagccttgttaagggactcaatacggtgtttggatattgatgtttttccttgagactgtcttgtccatcaataaagatggaggatgtctcctctttgaaccccgcttccccaccagtactctctctcccttagagtttatgagttattcaaggaggagacttcttaaagacagcaacgcaattcttgtaacttgtgtaaatagccccatctttcagagtgataccatttctacatttgataatgcctgtattcctgtaggatgtatatagtttaggggannnnnnnnnnnnnnnnnnnnnnnnnnnagaagtcaatatgtctggttttatttattgcttgaaaaagatcatttgaaaaaaataaatacattttcaccc

SEQ ID NO: 72783 - DNA, 1192 bp, Homo Sapiens
  misc_feature (1069)..(1079): n is a, c, g, or t
attacacgccactgaagtgttggcttttatttgaatgtcaatgtgtaaagtggcgtacaggcaatttaaaataacatacatgatactgacatatttatacttagaacttatgcaatatatttacagacaaaaatacaggacaatgttttacaaaatctttcactaattacatgtttacaacattttcagaaataaaacgaaatttgctgtaaaccatctcaactgcactgtgtatatagaaaggcttctaaatatccatgttttcatttctataaccatttaagcgcttagtttttacgaattcatcaaactcattcgcatagtcacacatcattagtcactgctgagctgtagtaaagtaagagaaatcgcaaactccttgattagctgtattttaaaaagctcttcagaaaagtgatctactactatgctctgcgttctagcagaatacaaaggcccctctttccatgggtcgtttccagacctggctattacaagagaacactggagtgctaaacacagattatgagtctgaaatactgggaaactgctgacagaaaatctctgtacgtggcaagggctctgctgggggtggctctcaacccgacactgtcagtgatgggaagggctctgctagggggggctctcagccccagacactgtcagtgatgggaagggctctgctagggggctctaagcccacaacactgtcagtgatgggaagggctctgctggggggctctcagccgccaacactgttcagtgatgggaagggctctgctggggggctctcagcccccaacactgtcagtgatgggaagggctctgctggggggctctcagccgccaacactgttcagtgatgggaagggctctgctgggggagctctcagctgccgacacactgtcagtgatgggaagggctctgctggggggctctcaacccccaacactgtcagtgatgggaagggctctgcttcaggtcaggggagctgtgacaaggtcatcttcatcttacactggagtcaagcaaagctaaatgttaaaccgaattgtgctttccaatttnnnnnnnnnnnggtacatacaaaatactgaatacaaaaattctcccaacaaaagcatcatgatttgtttttgcatcttgacataaaaaagaaattcataccttcctacctctgcagagggtttg

SEQ ID NO: 72784 - DNA, 635 bp, Homo Sapiens
caccccccagggccatccaaaaccaaggttggttatagcagtcacattttaaagctgcccctgggtcacacaaagaccccctccattagtaaatgcctggaaagattttgtgagctatatgaaagctttcaaaatccaaagaggagaaaaaatcaaagtggaacaatgtttcgacctggacagaaagtaactttagcataaaatatacttctttttgatttggttctgttaagttttttgatggcttttccatatgttgtaacaggaaaaaaatggtgtctatgaatttcttcttaatttaacaaatttggttaatttataaaatcacagattggtaaatgctataattatgtaatgatcaggattgagattaatactgtagtataaattgggacattataacagattccatattttatttcctaaaatctaaattcagtctttaatgaaataatattagccaaatggtggaactaatttatttcttttgaggaaaagataataaagaatgtaattaaatttaaatttcttggaattcccagttgtatattcatcacctttgtagcatttgacaaattttatgcttagcagcttcttcactgttttgaaataaaatatcctattacctactaaaa

SEQ ID NO: 72785 - DNA, 747 bp, Homo Sapiens
  misc_feature (61)..(61): n is a, c, g, or t
acatcgaggagtttctacagcagtataatcactacaaatccaatgtggagattttcaaatngcaaccaaataaacccagcaaagaactagcagagctggtgatgtttatggcacagattagtcactgctacccagagtacctaagtaattttcctcaagaggtgaaagatcttctctcctgcaatcataccgtattggatccagatctgcgaatgacattttgcaaagctttgatcttgctgagaaataagaatctcatcaatccatcaagcctgctagaactcttctttgaactttttcgttgccatgataaacttctgcgaaagactttatacacacatattgtgactgatatcaagaatataaatgcaaaacacaagaacaataaagtgaatgtagtattgcaaaatttcatgtacaccatgttaagagatagcaatgcaaccgcagccaagatgtctttagatgtaatgattgaactctacagaaggaacatctggaatgatgcaaaaactgtcaatgttatcacaactgcatgtttctctaaggtcaccaagatattagttgccgctttgacattctttcttgggaaagatgaagatgaaaaacaggacagtgactccgaatctgaggatgatggaccaacagcaagagacctgctagtacaatatgctacagggaagaaaagttccaaaaacaagaaaaagttggaaaaggcaatgaaagtgctcaagaaggagcggccgc

SEQ ID NO: 72786 - DNA, 792 bp, Homo Sapiens; identical to SEQ ID NO: 14924

SEQ ID NO: 72787 - DNA, 1417 bp, Homo Sapiens
agagatgaagtcgacggcgcgccgattcggcacgagggtctcttcccattagtgttcacactcagacatttttgcccagctctaaggtaacttcatctatagctgctcagactgatgcatttatggacacctgtttccagtcaggtggggtctccagagaaactcaaaccagtgggatagaaagtccaacggatgaccatgtacagatggaccaagctggaatgtgcggagacatttttgagagtgttcattcatcatataatgttgctacaggtaacattataagcaacagtttagtagcagagacagtaactcatagtttgttacctcagaatgagcctaagactttaaatcaagatattgagaaatctgcaccaattataaatttcagtgcacagaatagtatgcttccttcacagaacatgacagataatcagacccaaaccatagatttattaagtgatttggaaaacatcttgtcaagtaatctgcctgcccagacattggatcatcgtagtcttttgtctgacacaaatcctggacctgacacccagctcccatctggcccagcccagaaccccggaatcgattttgatatcgaagagttcttttcggcctcaaatatccagactcaaactgaagagagtgaacttagcaccatgaccaccgagccagtcttggagtcactggacatagagactcaaacggacttcttactcgcagatacctctgctcagtcctatgggtgtaggggaaattctaacttcttaggccttgagatgtttgacacacagacacagacagacttaaactttttcttagacagtagccctcatctgcctctgggaagtattctgaaacactccagcttttccgtgagtactgattcatctgacacagagacccaaactgaaggagtctccactgctaaaaatatacctgctctagaaagcaaagttcagttgaacagtacagaaacacagaccatgagttctgggtttgaaaccctggggagcttgttcttcaccagcaacgaaactcagacagcaatggatgactttcttctggctgatctggcctggaacacgatggagtctcagttcagctctgtagaaacccagacttctgcggaaccacacacagtctccaacttctaaaactaacggtggagtccatgtgtgaaatggcatctaccatttcctctggattaaaactacggactggggacaacagtattaattcgattgaatgtggctgatgatgcagttgcttagcttctttgtgtttctttgccttttgtacttgtaaacagaaatttgcgtataaatgtgagtgtattataaagtttgagatgttgatctaaattgtttttgtgttgcctacatttgccttttcacagctagtcttttcatgttaa

SEQ ID NO: 72788 - DNA, 1785 bp, Homo Sapiens
ccggtccggaattcccgcgataggggaagaggctgactgtacgttccttctactctggcaccactctccaggctgccatggggcccagcacccctctcctcatcttgttccttttgtcatggtcgggacccctccaaggacagcagcaccaccttgtggagtacatggaacgccgactagctgctttagaggaacggctggcccagtgccaggaccagagtagtcggcatgctgctgagctgcgggacttcaagaacaagatgctgccactgctggaggtggcagagaaggagcgggaggcactcagaactgaggccgacaccatctccgggagagtggatcgtctggagcgggaggtagactatctggagacccagaacccagctctgccctgtgtagagtttgatgagaaggtgactggaggccctgggaccaaaggcaagggaagaaggaatgagaagtacgatatggtgacagactgtggctacacaatctctcaagtgagatcaatgaagattctgaagcgatttggtggcccagctggtctatggaccaaggatccactggggcaaacagagaagatctacgtgttagatgggacacagaatgacacagcctttgtcttcccaaggctgcgtgacttcacccttgccatggctgcccggaaagcttcccgagtccgggtgcccttcccctgggtaggcacagggcagctggtatatggtggctttctttattttgctcggaggcctcctggaagacctggtggaggtggtgagatggagaacactttgcagctaatcaaattccacctggcaaaccgaacagtggtggacagctcagtattcccagcagaggggctgatccccccctacggcttgacagcagacacctacatcgacctggcagctgatgaggaaggtctttgggctgtctatgccacccgggaggatgacaggcacttgtgtctggccaagttagatccacagacactggacacagagcagcagtgggacacaccatgtcccagagagaatgctgaggctgcctttgtcatctgtgggaccctctatgtcgtctataacacccgtcctgccagtcgggcccgcatccagtgctcctttgatgccagcggcaccctgacccctgaacgggcagcactcccttattttccccgcagatatggtgcccatgccagcctccgctataacccccgagaacgccagctctatgcctgggatgatggctaccagattgtctataagctggagatgaggaagaaagaggaggaggtttgaggagctagccttgttttttgcatctttctcactcccatacatttatattatatccccactaaatttcttgttcctcattcttcaaatgtgggccagttgtggctcaaatcctctatatttttagccaatggcaatcaaattctttcagctcctttgtttcatacggaactccagatcctgagtaatccttttagagcccgaagagtcaaaaccctcaatgttccctcctgctctcctgccccatgtcaacaaatttcaggctaaggatgccccagacccagggctctaaccttgtatgcgggcaggcccagggagcaggcagcagtgttcttcccctcagagtgacttggggagggagaaataggaggagacgtccagctctgtcctctcttcctcactcctcccttcagtgtcctgaggaacaggactttctccacattgttttgtattgcaacattttgcattaaaaggaaaatccacaaaaaaa

SEQ ID NO: 72789 - DNA, 1732 bp, Homo Sapiens
  misc_feature (1210)..(1210): n is a, c, g, or t
  misc_feature (1215)..(1215): n is a, c, g, or t
  misc_feature (1313)..(1313): n is a, c, g, or t
  misc_feature (1407)..(1407): n is a, c, g, or t
  misc_feature (1455)..(1455): n is a, c, g, or t
  misc_feature (1562)..(1562): n is a, c, g, or t
  misc_feature (1678)..(1678): n is a, c, g, or t
  misc_feature (1706)..(1706): n is a, c, g, or t
gcattaggaagaagcccaaagagccacagcctgaggtggcggccgcggaggaggagaagctccacaagcctcctgcagactcgggggtggacttgcgggaggtggagcatttcctgaaggctgagcctgagaaaaacggggaggtggttcacaccccggaaacaagtgtctgagtggctgggcggggccggcaggcacagggaggaggtacagaagccggcaacgcttgctatttattttacaaactggactggctcaggcagggccacggctgggctccagctgccggcccagcggatcgtcgcccgatcagtgttttgagggggaaggtggcggggtgggaaccgtgtcattccagagtggatctgcggtgaagccaagccgcaaggttacaaggcatcctcaccaggggccccgcctgctgctcccaggtggcctgcggccactgctatgctcaaggacctggaaacccatgcttcgagacaacgtgactttaatgggagggtgggtgggccgcagacaggctggcagggcaggtgctgcgtggggccctctccagcccgtcctaccctgggctcacatggggcctgtgcccacccctcttgagtgtcttggggacagctctttccacccctggaagatggaaataaacctgcgtgtgggtggagtgttaggaccaaaacagcaacaccaacccagaaagcaacaggcccaaagaaaaacttctgaaaaaacacactcttgccgggccgcctcggccctcaaaaagctttcgaaaccattcgttcggcgcgcgggcccgcgccgaaagcgtccatggccatagcttgtttcctaggagaccccgcccccgactagcgtttggattcccccccataaacggacgcccaggggccacccgacgctgtttctaaaacaactccataactggagcccctgcacggcaatttcgccgcgcccccactcccggcggcggggcgcaaggccgcccccctcgatatatcaaccccggcacggcctcccgcgctatgtcccatttctgcccagcgaacgaacgggtgttgacacactccctgtccacacgcccctttatccgacgcctacctttcgggaacacgttcccctccccacacttatctgtggtccatgacggccggcaagccttctccacaatatcccaccctccggatcctgcccgtgtctccaccanccganaaacctgccttgggtgaatgtaccccacctctttggggggggtgcggtcagacgagcacttcgacgcaccctggacctcgtgcgcgctgaggagatanatccgcgggcggtcgcgtcccaccccaatatatatacgcccgtgcccccacactataccctgcggggacgcccctgtgccttggagagagaccncccatgagaacgcggttgggcgtgacaccgccttgcacgccgagagangcggatattcgcgccccatggtagccaaacaccgagcacaaccactccccctcttgtcgcggctcgtaccacatacccgtctcttacgcgcgccacaagcatgaggngctcacgcccatcttttttgtccacctccgtgatgaaaccccgcgcccactgactttattagcgccctacgcactacacataattgccgccagcctgatacccacaccgcgtcctnatagatcactcgtcgccctgtagcgcgnattccccccacccctcccgccatacg

SEQ ID NO: 72790 - DNA, 613 bp, Homo Sapiens
  misc_feature (217)..(217): n is a, c, g, or t
ccatgtcaccatcaaaacccactgatgaaggctggtgggagtctgagggctgcacccgggtatggtgagttcccctcagggattgtgctgagcgccttggcctggcttcttggctccgcccacctgctctccctgccaccaagttgtcttccccgggtggcatgtgccacttggctgcctcgtgcctgggcacagtggtgcctattatgggccctcncaggtggctctggtgctcagcctgctgtgagcaggaacagctgagtcccaggggttcttgcacacagcagggctcgggtttgaatccaggctctgctgcttggtcgctgcatgagcttctgctgtgctgacctctctggtttgtctcgtcatgtgtaaggtgacaccagatacctacctcttagggctgccccgagactaaaataagaccatgtgcatgaaccacttaccaaagtgcctgttgctctccaggtgtgcctaccgcatgttgccgctgctgtttctgctgggacgtctgactccagttccttctcccctctccagtgacaaggtcatttacaacttacatttacaatttatagtgtttaccagtattaaattctcagccactcctttc

SEQ ID NO: 72791 - DNA, 948 bp, Homo Sapiens
aaggagtggctgagaatttaatactggtaaacactataaattgtaaatgtaagttgtaaatgaccttgtcactggagaggggagaaggaactggagtcagacgtcccagcagaaacagcagcggcaacatgcggtaggcacacctaggtgcaggctgggctacagggacagccaagctgagcaaggacaggtccccgcagcctagactggggcaccgcttcgttctcggtctcactccccgctgtgccgtgctttgcctgtgagacggcggcgctgggccttgctggtacgaggggcccttgggggctttttggagtcctgggcccgtcggggatgtttcctcttgacctttttgcggctgtgtgcatgtagtgatgctgtgagggaggagatccgctgagagagcagggggtctctggacttcctgggcaaggctttggttggtttctccgtggatgacgcctcctcctcagacctgtctccagcccctccctcaggtggggtcagcccgagcagccgggcccccgagaggtccaggtcactgatggtggtcacggtgactgtgtggttggggtggtcatactgcaccgactccgtctttgctgtcaccaaccggtccagctcatctgcctcctccagagcctcttctctctctgccagcatcttcaagtattcctggtggcgctcctcccgaagcttcctctgctcctctttcagccgctgcttaatctcctcaatggctgccttctttcgctcgaccttccgcttgtggaagcctgtcaggtactcccgcctcttctcctcgtcgaagctaagaacgagcctcggccgccggtcgtcaccatctcgcttcttcttcttgttgcggcccatagcagtgaggccgccggcttcctctccctcgtgccgaattcgccacccaggcctcgctacctaggaccgtatatt

SEQ ID NO: 72792 - DNA, 878 bp, Homo Sapiens
ggggagagaggtttccgctgtaggagcagagcttccgggctgcgctcttcgttgcccagtttccgctcagtggtcgcgtctccgccccccacccaccagtcccgctgcattctcggccgggctctaggcgccatggctccccgcgggaggaagcgtaaggctgaggccgcggtggtcgccgtagccgagaagcgagagaagctggcgaacggcggggagggaatggaggaggcgaccgttgttatcgagcattgcactagctgacgcgtctatgggcgcaacgccgcggccctgagccaggcgctgcgcctggaggccccagagcttccagtaaaggtgaacccgacgaagccccggaggggcagcttcgaggtgacgctgctgcgcccggacggcagcagtgcggagctctggactgggattaagaaggggcccccacgcaaactcaaattccctgagcctcaagaggtggtggaagagttgaagaagtacctgtcgtagggagatttgggtagaagccctcatgctgagctttgtgtccctggtgatgttggaacattaatgatggaacatggccaaacttcagtcatgatcctgaagccatggtttcttccctgccagaaatgaaggttcagttatgaggcaaccctctagtaaggcattgtaaaagttactggatttggtttaataaaagttgaaataaagtagaaacaaagaaaaagaaaattcgaaaatagttctctggaggggaaggaagcttttgagccaaggggcgcgcttccctgttttgtgtgcttcggcgaaggtaaaacgggccggccggaaagggggggaaaacattgcggcaaattacggtccgggcagggagggggtaactc

SEQ ID NO: 72793 - DNA, 1010 bp, Homo Sapiens
  misc_feature (169)..(169): n is a, c, g, or t
  misc_feature (184)..(184): n is a, c, g, or t
  misc_feature (224)..(224): n is a, c, g, or t
  misc_feature (282)..(282): n is a, c, g, or t
cccctccccgtgtccaccagtggcagggcgacttgtggacaggcagctgtcggtctggtctgttcatgatctgttcatatcttgggatgctttgtgttgcaacatattaccatagctcctgtcgttatttgggagttggtccagttgtcatgcatcctggatcattgtnttttggtgcgcactntgatattattattcatgtgtatactaaaatggtatttacntaccaatactgatatgcaggactggaacataactgcctgatcctgtgtgcagatcttnccatactgccacgaatctaagactagggggggaaaaccttctccgtttcatcttccagtcagatcaccaattatataatgattcccttaactcacagtaagaaagaataaaaccacatttaagggacattacttggatttgcagtaacagtgtttatcatctatctgtcagtcagtcaggagcccctgggaaggaaccagcatgtaacatgtttttatcatcttatatggcaaaagcgactttgcagataaggatgctgggatgaggcagaacatcctagatgatccaggtgggccttaaatgtaatcacaggtagtatccttttaagagagagacaaaagatttgactacaggagaaggcaatgtgatgatggaagcagaaactggagttatgtgctctgaggatggaggaaggagccacgagccttcccacacctagaagctgaaaagagcaaggaaatgaactgatcctccctgctctgagagcctctgtaatgaatgcagccctgtggacccattttagactttaagcatccagaactttcgaatagatttctgtttttttaagagccactaagtttgtggcaatctgttaaaccagctgttacctaagcccttgatcctatgtagtgcgcttcccaaaatgtacaccaccacctttagtagaattgggaagttttagcacatacccatggagggaatcaggaataaaggcagactggtctccc

SEQ ID NO: 72794 - DNA, 618 bp, Homo Sapiens
  misc_feature (419)..(419): n is a, c, g, or t
taactattcagatgatggacaagcttctttcataaaagattacaaagaaggcatccgaatcactgtctgtgatactgggtcacatattaatcactgcagctaattgtaaatctttctatgaaacactgaaaagcctctttgtgaattaatacagttctgcttgatgcacttgatttgaaaagacatttctctgtatgtggcgcatgtcggctttgctttgaaaaataacaaagttagcagaatatgttcaatatattttcttggggaatagggtttttattacatgattcattaaggatttgccttaccctgacatttgtgatataaaggaaaatcagaaaaaaagtaattttcttgatcaagatatgtttttacttaatgcaaataaatgtagtctgttgcttgcaaggaaaaaaaantggcttctgatatctggtataaactgctaaataggataatacgtgcctcttttgttaaaccggcatttaaatgctggactgcttctaaatctgtttgtttcttttcatctgtgccatacactaaaaaacaactgttgccttcatactatatttgttagagcagaatacaaataaaatttgagaggataatgtgaaaaaa

SEQ ID NO: 72795 - DNA, 1100 bp, Homo Sapiens
  misc_feature (19)..(19): n is a, c, g, or t
  misc_feature (46)..(46): n is a, c, g, or t
  misc_feature (51)..(51): n is a, c, g, or t
  misc_feature (56)..(56): n is a, c, g, or t
  misc_feature (59)..(59): n is a, c, g, or t
  misc_feature (63)..(63): n is a, c, g, or t
  misc_feature (89)..(89): n is a, c, g, or t
  misc_feature (100)..(100): n is a, c, g, or t
  misc_feature (103)..(103): n is a, c, g, or t
  misc_feature (111)..(112): n is a, c, g, or t
  misc_feature (129)..(129): n is a, c, g, or t
  misc_feature (138)..(139): n is a, c, g, or t
  misc_feature (145)..(147): n is a, c, g, or t
  misc_feature (152)..(153): n is a, c, g, or t
  misc_feature (183)..(183): n is a, c, g, or t
  misc_feature (201)..(201): n is a, c, g, or t
  misc_feature (211)..(211): n is a, c, g, or t
  misc_feature (220)..(220): n is a, c, g, or t
  misc_feature (936)..(946): n is a, c, g, or t
  misc_feature (1023)..(1041): n is a, c, g, or t
tctgctctatattcaaatnaataatgctcgacatccttcagaagtntaaantaaantantatntaatgctcatcaaatgtgctgtaacntgctatgcccnttntctatatnnccaactgagactgattntcagagatnntacttnnnatatnntaaatctagatcaaagtgaaacagatatgntaaatactgagtctagtntctcccatcntatggagcntcatggataaggaaactaatctagtgcaaatgaagattaatatttctgggtgatggagagatagtcaacaaatgtatttatccatcctctgcacatcagtccactggagcaggagttctacacattaaaaatgtaatgggatcagcctagcattgtttggtgttcttttgttgtattttttagaatgggggtgggggcctaagtgtccttatgaagctgtggtccacgacaggagcttgttgggggagtaccagggttctgctgctttcctgcatctgagcaacacaacagagatcatcagttttaaatagagtagccctcacaatcaaaatatcatagaatatattgtaaagttatgttgctaattttcctttgaaatataaaatattttaagctttttgtcaaaagtggtaacatcttaatacaaataaaaacctttttgtggttgtaagatttagcttataaatcattcaaattgaagtgaaagaattaccaggtcattgttaatgacttagtctattaagaatatatgtatttttgtaaaggaaaagcacttgtagatatttaatcagtacaagatatgtcttttgcagaaataaaatgctgcttagagattctccttaaatattttttatttttgcgctcaaatgtattttctgttgatctatggaatgttctgtacaaagctgtataattgtactgttgggctagatacnnnnnnnnnnnaatctggacttagccaagtatatttcaccatgttaaaatacagtatctttgttattaaaaattaaattgcataattnnnnnnnnnnnnnnnnnnncctgagcaggcggccgcaagcttattccctttagttgagggttaattttagcttggcac

SEQ ID NO: 72796 - DNA, 1308 bp, Homo Sapiens
  misc_feature (97)..(159): n is a, c, g, or t
ataataatttaatcaccaaacagtagggtcggcgtgggccccagggctgggtggcgaattcggcacgagggttcggcgaccatcgcgcggcggccannnnnnnnnnnnnnnnnnnnnnnnnnnnnnnnnnnnnnnnnnnnnnnnnnnnnnnnnnnnnnngctgcgggcccgcgccctacgaacgccgggtgcggtggctccgcgagatccagtccacgctccgcgagcggcggccggagcgcgcccggcagctgctgcgcctcctgcgccaggacctgggccttgagaggaccctccttcctgatatcctctacagagatgtggccttcctcaacccggtcgaccccatctcccatgacctgcttgtgaacctggcccgggacctgcagtgccccaagaaggactatgagctctggaagtcctcggacaagatctgccgacagctcatctaccacctcacccctcactcgaagcagcagcaagggtccagcctgcgccagaggaagacccagagctgcctcaagagcagcctccagaagactctgctggcaggggagactgtggacctctcaggcatcccgctgtcgacacaggacgtgcaacacatcacacgctacctgagcagccatggtgctgtgctggcggtgctggacctgagcttcacggggctgagtgatgagctgctgcacctcctgctgcccagcctgtgggcgctgccccgcctcacccagctcctgctcaacggcaaccgactgacgcgggccactgcccgcaagctcactgatgccatcaaggacaccaccaagttccctgctttggcttgggtggacctgggcaacaacgtggatgtggcttccctgccccagcccctgctggtcggcctgcgccggcggctgagccagcgcacctcactccccaccatctacgagggcctggaccttgagcctgagggcagtgcggccggggccaccacccctgcctccacctgggactccacagctgctgggctgggacccgagccccaggcctgctgtgccaggtgacccaccacccacctggctcattgctactgacttgtgatgctctcaagcacatgatagtgggcgatgaaggtcaaggaggactcacaggcccccagaaatccagtgtaaatgctcagcctgagattaaggggacagaagaatggactcataggtggccaggtggccagccctggctagaggctcagccttccctcagtgggaggggccccagcacccacagtgtggaccccgcaataaagagtgacacccgcctctgcttttctgc

SEQ ID NO: 72797 - DNA, 1064 bp, Homo Sapiens
  misc_feature (938)..(974): n is a, c, g, or t
ctctatcgtgatgctaacagaactggaggagagaggccaggagaagtgtgcccagtactggccatctgatggactggtgtcctatggagatattacagtggaactgaagaaggaggaggaatgtgagagctacaccgtccgagacctcctggtcaccaacaccagggagaataagagccggcagatccggcagttccacttccatggctggcctgaagtgggcatccccagtgacggaaagggcatgatcagcatcatcgccgccgtgcagaagcagcagcagcagtcagggaaccaccccatcaccgtgcactgcagcgccggggcaggaaggacggggaccttctgtgccctgagcaccgtcctggagcgtgtgaaagcagaggggattttggatgtcttccagactgtcaagagcctgcggctacagaggccacacatggtccagacactggaacagtatgagttctgctacaaggtggtgcaggagtatattgatgcattctcagattatgccaacttcaagtaagcggcaacaagggtccgtggaccaggaggattgcctttaatattttgtaatattctgttttgttaatataccccaaattgtgtatatatcttataactgttttagaaattggtacataggcttctattacctattaggtggaaattttatatgtaaatgtgttagcactgatagtcctttttccaatgttttattggggaattaaatagtgtgatgtttggattgatatcgtgaaatcctcagccgagaaattgggctggattgtgctttggttaatacatctttccctaaagaagataaacacaaaatccattccaggtagctcggcaccaactaagaaaaaaagcacaaagttctcagagctctcgaggaaagtggtcgtccccgtaccaccatgcactgtaaatannnnnnnnnnnnnnnnnnnnnnnnnnnnnnnnnnnnnaccactgatatcatggggagtaataggaccagagcggtatctctggcaccacactagggactatcaggtaataaaagctttgactccctg

SEQ ID NO: 72798 - DNA, 577 bp, Homo Sapiens
tatactgatgcattctcagcttatgcaacctcaagtaagcggcaacaaggtcccgtggaccaggaggatgcccttaatattttgtatcattctgttttgttaatataccccaaatggtgtatatatccaataaccgttatagaaaatgggaacaaaggctcctattaactattaggtggaaatttaatatgtaaatgtgttagcactgatagtcctctgtccaatgttctattgggaaattaaatagtgtgatgttgggattgatatcgtgaaatcctcagccgagaaattgggctggattgtgctctggttaatacatctttccctaaagaagataaacacaaaatccattccaggtagctcggcaccaactaagaaaaaaagcacaaagttctcagagctctcgaggaaagtggttgtccccgtaccaccatgcactgtaaatatccctcccctctctccctggtcccctcccccatccccaccactgatatcatggggagtaataggaccagagcggtatctctggcaccacactagggactatcaggtaataaaagctttgactccctgagac

SEQ ID NO: 72799 - DNA, 2560 bp, Homo Sapiens
  misc_feature (2462)..(2475): n is a, c, g, or t
ataaaacggtgttcaaaaagcaaggcggtacggtccggatatcccgggatatcgtcgaccacgcgtcggctttgtgcttgaaaaaaatcaaagcccctctgagtaaggtacggcttgtagatgcaggctttgtttggactgagcctcattctaagagacttaaagttaaactgactattcagaaagaggtgatgaatggtgctatccttcaacaagtgttgtggtggattatgttgttcagtcccaaatgtgtggagattgccatagagtagaagctaaggatttctggaaggctgtgattcaagtgaggcaaaagactttgcataaaaaaactttctactatctggaacagttaattctgaaatatggaatgcatcagaatacacttcgtatcaaagagattcatgatggtctggatttttattattcctcaaaacaacatgctcagaagatggtcgaatttcttcagtgtacagttccctgtagatacaaagcatcacaaagactgatctctcaagatatccatagtaacacatacaattacaaaagcactttttctgtggaaatggttccaatatgcaaggataatgttgtctgtctgtctccaaaactggcacaaagcctgggaaatatgaaccagatttgtgtgtgtattcgagtaaccagtgccattcacctcattgatccaaaaaccctacaagtggcagatattgatgggagcactttctggagtcaccctttcaatagtttatgtcatcccaaacagctagaggagtttattgtgatggaatgcagcatagtccaagatataaaacgtgctgcaggtgctggaatgatatcaaaaaagcataccctcggggaagtctgggtacagaagacatctgaaatgaatacagataaacagtatttttgtcgtactcatttgggacatcttctaaatcccggagacctggtgttagggtttgatttggccaactgtaacttaaatgatgagcatgtcaacaaaatgaactcagatagagttccagatgtggtattaatcaagaagagctatgaccggaccaaacgtcagcgtcgtagaaactggaaattgaaagagcttgcaagagagagagaaaacatggatacagatgatgaaaggcaataccaagattttcttgaagatcttgaagaagatgaggcaattcgaaaaaatgtcaacatttacagagattcagccatccctgtgggaaagtgacaccgatgatgaaggagcacctcgaattagtctggctgagatgcttgaagaccttcatatttcccaagatgccactggtgaagaaggtgcatcaatgctgacataatgagatgttgtagactgtttccatacatgggcttaagaagttggacagagttaccttaagtgtctctactatctttgcctccagatttcaagaggagaaatttagttttaaaccctgaataaacatgtttggttttcagtgctcactcaaaccactaaaacagatggatagctttgagggtttagataaagaaagattatggagaatgtagctggtatttgatttttggcaattttacatttggaaatttatcactgtgcctttttaatatgaggcactggtaatattttcacatagaatagtactccggatggaaaaagctcaaaaattgtgattccttgaacgttcactaaatcttcaagcaaaaacacatttttacattatttttacgttgattattttagtgaaagaccatatgaagaagcatttttaatattaacttgttacatactttgatccactttacatcatttttatgttgttgaggtagggaaattagggttcagtttatcactggacattcaggaggcaagtcaatcttttttatttccttataaaattaactcttcaaaagctgttaaacagagagttatcttaatttttattgcagtaggaggaaatatatttaaaatatttgtagatttatagcaaatagagactcgttatttaaaggttaaataacaatttgttcttttgttgtttttgccagtttagggcagtagctgcttttgtcataaatatcttcctaccacatcaaaaatgctgcttttaaaatttttgtttataaattgagaaggaattttctctctataagtttctgtcattgaacagatcaccattaaaaagaatattagaatccagcatgaagataatggctaataaaaatgaggtacatactttataaaaccattaatcagatttgaatgaggaatgcttcccacatccttgaaagaaaaactgtggcttacgttttgaagtattctgagaatgaagtattaagatccaatttctataagcaagatcagacttgttaagtatgccgcaagtaagagctaattcattcattccatgtgtgccactaaataaagagattgagcaagtgccactgtgtgggaacannnnnnnnnnnnnnataatggaacttttccatttttggaattatggataaagtccctaaattttctataatgggcttccttttctgggcgcctaatttg

SEQ ID NO: 72800 - DNA, 581 bp, Homo Sapiens
gcagagggcccccgtctttacttccagtcatgttctgtggaatgggcgcttctccgacttctacaagctccggtggctggaggccattctcagctggcagaaacagcaggaaggatgcttcggggagcctgatgctgaagatgaagaatcatctaaagctattcaatatcagcagcatttttcgaggagagtgaagaggcgagaaaaacaatttccagatggctgctcctcccacaacacagccacagcagtggcagccctgggtggcttcctatacatcctggcagaataccccccagcaaacagagagccacacccatccacaccgccaccaccaagcagccgctgagacggacggttccatgccagctgcctggaggaggaacagacccctttagtcctcatcccttagatcctggagggcacggatcacatcctgggaagaaggcatctggaggataagcaaagccaccccgacacccaatcttggaagccctgagtaggcagggccagggtaggtgggggccgggagggacccaggtgtgaacggatgaataaagttcaactgcaactgaaaaaaa

SEQ ID NO: 72801 - DNA, 430 bp, Homo Sapiens
ctgaaggccattttcagctggcagaaacagcaggaaggatgcttcggggagcctgatgctgaagatgaagaattatctaaagctattcaatatcagcagcatttttcgaggagagtgaagaggcgagaaaaacaatttccagaataccccccagcaaacagagagccacacccatccacaccgccaccaccaagcagccgctgagacggacggttccatgccagctgcctggaggaggaacagacccctttagtcctcatcccttagatcctggagggcacggatcacatcctgggaagaaggcatctggaggataagcaaagccaccccgacacccaatcttggaagccctgagtaggcagggccagggtaggtgggggccgggagggacccaggtgtgaacgcatgaataaagttcaactgcaactga

SEQ ID NO: 72802 - DNA, 342 bp, Homo Sapiens
gtagagactgggatcctttgaaaatccaacatgtgtaccaccacttacaggtttaagtttgtgctctgcaaactcatttgaggagtaatagatagagttaggcttgtagagatcagtttacctgtcaaatggatgggctttatgagaggagttataaatctagaaagaagaagtaaaagccaatacactgatctttgatcactcaaaccatttttcccaagggcagggactaaacaggggtttccagtcttttggcttccctggggcacattggaagaagaagaattgtcttgggccacacataaaataaactaacattaatgatagctgatgagctaaaaa

SEQ ID NO: 72803 - DNA, 464 bp, Homo Sapiens
  misc_feature (29)..(29): n is a, c, g, or t
  misc_feature (43)..(43): n is a, c, g, or t
gggtactcccttgtgctcatgcttacaanagccgttgcttgancccttggttcaattcagacccggaaagacttgcccccattttgcaagcaagcctgttcatcgggggtcctggggacggaagaccaaagaggaagaaactcaagggcaagaggagggtgatgaaggggagccaagggaccaccctgcctcagaaaggaccccacttttgggttctagccccactcttccctccctcttcccctgttatcctggtctaataaccccccacacattaccctctggtgacctatttgcacagaccgtcgtcttccctccagtcttctgagggataggggacattccatcccaagcttctcccttacccacacctatccttttgaggggctttggggtggggctggggcaagcagagggactgggtcttcacttcttgggctaataaaattgtttctttgtggact

SEQ ID NO: 72804 - DNA, 485 bp, Homo Sapiens
  misc_feature (452)..(452): n is a, c, g, or t
gcttgtccttacttagccctaaattcttccatgttctgccctgaccttatcctgcctacctgtcttatctcttccactggctttgtaggtgaggggaaatttttgcaaggctttaaaagccttagccctgggtcattgtggctcagtgaaggactagattattttctttctgtcccaggagaccagtatgatgtctgtgccatttgcctggatgaatatgaggatggggacaagctgcgggtactcccctgtgctcatgcctaccacagccgctgcgtggacccctggctcactcagacccggaagacctgccccatttgcaagcacgcctgttcatcggggtcctggggacgaagaccaaagaggaaagaaactcaagggcaagaggagggtgatgaaggggaaccaagggaccaccctggccttcagaaaggaccccatttttggggtcngtgaccagcagtgagggcccttccccgtaatcc

SEQ ID NO: 72805 - DNA, 638 bp, Homo Sapiens
  misc_feature (46)..(46): n is a, c, g, or t
  misc_feature (301)..(301): n is a, c, g, or t
  misc_feature (428)..(428): n is a, c, g, or t
  misc_feature (512)..(512): n is a, c, g, or t
tattccacaccatgttcagaagttcattggaattcacattgtgtantacagcggcaccatatccagccttctgggcatttaggaccttgaggtcaaagttgcagtcgaatcttcgaagcagcgcaataaagactgacccattgaccggggctgggggtggtggggcaatggggctgcaggcattgtctgggtgagcctccacaaggaacccctggaggccctcctggctcaaggtagccccaaacagagctggaaggtctgcaaagtccatgctggcattgtggtccgaggtcgctcgaantgaacccccgggtcggggccgctccccacagcacagcggccaaagaccaacaaggaagcgggaaggctgcagggtgcatggcagcggaaggaaagaggctgaggaggccgcgcgtcctctcctcccntctggcctccgccgctccttcaaatctcgcgagagtgctcaccacctctcccgtcccctcgcagctgaatagttgctgtgtctnatcgcgagagcgctccaacttggcgagccgtactcactcgatctcgcgagaccttcaaacaaactcttctctattttcccgcgattctaattcggtgaaaacagcgcctttccctcgttccgaatt

SEQ ID NO: 72806 - DNA, 1820 bp, Homo Sapiens
aatttccgggatcgtttattaggtcgtcttcttgcccaccagtgccccttccatctccacaggcagtccctccatcgctaacctttttttaaccggccttttaggaccggaagtccttcatctcaagcatccaatgctgaaagcggcctgattttctctaccggaagcccttttccagaggctgggaacacggcccacctagcaggaagtcccacctccttgagctccgccacccttcccgaagtttttctgtcacctgtgttaggctccgtcccctttccgcgttttatccccgtaccagaaaaggatacatttagtgcctcccacccagctccactaaacgggttggatatctcattctttgagttggtgttccttccccggcgcccccatgtagctgggaagtgggacctgggggtggttggacccctgggatcctaaaggaggggcagggagggcgcagaactccgcttctgctccttgctaccaggacgcgcggcctcctcagcctctttcctcccgctgccatgcaccctgcagccttcccgcttcctgtggttgtggccgctgtgctgtggggagcggccccgacccgggggctcattcgagcgacctcggaccacaatgccagcatggactttgcagaccttccagctctgtttggggctaccttgagccaggagggcctccaggggttccttgtggaggctcacccagacaatgcctgcagccccattgccccaccacccccagccccggtcaatgggtcagtctttattgcgctgcttcgaagattcgactgcaactttgacctcaaggtcctaaatgcccagaaggctggatatggtgccgctgtagtacacaatgtgaattccaatgaacttctgaacatggtgtggaatagtgaggaaatccagcagcagatctggatcccgtctgtatttattggggagagaagctccgagtacctgcgtgccctctttgtctacgagaagggggctcgggtgcttctggttccagacaataccttccccttgggctattacctcatccctttcacaggggattgtgggactgctggttttggccatgggagcagtaatgatagctcgttgtatccagcaccggaaacggctccagcggaatcgacttaccaaagagcaactgaaacagattcctacacatgactatcagaagggagaccagtatgatgtctgtgccatttgcctggatgaatatgaggatggggacaagctgcgggtactcccctgtgctcatgcctaccacagccgctgcgtggacccctggctcactcagacccggaagacctgccccatttgcaagcagcctgttcatcggggtcctggggacgaagaccaagaggaagaaactcaagggcaagaggagggtgatgaaggggagccaagggaccaccctgcctcagaaaggaccccacttttgggttctagccccactcttcccacctcctttggttccttagccccagctccccttgtttttcctgggccttcaacagatcccccactgtcccctccctcttcccctgttatcctggtctaataaccccccacacatacacctctggtgacctatttgcacagaccgtcgtcttccctccagtcttctgagggataggggacattccatcccaagcttctcccttacccacacctatccttttgaggggctttggggtggggctggggcaagcagagggactgggtcttcacttcttgggctaataaaattgtttctttgtggactacccccaaacataaatctattaaaaacccccttgt

SEQ ID NO: 72807 - DNA, 1490 bp, Homo Sapiens
caaggcaaggggggttggtggtagggcaagagccccccgggggaggtccccggcaggtttggttccccatccttcaatattccatcccaggcaaaatggcaacaaaacatccatagcgggtctccccttttgaatagtacaagggataggaattctgtttcagttggttcttgggtaaagtggattcccgctgggaggcgttttcgggttgcgggattacaacgaggtaatcatttagtgctccccaagggccaaaacccagcagttcccacaatcccctgtgaaaagggatgaggtaatagcccaaggggaaaggtattttctggaaccagaagcacccgagcccccttctcgtagacaaagagggcacgcaggtactcggagcttctctccccaataaatacagacgggatccagatctgctgctggatttcctcactattccacaccatgttcagaagttcattggaattcacattgtgtactacagcggcaccatatccagccttctgggcatttaggaccttgaggtcaaagttgcagtcgaatcttcgaagcagcgcaataaagactgacccattgaccggggctgggggtggtggggcaatggggctgcaggcattgtctgggtgagcctccacaaggaacccctggaggccctcctggctcaaggtagccccaaacagagctggaaggtctgcaaagtccatgctggcattgtggtccgaggtcgctcgaatgagcccccgggtcggggccgctccccacagcacagcggccacaaccacaggaagcgggaaggctgcagggtgcatggcagcgggaggaaagaggctgaggaggccgcgcgtcctggtagcaaggagcagaagcggagttctgcgccctccctgcccctcctttaggatcccaggggtccaaccacccccaggtcccacttcccagctacatgggggcgccggggaaggaacaccaactcaaagaatgagatatccaacccgtttagtggagctgggtgggaggcactaaatgtatccttttctggtacggggataaaacgcggaaaggggacggagcctaacacaggtgacagaaaaacttcgggaagggtggcggagctcaaggaggtgggacttcctgctaggtgggccgtgttcccagcctctggaaaagggcttccggtagagaaaatcaggccgctttcagcattggatgcttgagatgaaggacttccggtcctctcctccctctggcctccgccgctccttcaaatctcgcgagagtgctcaccacctctcccgtcccctcgcagctgaatagttgctgtgtctatcgcgagagcgctccaacttggcgagccgtactcactcgatctcgcgagaccttcaaacaaactcttctctattttcccgcgattctaattcggtgaaaacagcgcctttcctctggtttccaaatcagttacatcccgggaattccggaccggtcca

SEQ ID NO: 72808 - DNA, 962 bp, Homo Sapiens
  misc_feature (55)..(55): n is a, c, g, or t
  misc_feature (661)..(770): n is a, c, g, or t
  misc_feature (818)..(860): n is a, c, g, or t
gtgcggtctcctactaccatttccaccgtatggaaaaggcgcaccctgagcctgngacctgggacagcttcctggaaaagttcatggctggagaaggtgggcttgactggaggaaggagggtgtgaagccgaggggtggtggctataacgtacagcaaccctgtgtcggtgccccctgcccgcttctctagtgtcctacgggtcctggtaccagcacgtgcaggagtggtgggagctgagccgcacccaccctgttctctacctcttctatgaagacatgaaggagaaccccaaaagggagattcaaaagatcctggagtttgtggggcgctccctgccagaggagaccatggacttcatggttcagcacacgtcgttcaaggagatgaagaagaaccctatgaccaactacaccaccgtcccccaggagctcatggaccacagcatctcccccttcatgaggaaaggcatggctggggactggaagaccaccttcaccgtggcgcagaatgagcgcttcgatgcggactatgcggagaagatggcaggctgcagcctcagcttccgctctgagctgtgagaggggctcctggagtcactgcagagggagtgtgcgaatctaccctgaccaatgggctcaagaataaagtatgatttttgnnnnnnnnnnnnnnnnnnnnnnnnnnnnnnnnnnnnnnnnnnnnnnnnnnnnnnnnnnnnnnnnnnnnnnnnnnnnnnnnnnnnnnnnnnnnnnnnnnnnnnnnnnnnnnatctctacaaagatgtaaaaaaattagccacatgtgctggcacttacnnnnnnnnnnnnnnnnnnnnnnnnnnnnnnnnnnnnnnnnnnntcagccccaggaggttgtggatacagtgagttatgacatgcccattcactacagcctggatgacaagcaagaccctccctccaaagaaaataaagctcaatt

SEQ ID NO: 72809 - DNA, 716 bp, Homo Sapiens
  misc_feature (411)..(520): n is a, c, g, or t
  misc_feature (568)..(622): n is a, c, g, or t
ccgcctactactactactactatacggctgcgagaagacgacagaagggagattcaaaagatcctggagtttgtggggcgctccctgccagaggagaccatggacttcatggttcagcacacgtcgttcaaggagatgaagaagaaccctatgaccaactacaccaccgtcccccaggagctcatggaccacagcatctcccccttcatgaggaaaggcatggctggggactggaagaccaccttcaccgtggcgcagaatgagcgcttcgatgcggactatgcggagaagatggcaggctgcagcctcagcttccgctctgagctgtgagaggggctcctggagtcactgcagagggagtgtgcgaatctaccctgaccaatgggctcaagaataaagtatgatttttgnnnnnnnnnnnnnnnnnnnnnnnnnnnnnnnnnnnnnnnnnnnnnnnnnnnnnnnnnnnnnnnnnnnnnnnnnnnnnnnnnnnnnnnnnnnnnnnnnnnnnnnnnnnnnnatctctacaaagatgtaaaaaaattagccacatgtgctggcacttacnnnnnnnnnnnnnnnnnnnnnnnnnnnnnnnnnnnnnnnnnnnnnnnnnnnnnnngttgtggatacagtgagttatgacatgcccattcactacagcctggatgacaagcaagaccctccctccaaagaaaataaagctcaattaaaat

SEQ ID NO: 72810 - DNA, 1546 bp, Homo Sapiens
  misc_feature (1251)..(1286): n is a, c, g, or t
  misc_feature (1327)..(1442): n is a, c, g, or t
cagtcgacggtaccggacatatgcccgggaattcggccattacggccggggacagtggacctaggaaaccctcagctcagagaacaaccctgcattccccacacagcacccacaatcagccactgcgggcgaggagggcacgaggccaggttcccaagagctcaggaacatggagctgatccaggacacctcccgcccgccactggagtacgtgaagggggtcccgctcatcaagtactttgcagaggcactggggcccctgcagagcttccaggcccggcctgatgacctgctcatcagcacctaccccaagtccggcaccacctgggtgagccagattctggacatgatctaccagggtggtgacctggagaagtgtcaccgagctcccatcttcatgcgggtgcccttccttgagttcaaagacccagggattccctcagggatggagactctgaaagacacaccgcccccacgactcatcaagacacacctgcccctggctctgctcccccagactctgttggatcagaaggtcaaggtggtctatgttgcccgcaacgcaaaggatgtggcagtttcctactaccacttctaccacatggccaaggtgcaccctgagcctgggacctgggacagcttcctggagaagttcatggtcggagaagtgtcctacggatcctggtaccagcacgtgcaggagtggtgggagctgagccgcacccaccctgttctctacctcttctatgaagacatgaaggagaaccccaaaagggagattcaaaagatcctggagtttgtggggcgctccctgccagaggagaccgtggacttcatggttcagcacacgtcgttcaaggagatgaagaagaaccctatgaccaactacaccaccgtcccccaggagttcatggaccacagcatctcccccttcatgaggaaaggcatggctggggactggaagaccaccttcaccgtggcgcagaatgagcgcttcgatgcggactatgcggagaagatggcaggctgcagcctcagcttccgctctgagctgtgagaggggctcctggagtcactgcagagggagtgtgcgaatcaaacctgaccaagcggctcaagaataaaatatgaattgagggcccgggacggtaggtcatgtctgtaatcccagcaatttggaggctgaggtgggaggatcatttgagcccaggagttcgagaccaacctgggcaacatagtgagattctgttnnnnnnnnnnnnnnnnnnnnnnnnnnnnnnnnnnnngagaataaaatatgattgtgggccaggcagagtggctcatnnnnnnnnnnnnnnnnnnnnnnnnnnnnnnnnnnnnnnnnnnnnnnnnnnnnnnnnnnnnnnnnnnnnnnnnnnnnnnnnnnnnnnnnnnnnnnnnnnnnnnnnnnnnnnnnnnnnttatctgtacgtgatggtgcggcacctgtagtcccagctaacttgacaagtgaaggcaggaggatcgcctgagccagggaggttatggctgcagtgggctgact

SEQ ID NO: 72811 - DNA, 1081 bp, Homo Sapiens
  misc_feature (610)..(621): n is a, c, g, or t
  misc_feature (695)..(718): n is a, c, g, or t
  misc_feature (817)..(817): n is a, c, g, or t
  misc_feature (1006)..(1019): n is a, c, g, or t
attcggcacgaggtctggtctttttggccgggaactcctgattggtgttaaggtggtaatttcccccatataagatttagaatcactgagtttgagctagatgaaatttttaaaatttctggttgtctcattagactgatgaggtgagttttcttcttcatatgaacagctagttaataacagcagagttctcactcagtgctcagtacttaattttccactgcaccacaactgtcttaactaaatgtgctgtatttttctttaaaagttaagagttctatttggtgttttcaggaatatacgtgaaaagacatgccatgttttggtaaataccatcagagttgtgtaaaggcgtgtactaagtgcaatcttaatttgtggaaataatcttcatttacccctcctaaaactacactcagtataaacactttcccataaggtgtgtgcagtaaaaatgttatattactccaacactggcaggagcacagcacagcagccttattggagagagccttataaaagtgattaaatggaggcattgagctcattacctttaagtttactttgtgctgacctttgttcctgttttgagaatctcatataattattnnnnnnnnnnnncaattaaaacgaaacggcggggcctagctgtgtataaatgatccttgctgaatatcttaaggttttttgtaagnnnnnnnnnnnnnnnnnnnnnnnngcttattttcacattaaaatgaaacctcttttgcaacttaagaattctatggaaaagcagtttttatcatattttgtgtccatgcaccatttttcttanaatggcttacaaaaaagaatgtaaacaatttgtgatctggccagttgtacttttagctcccagagggagagttggtggtattatgagttgagtaaaaaccatccaggggaacttgagggagcagtctgttgccagtaatgttccttgtgtgccattaaaccacctccagatgagtggaggaacatcacnnnnnnnnnnnnnnaattggatttggaattgttgccgtgtactaagaacttggacctaaataaaatcccacaaagc

SEQ ID NO: 72812 - DNA, 459 bp, Homo Sapiens
  misc_feature (70)..(93): n is a, c, g, or t
taaaacgaaacggcggggcctagctgtgtataaatgatccttgctgaatatcttaaggttttttgtaagnnnnnnnnnnnnnnnnnnnnnnnngcttattttcacattaaaatgaaacctcttttgcaacttaagaattctatggaaaagcagtttttatcatattttgtgtccatgcaccatttttcttaaaatggcttacaaaaaagaatgtaaacaatttgtgatctggccagttgtacttttagctcccagagggagagttggtggtattatgagttgagtaaaaaccatccaggggaacttgagggagcagtctgttgccagtaatgttccttgtgtgccattaaaccacctccagatgagtggaggaacatcactttttaattttttaattgtatttggaattgttgccgtgtactaagaacttgacctaaataaaatcccaacatataaaaa

SEQ ID NO: 72813 - DNA, 2263 bp, Homo Sapiens
cttcggcaggagctcagcaaggtcagcaaagagctggtggagaagtcagaggctgtgcggcaagatgagcagcagcggaaagctctggaagccaaggcagctgccttcgagaagcaggtcctgcagctgcaggcgtcccacagggagagtgaggaggccctgcaaaagcgcctggacgaggtcagccgggagctgtgccacacgcagagcagccacgccagcctccgggcggatgccgagaaggcccaggagcaacagcagcagatggccgagctgcacagcaagttacagtcctccgaggcggaggtgcgcagcaaatgcgaggagctgagtggcctccacgggcagctccaggaggccagggcggagaactcccagctcacagagagaatccgttccattgaggccctgctggaggcgggccaggcgcgggatgcccaggacgtccaggccagccaggcggaggctgaccagcagcagactcgcctcaaggagctggagtcccaggtgtcgggtctggagaaggaggccatcgagctcagggaggccgtcgagcagcagaaagtgaagaacaatgacctccgggagaagaactggaaggccatggaggcactggccacggccgagcaggcctgcaaggagaagctgcactccctgacccaggccaaggaggaatcggagaagcagctctgtctgattgaggcgcagaccatggaggccctgctggctctgctcccagaactctctgtcttggcacaacagaattacaccgagtggctgcaggatctcaaagagaaaggccccacgctgctgaagcacccgccagctcccgcggagccctcctcggacctggcctccaagttgagggaggccgaggagacgcagagcacactgcaggccgagtgtgaccagtaccgcagcatcctggcggagacggagggcatgctcagagacctgcagaagagcgtggaggaggaggagcaggtgtggagggccaaggtgggcgccgcagaggaggagctccagaagtcccgggtcacagtgaagcatctcgaagagattgtagagaagctaaaaggagaacttgaaagttcggaccaggtgagggagcacacgttgcatttggaggcagagctggaaaagcacatggcggccgccagcgccgagtgccagaactacgccaaggaggtggcagggctgaggcaacttctcctagaatctcaatctcagctcgatgccgccaagagcgaagcccagaaacagagcgatgagcttgccctggtcaggcagcagttgagtgaaatgaagagccacgtagaggatggtgacatagctggggccccagcttcctccccagaggcgcccccagccgagcaggaccccgttcagctgaagacgcagctggagtggacagaagccatcctggaggatgagcagacacagcggcagaagctcacggccgagtttgaggaggctcagacctcggcatgtcggttacaagaagaattggagaagctccgcacagccggccccctagagtcttcagaaacagaggaggcctcacagctgaaggagagactagaaaaagagaagaagttaacaagtgacctggggcgcgccgccacgagactgcaggagcttctgaagacgacccaggagcagctggcaagggagaaggacacggtgaagaagctgcaggaacagctggaaaaggcagaggacggcagcagctcaaaggagggcacctctgtctgagtttcctctttggaaaaagaagttactgttcaacttaccaaaatgccttacacattccttacaaataaaccaaccaacctacacagcgttatccaggcccaacttccggtactccgagagaagccatgagagacaagtctcttagagccacagaagtagaccttccagagccccagtttgtaaatgaacctgtgtcacatttgataaacactatcctgggcgcagccccgggccaccgccgagtgacgccaaagccctggttgactctgacagccccgtgggtgtgtgggaggccgggcgctctggggtctgtctgtcagtgcaatcgtttagtgttttttcagtggggcggggcgggaagcgggtgggaccgggcagccagttctcaaaggctgtggggccgactggaggccacagcccctcacccctagacgttgccaaccagaactgacgtgtgacctcctgggtgttgatgccattaaaaccaacgttggtgcccggtaaaaaa

SEQ ID NO: 72814 - DNA, 974 bp, Homo Sapiens
  misc_feature (181)..(181): n is a, c, g, or t
  misc_feature (334)..(334): n is a, c, g, or t
  misc_feature (350)..(350): n is a, c, g, or t
  misc_feature (371)..(371): n is a, c, g, or t
  misc_feature (856)..(896): n is a, c, g, or t
gggaaaaagaaagattgcaagatggggtataatgagtgcagaagttccgatgaagggcatgggaaagaatattgagtagccatattagcacccaggttacattatgtacgggtggatgtgtggaatgtgggggataaaattcaacaggaacagctatgaatgattagattaaatagatcantatagggattggacctggaggcaagaataggcacgagggtggccaaagtgctttctccctcaggggatcatgaccagcagagattgtacccatgtagaataacagctgcctgtggtgaacattggctccctgccgccagcaccacctcttgcncaacctcacctttgtntgttacctgtgggccatgctntgcagccccccagcatggctgtgcggcccccacctgctcctgatactcgggtgctgccttcacatgacaggcccttccccgatagattggggcgagcagagctgcatccagtggaactaaagccgttccaggattatcaaaaactgagcagcaaccttgggggacctggatcatcacggactcccccaactggaaggtccttctctggcctcaattcccgtctcaaggccacgccttccacctacagtggagtcttccgcacccagcgcgtcgacctttaccagcaggcctccccaccagatgccctgcgctggatacctaagccttgggagcggacagggccgccacctcgagaagggccctcccgacgggcagaggagcctgggtcccgaggggacaaggagcctgggttgcccccaccccgctgagggagttcctcttgccccctacccccggggcttgtatatagattataaatatataannnnnnnnnnnnnnnnnnnnnnnnnnnnnnnnnnnnnnnnnctcacttcccctccgtccacattcccatggtcccctgtccctggggctgtttgttaaaaaagagtaataaaaggattt

SEQ ID NO: 72815 - DNA, 2509 bp, Homo Sapiens
  misc_feature (2301)..(2321): n is a, c, g, or t
tggttatccatggccagcctggtcatctttatgcagctgcgttacctgtttcatgaggtgcaacgtcgaattcgtcggcacaagaactatctacgtgtggttggaaacatggaggccaggtttgcagttgcaactccagaggagctggctgtcaacaatgacgactgtgccatctgttgggactccatgcaggctgcgcggaaactgccctgtggacatcttttccacaactcctgtcttcgttcctggctagaacaagacacctcctgtccaacatgcagaatgtctcttaatattgccgacaataatcgtgtcagggaagaacatcaaggagagaacttggatgagaatttggttcctgtagcagcagccgaagggagacctcgcttaaaccaacacaatcacttcttccatttcgatggagatgacagctccatgcgtgttactgcccctgaagacgttccagtgggacaggaggtggacggtggtcgacagtgatactgatgctcctgacctgtggtctcggattgcgagctggctgccgagtttttcggttgaagtgatgcacaccaccaacattcttggcattacgcaggccagcaactcccagctcaatgcaatggctcatcagattcaagagatgtttccccaggttccataccatctggtactgcaggacctccagctgacacgctcagttgaaataacaacagacaatattttagaaggacggattcaagtaccttttcctacacagcggtcagatagcatcagacctgcattgaacagtcctgtggaaaaggccaagcagtgaccaggaagagggagaaacttctgctcagaccgagcgtgtgccactggacctcagtcctcgcctggaggagacgctggacttcggcgaggtggaagtggagcccagtgaggtggaagacttcgaggctcgtgggagccgcttctccaagtctgctgatgagagacagcgcatgctggtgcagcgtaaggacgaactcctccagcaagctcgcaaacgtttcttgaacaaaagttctgaagatgatgcggcctcagagagcttcctcccctcggaaggtgcgtcctctgaccccgtgaccctgcgtcgaaggatgctggctgccgccgcggaacggaggcttcagaagcagcagacctcctagcgctcccttgccttcctcagctgcctcctgcgccctgtgcccgactgactggaggaggcctgtcccaattctgcccgctccatggaaaagcgggcttgactgcattgccgctgtataaagcatgtggtcttatagtgtttggacagctgataaatttaatccttctttgtaatactttctatgtgacatttctcttccccttagaaacactgcaaattttaactgtaggtatgatctcttctggtgttgactggactgcttggggtgggggacgatcaggaggaagtgagcagtcgcctgcctgcagcaggcagcttctactcctgcctcatgcatacgtcccacaaatgcaggtgtcctgagcaccacacccagtgggaagagtgtgggggaggcgcacagtgtgagcccgccccccacgtcgtggggtaacatctgttatcaaactgctgtcgttgttgtggaagcatgtagactgtgccagaggccagacccacgggctcatgcacccctgagccagcagggcatcttggaaaaggaactcttggttcgatacctggagcagaggaggggaaagtccagggctatagggtgtgatgaagtcacccctttctgtcccactacatctgggactgactttccgagcctccagtccaaagccggcttgatttccgtgaactctggtgctcctgcatctcatgagtgtgccccatgggtcccctcccctctcagcatttccttgtcccgtctggacctggggagtggttaggcagcaagctttggtttatggttttcattcattggtgaagtaaattaggcagtgctaaagcctgtgggtttggtccttgaacaagatgtgggccttgcaagatgggagagtaaaccttgaagggctttattaaagaaataaaaaagaacttttgtatcttttatcctgggagcactgcgttttcctagctgtgttattcctggtttaattcagcagagaaggtaaggtgtgaacctacctgccttggagagggcccaggtcccaaatctcttcaaattcttcacatgtttaactttaaggatttgaaccatgaagtcataggttacagacctcagttttatgccccattggattacnnnnnnnnnnnnnnnnnnnnnactctttgaaagctttgttttgtggtagtccttttgggaagaatccagtataatctacaattattggcaaagtttaaatgtattttacataacggaaagtttttagaatgttgaaaagtaattgaaaaaggtgataggtaaatttttaggcaaagataatttatttcaataaatctttcaaaagcctt

SEQ ID NO: 72816 - DNA, 1381 bp, Homo Sapiens
aagtgaggccccagcgccacaacccctccccgcccacccctttcccccttatatatttataatctatatacaagccccgggggtagggggcaagaggaactccctcagcggggtgggggcaaccaaggctccttgtcccctcgggacccaggctcctctgcccgtcgggagggcccttctagaggtggcggccctgtccgctcaccaaggcttaggtatccagcgcagggcatctgagtggggaggcctaggggacaggcatgtgttaaacagtgagtcacagtgagaagtcagcgatgagacggaaggacaggaaatcaagtggcaactcgaatttagagttggggccacaagggtttctccttcacctgctggtaaaggtcgacgcgctgggtgcggaagactccactgtaggttggaggcgtggccttgagacgggaattgaggccagagaaggaccttccagttgggggagtccgtgatgatccaggtccccccaaggttgctgctcagtttttgataatcctggaacggctttagttccactggatgcagctctgctcgccccaagctagcggggaagggccctggcaggtgaaggcagcacccgagtagcaggagcaggtgggggccgcacagccaggctggggggctgcagagcagggcccacaggtaacagagaaaggggaggtggggcaggaggtggtgctggcggcagggagccaaagttcaccacaggcagctgtgagtctaccatgggtagaagcatctgctgggcaggagcccctgaagggagaaagccactttggccaccaggctgcagaggagtagaataaaaatccgaaggggatggcagatcctggcgtacctgaagcaacgatgtgtcaggcaaaggactggggcagaaagccggagagtagaggaaggaaggtggagggtagagaactcctccagccggcaacttccccagctctgtagcttgcattgtggagaaatccagaaactggcccttgagagctaccccagagagcagtgctgagggaggggctgggccggggggtaggtataggggctgtgatctgtaagggtgcagtgagggtgtcccagggcggaagcctccactgtttggatgtaattgagagtccatggctcccccagagatctgagaactggaaggcccagcactgccatagaaaacctcaggatacaggcgctggcctgaggagctgggctccgggacacagtgcccagaatccaggttcttggattgtggctcagcagaggcagcagcactgggaagcagctcccagtctcgtcctcgtgccgaattcgccacccaggcctcgctaccttagaaccgcttagagtactggcccggttt

SEQ ID NO: 72817 - DNA, 1067 bp, Homo Sapiens
gtgagagagtatgaagtcgacggcgcgccgaattcggcacgaggcacctcgccgggcagctgccaagtctcctgatctgtcaaaccagaactcagaccaagccaatgaggaatgggagactgcatcagagagcagtgacttcaccagtgagcgccgaggggacaaagaggcacccccaccagtactgctgacacccaaggctgtgggaactcctgggggaggtggaggtggagccgtaccaggtatttcagccatgtcccgcggagatctgagccagagagccaaggatttgagtaaacggagcttctcaagtcagcggccaggcatggaacggcagaatcggcgccctggcccagggggcaaggctggcagcagtggcagcagcagtggaggaggcggtgggggtcctggaggaaggaccgggccaggacgaggcgacaagaggagctggccctctcccaagaaccgaagtcgtcctccagaggagcgtcccccggggcttcccctgcctcccccacctcccagcagttctgctgtcttccgcctggaccaagttatccacagcaaccctgctggcatccaacaggctctggcccagcttagtagccgtcaagggagtgtaactgcaccagggggtcatccaaggcacaagcctgggcctccccaagcccctcagggcccctctcctaggcccccaacccgatacgagccccagagggtcaacagcggcctcagttctgacccccactttgaggagccggggccaatggtgagaggggtgggtgggactcctcgggactctgccggggttagtccctttccccctaaacgtcgggagcggctcccagaaaaccagagctgctacaggaggaatctttgccacctcctcatagctctggattcttggggctctaagcctgagggcccaggaccctcaggcagagtccaagagatacaggcacagaggccctgacccctcacatctggaggctcctcacccctgaatgctgttccttgtgagggtccactggctctgaactcctaggagaccaccacctgacccccaa

SEQ ID NO: 72818 - DNA, 951 bp, Homo Sapiens
  misc_feature (266)..(266): n is a, c, g, or t
  misc_feature (269)..(275): n is a, c, g, or t
  misc_feature (279)..(279): n is a, c, g, or t
  misc_feature (281)..(281): n is a, c, g, or t
  misc_feature (577)..(577): n is a, c, g, or t
  misc_feature (835)..(835): n is a, c, g, or t
ggtccgcacccagcgcgtcgacctttaccagcaggcctccccaccagatgccctgcgctggatacctaagccttgggagcggacagggccgccacctcgagaagggccctcccgacgggcagaggagcctgggtcccgaggggacaaggagcctgggttgcccccaccccgctgagggagttcctcttgccccctacccccggggcttgtatatagattataaatatataagggggaaaggggtgggcggggaggggttctggggntgnnnnnnnactncncctcctcctccttcccctggtcccccggtccctgcccgctgtttgggcccgcggcagacctgcccggtccctcgtgccctgcgcgcgggcttcccctctgtccttggcctggccgctccgggtcctggccgagtgtctctacagcccctctcctcggcggcccctcgtcctacgggctcctccgccgcccctgccgtcttaccgcctgtcctctcgtcggcccgccgcggtccgtgattagacgtcgccggggggccgccccccgcgtagaccacccgctatcgccttcgcaccgncgccgcggatccccgccctatgcgccgtccctgtacagtgctacgatcactatgaagcccgggtgaccaccgcggaccggcatgacgcgcaactggagtgaccccgtggacgccgccatcctgaccaccgactatcccgctcgccacgtaccgacatttgctcaccgccattaccactatcacggccgacgcaaccgcccgtcgttccgccccgcgccggtcgcacttacggcagccaatcgccgtcgttgccatggngaccgagccgaatcccaccccgccacgctgtcctataccgccccggcgtccgctcgcccctctggtgccgatcccattctacccgatcatacgcacggtggcgtcacctacacccg

SEQ ID NO: 72819 - DNA, 950 bp, Homo Sapiens
  misc_feature (758)..(758): n is a, c, g, or t
agagagtatgaagtcgacggcgcgccgaattcggcacgaggctggctccttcagacaaggaggctcccacacccaaggagggaacactcacccaggtccctctcgctcccccaccaccaggagccccaccttcaccagccccagcccgcttcactgcccggggtgggcgagtcttcactcccagaggggtgccatctcgccggggccgaggaggagggaggccccctcctcaagtttgcccaggctggagccctccagccaagtctctggctcccaagaaacctcccacaggccctttgccaccaagtaaggagcctttgaaagagaagttgatcccagggcctctgtcccctgtggcgcgcggaggcagcaatggaggtagcaatgtgggcatggaagatggggagcgaccccgaaggaggcgacatgggagggctcagcagcaggataaaccgcctcgtttccggaggctgaagcaggaacgggagaatgccgcaagggggtctgagggcaagccctccctaacccttccagcctccgctcctggacctgaggaggccctcacaacagtcacagtggccccagcacctcgccgggcagctgccaagtctcctgatctgtcaaaccagaactcagaccaagccaatgaggaatgggagactgcatcaaagagcactgacttcaccagtgagcgccgaggggacaaagaggcacccccaccagtactgctgacacccaaggctgtgggaactcctggnggaagaggggaaggtggaaccctaccaggtatttcgccatgttcccgcggagatctgagccagagagcccagggatttggagtaaacggagctttctcaagtcagcggccaggcatggaaacggcagaatcggcgcccctggcccagggggggcaaaggctggcagcaggggcgccacccacctgggagaga

SEQ ID NO: 72820 - DNA, 1268 bp, Homo Sapiens
ttatccacagcaaccctgctggcatccaacaggctctggcccagcttagtagccgtcaagggagtgtaactgcaccagggggtcatccaaggcacaagcctgggcctccccaagcccctcagggcccctctcctaggcccccaacccgatacgagccccagagggtcaacagcggcctcagttctgacccccactttgaggagccggggccaatggtgagaggggtgggtgggactcctcgggactctgccggggttagtccctttccccctaaacgtcgggagcggcctcccagaaaaccagagctgctacaggaggaatctttgccacctcctcatagctctggattcttgggctctaagcctgagggcccaggccctcaggcagagtccagagatacaggcacagaggccctgacccctcacatctggaaccgtttacatactgccactagccgaaagagttaccggcccagctccatggagccttggatggagcccctgagtccttttgaggatgtggctggcacagaaatgagtcagtctgacagtggggtggacctgagtggggattctcaggtgtcatcaggtccctgcagccagcgaagttcccctgatggaggactcaagggggcagcagagggaccccccaagaggcctggaggctcctcacccctgaatgctgttccttgtgagggtccacctggctctgaacctcctaggagaccaccacctgccccccacgatggggacagaaaggagctgccccgggagcagcctctgccccctggccccattggcacagaacgatcacagcgtacagaccgaggcacagagcctggccccattcggccatcccatcgacctggtcccccagtccagtttggcactagtgacaaggtctgtgtgggctggatctgggtatcctgagttgggtgaagagatttgggacctgggccctctccaaggcaggtaggttcacaccttaccttctctgctgaattaaaccaggaataacacagctaggaaaacgcagtgctcccaggataaaagatacaaaagttcttttttatttctttaataaagcccttcaaggtttactctcccatcttgcaaggcccacatcttgttcaaggaccaaacccacaggctttagcactgcctaatatacttcaccaatgaatgaaaaccataaaccaaagcttgctgcctaaccactccccaggtccagtagtccaggtatgaccgggatcctgcttagagtcgagc

SEQ ID NO: 72821 - DNA, 536 bp, Homo Sapiens
tcacgcccacaggactcagacttacgcctagtggtaggagacagcttgaaagcagagaaggagctaacagcatcagtcactgaggccattcctgtatcacgagactgggagctgcttcccagtgctgctgcctctgctgagccacaatccaagaacctggattctgggcactgtgtcccggagcccagctcctcaggccagcgcctgtatcctgaggttttctatggcagtgctgggccttccagttctcagatctctgggggagccatggactctcaattacatccaaacagtggaggcttccgccctgggacaccctcactgcacccttacagatcacagcccctatacctacccccgggcccagcccctccctcagcactgctctctggggtagctctcaagggccagtttctggatttctccacaatgcaagctacagagctggggaagttgccggctggaggagttctctaccctccaccttccttcctctactctccggctttctgccccagtccttgtggcgtacggtc

SEQ ID NO: 72822 - DNA, 635 bp, Homo Sapiens
cttcagaattcgaggaagatgatgtgaatcttccaattttatctatttgattcaaatggtatgttttttcacatttctcataatttccacgtcaactcccatgatgatcatgcaggaaagcagcatgattgcacttcttgtagtgcataccatcactaaaacatagttactgtctttctgtggtcttaagaaaaattcagaaacagcataccaatgtacatataagataaataagcttatgtggtacagtaagtgttctgttctgagaaataccttgattcgtatcctaatgtctgatgttattggtagttctcaaacttccccaattctgctttcatctaaattcatcttatctatctattgttaaataatctatcagtccatttttatctatcatctatatatctgtctttatcaatcattcgtctgtaatctatctgtgccgtttggcataagagacagaagggcatagcagtggaaactcaaaggagttacctccatgtgaatggacagtggtgatggtgatctgtgaggtggtgatgtatagaaagaaaaactagaagagagcatgccctaactcagggaccttgtccagcaggcactctggccttgttatactgtgcttgaatatgaaa

SEQ ID NO: 72823 - DNA, 3052 bp, Homo Sapiens
agagtatgaagtcgacggcgcgccgaattcggcacgaggcgtgtgtgggtccgggggaggcccacgaacgccagcgaaaccgctgacaccaccgcccaactatgaactcatcaggcgcctgaagaccgacacgccgaacatgcgccgcgcgcactcgcgcacgagtgagatcatcgcgccccggtcgtgagtgcgctcacacgcagcctgagactcgacgggagggggtcacgtggaagtatctgagagaggcgtacttggccactaggaaagcacctccccctttccaaaaatgctccggaagtgccttcgccctccgtaaagatggccggggcagtcggcacgagggaggcggggatgcgcctgcgcaacaagttcggcggggaagatggcggatgacaaggattctctgcctaagcttaaggacctggcatttctcaagaaccagctggaaagcctgcagcggcgtgtagaagacgaagtcaacagtggagtgggccaggatggctcgctgttgtcctccccgttcctcaagggattcctggctggctatgtggtggccaaactgagggcatcagcagtattgggctttgctgtgggcacctgcactggcatctatgcggctcaggcatatgctgtgcccaacgtggagaagacattaagggactatttgcagttgctacgcaaggggcccgactagctctaggtgccatggaagaggcaggatgagcagctcagccttcaggtggagacactttatctggattccccagctgtcatccatttgctatctccaactttcctgccaccttcatccttgcctcccttcctgcagattgtggacagtagttcctcagcctgcaccctggattccttcttccccttcctagctccatgggactcgccccaagactgtggcttcaaggaccaccagccccttactcttcaagccctgactgtggagttggtagatgcctctgatcctcagtattctctctggcaatgttccacggcttctccttcctgggagctggctccataacttgattttccccaaacgtgttgcaatccctgctgccccttagccacccagggtcttgtgtgggtatgagtgtagaggatgggggtatgccaggcctgggccgtcccaggcaggcccgctggaccctgatgctactcctatccactgccatgtacggtgcccatgccccattgctggcactgtgccatgtggacggccgagtgcccttccggccctcctcagccgtgctgctgactgagctgaccaagctactgttatgcgccttctcccttctggtaggctggcaagcatggccccaggggcccccaccctggcgccaggctgctcccttcgcactatcagccctgctctatggcgctaacaacaacctggtgatctatcttcagcgttacatggaccccagcacctaccaggtgctgagtaatctcaagattggaagcacagctgtgctctactgcctctgcctccggcaccgcctctctgtgcgtcaggggttagcgctgctgctgctgatggctgcgggagcctgctatgcagcagggggccttcaagttcccgggaacacccttcccagtccccctccagcagctgctgccagccccatgccccgtgcatatcactccgctaggcctgctgctcctcattctgtactgcctcatctcagggcttgtcgtcagtgtacacagagctgctcattgaagcgacaggcggctgcccctggcacttcagaacctcttcctcttacacttttggtgtgcttctgaatctaggtctgcatgctggcggcggctctggcccaggcctcctggaaggtttctcaggatgggcagcactcgtggtgctgagccaggcactaaatggactgctcatgtctgctgtcatgaagcatggcagcagcatcacacgcctctttgtggtgtcctgctcgctggtggtcaacgccgtgctctcagcagtcctgctacggctgcagctcacagccgccttcttcctggccacattgctcattggcctggccatgcgcctgtactatggcagccgctagtccctgacaacttccaccctgattccggaccctgtagattgggcgccaccaccagatccccctcccaggccttcctccctctcccatcagcagccctgtaacaagtgccttgtgagaaaagctggagaagtgagggcagccaggttattctctggaggttggtggatgaaggggtacccctaggagatgtgaagtgtgggtttggttaaggaaatgcttaccatcccccacccccaaccaagttcttccagactaaagaattaaggtaacatcaatacctaggcctgagaaataaccccatccttgttgggcagctccctgctttgtcctgcatgaacagagttgatgaaagtggggtgtgggcaacaagtggctttccttgcctactttagtcacccagcagagccactggagctggctagtccagcccagccatggtgcatgactcttccataagggatcctcacccttccactttcatgcaagaaggcccagttgccacagattatacaaccattacccaaaccactctgacagtctcctccagttccagcaatgcctagagacatgctccctgccctctccacagtgctgctccccacacctagcctttgttctggaaaccccagagagggctgggcttgactcatctcagggaatgtagcccctgggccctggcttaagccgacactcctgacctctctgttcaccctgagggctgtcttgaagcccgctacccactctgaggctcctaggaggtaccatgcttcccactctggggcctgcccctgcctagcagtctcccagctcccaacagcctggggaagctctgcacagagtgacctgagaccaggtacaggaaacctgtagctcaatcagtgtctctataactgcataagcaataagatcttaataaagtcttctaggctgtagggtggttcctacaaccacagccatgaaaaaaa

SEQ ID NO: 72824 - DNA, 914 bp, Homo Sapiens
tttagggggagagagtatgaagtcgacggcgcgccgaattcggcacgaggcggatgacaaggattctctgcctaagcttaaggacctggcatttctcaagaaccagctggaaagcctgcagcggcgtgtagaagacgaagtcaacagtggagtgggccaggatggctcgctgttgtcctccccgttcctcaagggattcctggctggctatgtggtggccaaactgagggcatcagcagtattgggctttgctgtgggcacctgcactggcatctatgcggctcaggcatatgctgtgcccaacgtggagaagacattaagggactatttgcagttgctacgcaaggggcccgactagctctaggtgccatggaagaggcaggatgagcagctcagccttcaggtggagacactttatctggattccccagctgtcatccatttgctatctccaactttcctgccaccttcatccttgcctcccttcctgcagattgtggacagtagttcctcagcctgcaccctggattccttcttccccttcctagctccatgggactcgccccaagactgtggcttcaaggaccaccagccccttactcttcaagccctgactgtggagttggtagatgcctctgatcctcagtattctctctggcaatgttccacggcttctccttcctgggagctggctccataacttgattttccccaacgtgttgcatccctgctgcccttagccaccagggtctgtgtggtatgatgtagagatggggtatgcccagctggcgtccagcagccgctgaactgagctatctatcactgcaggaggtgcatgccatgctgcctggcagtgacgcgatgcctcgctctactgtgtatgatacatagtagctcctcgagtgactgcagcc

SEQ ID NO: 72825 - DNA, 1268 bp, Homo Sapiens
  misc_feature (1112)..(1169): n is a, c, g, or t
ccagagggccccgcgtttaatcggcacgaggctggcttgtcgcggctgcatgggcttttcgcggtctataagcccccggggctaaaatggaagcacctgcgggatacagtggagctacaacttctgaaggtatgtggaccagcattcgcccatctcaaggttggcgtgggacatcggttggatgcccaggcttctggagtacttgtgctcggcgtgggacatggatgcaggctcctcaccgatatgtacaatgctcatcttaccaaggattacacagtgcgtggcctcctgggcaaagctacagatgacttccgtgaggacgggaggctggtagagaagacaacctatgaccacgtgaccagagagaagctggaccgcattctggccgttatccaaggctcccatcagaaggccctggtgatgtactccaacctcgacctgaagacccaggaggcctatgagatggccgtgagaggcctgatccggcccatgaacaagtccccgatgctgataactggcatccgatgcctctactttgcacctccggaattcctcttagaggtgcagtgcatgcatgagacgcagaaagagctgcggaagttggttcatgaaatcggcctggaactaaagaccactgctgtctgcacccaagtgcggcgcacgcgcgacggcttcttcacgctagacagtgccctcctgaggacccagtgggacctaaccaacatccaggatgctatccgggctgctacccctcaggtagctgcagagctggagaagagcttgagcccggggctggacaccaagcagctccccagtccgggatggtcctgggactcccagggcccgagctctaccttggggctggagaggggtgcggggcagtgaatgcccaggcagctcctggggcagtggatggataaatagaagaactgctatgagctggacctgatagctgtgcagaaagtgagagcaggggcaccttttctacgtaagacacaaaactcaagctgtaacagaaaggtcaatggacttgacccaactgagaaggaaaaacttctgtatggaggaaaagacagtaaacatgacagactgatagaaagtattggcagacnnnnnnnnnnnnnnnnnnnnnnnnnnnnnnnnnnnnnnnnnnnnnnnnnnnnnnnnnntgcttgagcccaggagtttaaggttgtagtgcgctagacggcgcctgtgaatagccactgcactctagtctggggaacatatgagacccctgccatctc

SEQ ID NO: 72826 - DNA, 469 bp, Homo Sapiens
  misc_feature (50)..(62): n is a, c, g, or t
  misc_feature (162)..(219): n is a, c, g, or t
  misc_feature (441)..(441): n is a, c, g, or t
acaattttttttaatagttaattttcgtgggcacatagtttattgagaannnnnnnnnnnnngagatggcaggggtctcatatgttccccagactagagtgcagtggctattcacaggcgccgtctagcgcactacaaccttaaactcctgggctcaagcannnnnnnnnnnnnnnnnnnnnnnnnnnnnnnnnnnnnnnnnnnnnnnnnnnnnnnnnngtctgccaatactttctatcagtctgtcatgtttactgtcttttcctccatacagaagtttttccttctcagttgggtcaagtccattgacctttctgttacagcttgagttttgtgtcttacgtagaaaaggtgcccctgctctcactttctgcacagctatcaggtccagctcatagcagttcttctatttatccatccactgccccaggagctgcctgngcattcactgccccgcacccctctccag

SEQ ID NO: 72827 - DNA, 374 bp, Homo Sapiens
  misc_feature (100)..(157): n is a, c, g, or t
gagatggcaggggtctcatatgttccccagactagagtgcagtggctattcacaggcgccgtctagcgcactacaaccttaaactcctgggctcaagcannnnnnnnnnnnnnnnnnnnnnnnnnnnnnnnnnnnnnnnnnnnnnnnnnnnnnnnnngtctgccaatactttctatcagtctgtcatgtttactgtcttttcctccatacagaagtttttccttctcagttgggtcaagtccattgacctttctgttacagcttgagttttgtgtcacacgtagaaaaggtgcccctgctctcactttctgcacagctatcaggtccagctcatagcagttcttctatttatccatccactgccccaggagctg

SEQ ID NO: 72828 - DNA, 930 bp, Homo Sapiens
tggtcccctgggtcctccagagggcactgtctagcgtgaagaagccgtcgcgcgtgggccgcaccttgggtgcagacagcagtgctctttagttccagcccgatttcatgaaccaacttccgcagctcttttctgcgtctcatgcatgcactgcacctctaagaggaattccggaggtgcaaagtagaggcatcggatgccagttatcagcatcggggacttgttcatgggccggatcaggcctctcacggccatctcataggcctcctgggtcttcaggtcgaggttggagtacatcaccagggccttctgatgggagccttggataacggccagaatgcggtccagcttctctctggtcacgtggtcataggttgtcttctctaccagcctcccgtcctcacggaagtcatctgtagctttgcccaggaggccacgcactgtgtaatccttggtaagatgagcattgtacatatcggtgaggagcctgcatccatgtcccacgccgagcacaagtactccagaagcctgggcatccaaccgatgtcccacgccaaccttgagatgggcgaatgctggtccacataccagtggatggttgatgaaagagggtacgctggtggctgtgagggtcagctccttctcttcgctgccttccatggggcccagcaagaagcgaacacgctgtttaggagcgggaggcttcctggcattgagacccttcagaagttgtagctccactgtatcccgcaggtgcttccattttagccccgggggcttatagaccgcgaaaagcccatgcagccgcgacaagccagcagaccccatactttgaagatcacagcacccgctcgacgcgtggtcgacgatatcccgggattccggaccgtaccagcctgctttttagcaccactgttctatatttctacc

SEQ ID NO: 72829 - DNA, 1780 bp, Homo Sapiens
ggctggtacgcgtccggatttcccgggatatcgtcgacccacgcgtcttgcgtcgacatggcggttaccctgagtctcttgctgggcgggcgcgtttgcgccgccgtcactcgctgtgggttcgcgacccggggggtggcgggcccaggccctattggccgggagccggaccccgattccgactgggagccggaggaacgggagctgcaggaggtggagaggtaccggcttctccccgggccctcagcttgaagcagggcctcgtgccccggcgctccaggccgcgcccccttggcgccgggtgtcctgccgctgcttgcgcagcggcccttgtttcttcttacccgttgttaggggcgcagcgtcaggtgttcagctcccctgggaccactggtcccttcattagtgacgtatttcatcatcagtttagagagttcggcatgcttacaggcagttattgttctaggtgttagctttctgggtgtacggagcagctctaagccggcaacatggcccggttgcccttgcgatcaaagagaagagggctgggcgctccatgatttagcctgaggctcttcaaacatccattctgcttccacgcatggcttctgccattggttctcttcccccagcaccctgaaacgacagaaacaagcaatccgattccagaaaattcggaggcaaatggaggcgcctggtgccccgcccaggaccctgacgtgggaagccatggagcagatacggtatttacatgaggaatttccagagtcctggtcagttcccaggttggctgaaggctttgatgtcagcactgatgtgatccgaagagttttaaaaagcaagtttttacccacattggagcagaagctgaagcaggatcaaaaagtccttaagaaagctgggcttgcccactcgctgcagcacctccggggctctggaaatacctcaaagctgctccctgcaggccactctgtatcaggctctttgcttatgccagggcatgaagcctcatctaaagacccaaatcacagcacagctttgaaagtgatagagtcagacactcacaggacaaatacaccaaggagaaggaagggaagaaataaagaaatccaggacctggaggagagctttgtgcctgttgctgcacccctaggtcatccaagagagctgcagaagtactccagtgattctgagagccccagaggaactggcagtggtgcgttgccaagtggtcagaagctggaggagttgaaggcagaggagccagataacttcagcagcaaagtagtgcagaggggccgagagttctttgacagcaacgggaacttcctgtacagaatttgagtcggggcttggcttatggagatgcctcgtgaaacacagctgggcaagtattaatgtatatggaacagcctggatttctgcatatggataagccaccttggaataggaagaggtgttgagcctggactgtgggaggaaagagctgcgtggatagattcaaacttcctgtggtagtgctcccagtctgacctctgtagaccttcagtactcactcttcttgcttaggctctctgtgtgttgaaagccatcccgtgttgcatgtgttgttacaattttctgtgatacttgcaatttatgtttgagaagaagtgaaaagtttgccttctgacctcatttccttcttgatcagtgaacactaacattttggggacaacttagtcaattggttttccttacaacaaaataaagtaaaatgtagcagtgaaaccgggccgga

SEQ ID NO: 72830 - DNA, 1034 bp, Homo Sapiens
taccggaaaccagccgtaacgaggccccgggacacttgaagtattccagagccggagtctacagcgaagtggcaaacccagctttccttaggactgtttaatcctgcttcagcttcctgcccaatgtgggtaaaaacttgctttttaaaacttcttcggatcacatcagtgctgacatcaaagccttcagccaaacctgggaactgaccaggactctggaaattcctcatgtaaataccgtatctgcctccatggcttcccacgtcaggctcctggcggggcaccaggcgcctccatttgcctccgaattttctggaatcggattgcttgtttctgtcgtttcagggtgctgggggaagagaaccaaatggcagaagccatgcgtggaagcagaatggatgtttgaagagcctcaggctaaatcatggagcgcccagccctcttctctttgatcgcaagggcaaccgggccatgttgccggcttagagctgctccgtacacccagaaagctaacacctagaacaataactgcctgtaagcatgccgaactctctaaactgatgatgaaatacgtcactaatgaagggaccagtggtcccaggggagctgaacacctgacgctgcgcccctaacaacgggtaagaagaaacaaggccgctgcgcaagcagcggcaggacacccggcgccaagggggcgcggcctggagcgccggggcacgaggccctgcttcaagctgagggcccggggagaagccggtacctctccacctcctgcagctcccgttcctccggctcccagttcggaatcggggtccggctcccgccaatagggcctgggcccgccaccccccgggtcgcgaacccacagcgagtgacggcggcgcaaacgcgcccgcccagcaagagactcagggtaaccgccatgtcgaccgcaaaccagccttcagcagtcggccggacgcgtgggtcgacgatatcccgggattccggaccggaccagcctgcttttttgaaccactggttctatatttcaa

SEQ ID NO: 72831 - DNA, 2083 bp, Homo Sapiens
  misc_feature (1993)..(2016): n is a, c, g, or t
ccggaattctcgggatagctcccggccgggcttgactcaagcggaggcgcgcggaacagtcgccgaggcgattcccgcccaggctcctgtaaccgccaggcagcggccccgccatgtcccagccccggaccccagagcaggcacgtggatacaccgggggactgccccccaggcaggagagacgaggacgctggggaggggatccagtgctcccaacgcatgctcagcttcagtgacgccctgctgtccatcatcgccaccgtcatgatcctgcctgtgacccacacggagatctccccagaacagtggacaaaggcagcaccctggaagtgagccagaggacaggttggaagaggaaggttccgggcctgccccaaggacagaagtttcctctgcgggagggcagctgccccagcaggcaggccccttacgtagctgctctgagtaaacgcggccagcgccccgtctcagcggggacactcccaccccggctgctcctgcaggcctggagcagttcgacagaagtgtacagaggcttctggcaacacggattgccgtctacctgatgacctttctcatcgtgacagtggcctgggcagcacacacaaggttgttccaagttgttgggaaaacagacgacacacttgccctgctcaacctggcctgcatgatgaccatcaccttcctgccttacacgttttcgttaatggtgaccttccctgatgtgcctctgggcatcttcttggtcggggtgtgtgggatcgccatcgggggcgtgcaggcactgattgtgggggtacgcattcccacttcccgcacctgctgagcccgcaaatccagcgctctgcccacagggctctgtaccgacgacacgtcctgggcatcgtcctccaaggcccggccctgtgctttgcagcggccatcttctctctcttctttgtccccttgtcttacctgctgatggtgactgtcatcctcctcccctatgtcagcaaggtcaccggctggtgcagagacaggctcctgggccacagggagccctcggctcacccagtggaagtcttctcgtttgacctccacgagccactcagcaaggagcgcgtggaagccttcagcgacggagtctacgccatcgtggccacgcttctcatcctggacatctgcgaagacaacgtcccggaccccaaggatgtgaaggagaggttcagcggcagcctcgtggccgccctgagtgcgaccgggccgcgcttcctggcgtacttcggctccttcgccacagtgggactgctgtgttcgcccaccactcactcttcctgcatgtgcgcaaggccacgcgggccatggggctgctgaacacgctctcgctggccttcgtgggtggcctcccactagcctaccagcagacctcggccttcgcccggcagccccgcgatgagctggagcgcgtgcgtgtcagctgcaccatcatcttcctggccagcatcttccagctggccatgtggaccacggcgctgctgcaccaggcggagacgctgcagccctcggtgtggtttggcggccgggagcatgtgctcatgttcgccaagctggcgctgtacccctgtgccagcctgctggccttcgcctccacctgcctgctgagcaggttcagtgtgggcatcttccacctcatgcagatcgccgtgccctgcgccttcctgttgctgcgcctgctcgtgggcctggccctggccaccctgcgggtcctgcggggcctcgcccggcccgaacaccccccgccagcccccacgggccaggacgacccacagtcccagctcctccctgccccctgctagcagccacagagcccactcccagccgtcctcaccagagatggaccagggaggacaggatgctgggcaggggaagccaagtcacgggcaggccgcagtggttcttgcgtggcctggttttattttcattgtgaaatatcatgctcttatttcagtcctcnnnnnnnnnnnnnnnnnnnnnnnncctgagcaggcggccgcaagcttattcccttattgagggttaatttgagcatggcactggccgtcgt

SEQ ID NO: 72832 - DNA, 816 bp, Homo Sapiens
gtcgccgggcttgcgatgaacttccggctgtcaagctcccggccgggctgactcaagcggaggcgcgcggaacagtcgccgaggcgattcccgcccagcagttcgacagaagtgtacagaggcttctggcaacacggattgccgtctacctgatgacctttctcatcgtgacagtggcctgggcagcacacacaaggttgttccaagttgttgggaaaacagacgacacacttgccctgctcaacctggcctgcatgatgaccatcaccttcctgccttacacgttttcgttaatggtgaccttccctgatgtgcctctgggcatcttcttgttctgtgtgtgtgtgatcgccatcggggtcgtgcaggcactgattgtggggtacgcattccacttcccgcacctgctgagcccgcagatccagcgctctgcccacagggctctgtaccgacgacacgtcctgggcatcgtcctccaagccccggccctgtgctttgcagcggccatcttctctctcttctttgtccccttgtcttacctgctgatggtgactgtcatcctcctcccctatgtcagcaaggtcaccggctggtgcagagacaggctcctgtggccacagggagccctcggctcacccagtggaagtcttctcgtttgacctccacgagccactcagcaaggagcgcgtggaagccttcagcgacggagtctacgccatcgtggcccacgcttctcatcctggacatctgcgaagacaacgtcccggaccccaagggatgtgaaggagaggttcaggcggcagcctcgtggcggcc

SEQ ID NO: 72833 - DNA, 772 bp, Homo Sapiens
  misc_feature (213)..(213): n is a, c, g, or t
  misc_feature (624)..(624): n is a, c, g, or t
tgaacttccggctgtcaagctcccggccgggctgactcaagcggatggcgcgcggaacagtcgccgaggcgattcccgcccagtgctcctgtaaccgccaggcagcggcccctgccatgtcccagccccggaccccagagcaggcactggatacaccgggggactgcccccctaggcaggagagacgaggacgctggggaggggggaacttcncaagtgctcccaacgcatgctcagcttcagtgacgccctgctgtccatcatcgccaccgtcatgatcctgcctgtgacccacacggagaatctccccagaacaggtaacggggcaggctgtgctctgcgtggtgtggccctgcgaagatatagggtccccgaggctcaacctggcaccagggtgctgaccctgcacgcctcgaagcttctgaggcttaggaggcagaggcgggaggccgggggcctccttggaaagggagggagccaacaagtcctgctcagcctgtgctcaccccggcggagtgtccctggcctccttgggcagggtgggagcactgggctcctagggctctgtttcccgagttcaagtgggacaaatgggcagctaccacttggcacagttgaagcccnagcagggcacacgcgtcgcgaacgacggcaacggtatccagcgtgccctggcaccacaaagggaccagcaacgctttccctctggcgtggacgggcagcatgccccaggcaggcaggccccttacgtagctgctctgagtaaacgcgg

SEQ ID NO: 72834 - DNA, 1633 bp, Homo Sapiens
  misc_feature (1334)..(1343): n is a, c, g, or t
cctagtgttagagagtatgaagtcgaggcgcgccgaattcggcacgaggtcatgccacacggaggaatgcccccctgacgggaaaagcttcagggagcagcagtgtgagaagtataatgcctacaattacactgacatggacgggaatctcctgcagtgggtccccaagtatgctggggtgtccccccgggaccgctgcaagttgttctgccgagcccgggggaggagcgagttcaaagtgttcgaggccaaggtgattgatggcaccctgtgtgggccagaaacactggccatctgtgtccgtggccagtgtgtcaaggccggctgtgaccatgtggtggactcgcctcggaagctggacaaatgcggggtgtgtgggggcaaaggcaactcctgcaggaaggtctccgggtccctcacccccaccaattatggctacaatgacattgtcaccatcccagctggtgccactaatattgacgtgaagcagcggagccacccgggtgtgcagaacgatgggaactacctggcgctgaagacggctgatgggcagtacctgctcaacggcaacctggccatctctgccatagagcaggacatcttggtgaaggggaccatcctgaagtacagcggctccatcgccaccctggagcgcctgcagagcttccggcccttgccagagcctctgacagtgcagctcctgacagtccctggcgaggtcttccccccaaaagtcaaatacaccttcttggtacctaatgacgtggactttagcatgcagagcagcaaagagagagcaaccaccaacatcatccagccgctgctccacgcacagtgggtgctgggggactggtctgagtgctctagcacctgcggggccggctggcagaggcgaactgtagagtgcagggacccctccggccaggcctctgccacctgcaacaaggctctgaaacccgaggatgccaagccctgcgaaagccagctgtgccccctgtgattcaggggggcaggggccagtcttgtgctcctggacatgcggtactgaggtgcagacaagggtctccactgtggtgactgggtcccttggccatatcaaggcagcacggcccacccaggcctcccattgccgcaacccctccagtactgcacaaattcctaagggggaagaggagagggtatggggcggcagaccctatcatcaactgtccagtggactggaccttgctcgggttcaagtagagggcataggttaaaaggtaaaagtgcacttattgactcagacaggacactcagcgtcagtctgtttgcaaaggactagcaaacttaaatgnnnnnnnnnnttctatctggtttccccgataaataatctacctcacaggggaaaaaattagtacaagagaggcgtggggcagggagtcaatggtgaatgtcaaagcaggctccaaagctggaccccaagctgtcttcaagaatgaccacgactgtcttcagtgttaaaatccatcacctaaagggccgcagcgtcgcagggtttggagagccacatgttctcaggctgccacctgcaggggtggatccatttcaagtatttatgcaaatgtgtctctgaactaaagtgtgatcttatgcc

SEQ ID NO: 72835 - DNA, 894 bp, Homo Sapiens
  misc_feature (701)..(701): n is a, c, g, or t
  misc_feature (737)..(737): n is a, c, g, or t
  misc_feature (743)..(743): n is a, c, g, or t
  misc_feature (802)..(802): n is a, c, g, or t
ttagggggagagagtatgaagtcgacggcgcgccgaattcggcacgaggtcaaggccggctgtgaccatgtggtggactcgcctcggaagctggacaaatgcggggtgtgtgggggcaaaggcaactcctgcaggaaggtctccgggtccctcacccccaccaattatggctacaatgacattgtcaccatcccagctggtgccactaatattgacgtgaagcagcggagccacccgggtgtgcagaacgatgggaactacctggcgctgaagacggctgatgggcagtacctgctcaacggcaacctggccatctctgccatagagcaggacatcttggtgaaggggaccatcctgaagtacagcggctccatcgccaccctggagcgcctgcagagcttccggcccttgccagagcctctgacagtgcagctcctgacagtccctggcgaggtcttccccccaaaagtcaaatacaccttctttgttcctaatgacgtggactttagcatgcagagcagcaaagagagagcaaccaccaacatcatccagccgctgctccacgcacagtgggtgctgggggactggtctgagtgctctagcacctgcggggccggctggcagaggcgaactgtagagtgcagggacccctccggccaggcctctgccacctgcaacaggctctgaaaccgaggatgccnagccctgcgaaagcagctgtgcccctgtgatcaggngggcangggcagtctgtgctcctgactgcgtactgagtgcgacaggtctcatgtgtgatggtccntgcatatagcacagccacagctcatgccacctcatatccatctagggaagaagtagggcactttcatctgagactccgtaaagcagtagagc

SEQ ID NO: 72836 - DNA, 919 bp, Homo Sapiens
  misc_feature (670)..(683): n is a, c, g, or t
tgagccaccgcacccagccagggggaatgttctataaccagctctgtaaaggaaaaacactgatgtgtggtagtcaccaatttctgtggtgtaaatactcccaccatggttgatttcaagccaccaggggtttaataaccagctcataaatctcctaaatattttacagttgactctcatgagctgattggagtcagctggaacataccactgcctctagactaaggccagcagatttagcaaatacagactgccccagttcattgaattttagataaatgaaataaatctataaggttaagtatgtccccagaactgcatggaacatgcttaatctaaacaatgatttgttgttcacctgaaattcaaatttagctgggtgtcctgtatttcatctggcaaccctacttcagacccaggtgtaaggtacatggatgtgctttggtcaaggaataggccaaggcagagatccatgcctgcatgactcagtgggtttggtgcacaggcacacacctccacttgttatataacctgtttgtgtaagttcatacttggtctgagccactgttgtctgtaaaaggtaattgtcctgctaatgctgtacaggggctcttggggttcggctcagctcaacatggcttgacatggtgggcacactggcgcccagtannnnnnnnnnnnnnccaaagctgtccgttttgcagatggacaggaaggagccaggacacagctcagcttgctcacgcccagagagagaaaaagttaagctgctgaccctgaaggcaagggagagcaggctgcacagctgtgtgtggaagccacgggctcaagcagccaaggcagggcggacagtgtgagagagctagtgtaagctgttgatgagagctgttgctgaataaaaccatattcacctgccaaa

SEQ ID NO: 72837 - DNA, 629 bp, Homo Sapiens
cgggcctgcatgcccaaagttgatatgtcaggcctatgtgccaaacctgtgtatcaaacctgtgtgtcctaggcctatgtctccctcggcctagagggtggagtgtaaggtacatgaatgtgctttggtcaaggaataggccaaggcagatgtccaggcctgcatgactcagtgagtttggggcacaggtgcacacctccatttgttatataacctgtttgtgtaagttcatacttggctctgagccactatcgtctgtaaaaggtataattgccttgctaacaccgtacaggggctcttgaggctcggcttggctcaacatggcttaacacagcgggtgcactggcacccagagaaagagagaaagagaaccagagctgtccttcttgtaggtggacagaggggagccacagcacggctcgcactggtgcccagagacagaaagagtgaagctgttgaccctgaaggcaagggagagctggccatgcagctgcaggtgtgggggcggcgggagccacagagccccagcaaacagccgagataaaggtgagcagtgtagagagctagtgtgaggaagctgctgatgagagctgctgctgaataaaataatcttttacctgcctacaaaa

SEQ ID NO: 72838 - DNA, 609 bp, Homo Sapiens
taaagacaggttacgaagacaaagtcccagaattgtatctcatactgtctgcgattaagggcaaatctattacttttgcaaactgtcctctacatcaattaacatcgtgggtcactacagggagaaaatccaggtcatgcagttcctggcccatcaactgtattgggccttttggatatgctgaacgcagaagaaagggtggaaatcaaccctctcctgtctgccctctgggtccctcctctcacctctccctcgatcatatttccccttggacacttggttagacgccttccaggtcaggatgcacatttctggattgtggttccatgcagccttggggcattatgggttcttcccccacttcccctccaagaccctgtgttcatttggtgttcctggaagcaggtgctacaacatgtgaggcattcggggaagctgcacatgtgccacacagtgacttggccccagacgcatagactgaggtataaagacaagtatgaatattactctcaaaatctttgtataaataaatatttttggggcatcctggatgatttcatcttctggaatattgtttctagaacagtaaaagccttattctacaggtgt

SEQ ID NO: 72839 - DNA, 665 bp, Homo Sapiens
  misc_feature (15)..(15): n is a, c, g, or t
  misc_feature (125)..(125): n is a, c, g, or t
cgatgaggatgagcncagcctctccggagccggatgggggagtcggcaccagggattccagccgaacttccatccgcagctcccagtggtccttcagcaccatcagcagcagcacccagcgctcntacaacacctgctgcagctggacccaacaccctttgatccagaagaaccgccgagtggtgctggcctccttcctgctcctgctgctggggctggtgctgatcctggtcggcgtgggactggaggcgaccccctctccaggtgtctccagcgccatcttcttcgtgccgggcttcctgttgttggtgcctggagtctatcacgtgatcttcatctactgcgcggtcaagggccaccggggcttccagttcttctacctgccctacttcgagaagtgatcgcggcgcagcgtggaccccttgcgcccatgggggcgcccctcttgccctgttccgttcccctcatctcaagggaagaggccctccaggaccctcgaaaccccagcccctagggagtttgctcaggaagttcggggcatgcaggcctggccctgggaaagccgcccgtcgcctgctctgtgccttaacttattctcgggccgtgcggctgctaggttgctgttattttgtgctaataaaagagtaattaattcctccagaggc

SEQ ID NO: 72840 - DNA, 1029 bp, Homo Sapiens
  misc_feature (585)..(597): n is a, c, g, or t
  misc_feature (932)..(932): n is a, c, g, or t
aaataagtcctaggtaaggctggtgttaatcggcagaggcggcggcgcacggcgcctgagcgggccggggccatgagcgccgcccggccccagttcagcattgatgatgccttcgagctgtccctggaggacgggggccctgggcccgagtccagcggggtcgcgcgctttgggccgctgcacttcgagcgtcgggcccggttcgaggtggctgacgaggacaagcagtcccggctgcgctaccagaacctggagaacgatgaggatggagcccaggcctctccggagccggatgggggagtcggcaccagggattccagccgaacttccatccgcagctcccagtggtccttcagcaccatcagcagcagcacccagcgctcctacaacacctgctgcagctggacccaacaccctttgatccagaagaaccgcccgagtggtgctggcctccttcctgctcctgctgctggggctggggcctgctcagtgccttgctctggaaacagagcttggtgagcttcctggggagggtctctgcctagggcaccttcagctcaggtggtgggtgagccgggctggggnnnnnnnnnnnnngcccggggcagaagaagcgacgccaaaacactatcggaaggagcaagaggcaccagaccaccgcgcggccaccacagggccaccaacacccacagaccgaacggcggcgcctgcgcccgcaggtggcggccaacgataaacctcgaacaagacgtaatggagcgcaccggcaccgtccgcggccgctgtgcccttgttgggtagccgaggccccccaccagaagagacagccccgcccagcagctcaaaggctcggcaaccacgagacattgtgagggactgcccaagcccccggtctcgacaccacgatccctatacacggcataacagacaanacacggaggaacgaccacaaaacgaaccaaaatccctcgcgacccgcatggactaaccgtccgccacggcgacgcctctccgcaccccccctccacc

SEQ ID NO: 72841 - DNA, 1420 bp, Homo Sapiens
cctgggtggcgtttccgaaacgaggctcagatatagacgtctccaagccaggctccccggagccacaggtttctggccttgcagccaatcgttctctgacagaaggcctggtcctggacacaatgaatgacagcctcagcaagatcctgctggacatcagctttcctggcctggacgaggacccactgggccctgacaacatcaactggtcccagtttattcctgagctacagtagagccctgcccttgcccctgtgctcaagctgtccaccatcccgggcactccaaggctcagtgcaccccaagcctctgagtgaggacagcaggcagggactgttctgctcctcatagctccctgctgcctgattatgcaaaagtagcagtcacaccctagccactgctgggaccttgtgttccccaagagtatctgattcctctgctgtccctgccaggagctgaagggtgggaacaacaaaggcaatggtgaaaagagattaggaaccccccagcctgtttccattctctgcccagcagtctcttaccttccctgatctttgcagggtggtccgtgtaaatagtataaattctccaaattatcctctaattataaatgtaagcttatttccttagatcattatccagagactgccagaaggtgggtaggatgacctggggtttcaattgacttctgttccttgcttttagttttgatagaagggaagacctgcagtgcacggtttcttccaggctgaggtacctggatcttgggttcttcactgcagggacccagacaagtggatctgcttgccagagtcctttttgcccctccctgccacctccccgtgtttccaagtcagctttcctgcaagaagaaatcctggttaaaaaagtcttttgtattgggtcaggagttgaatttggggtgggaggatggatgcaactgaagcagagtgtgggtgcccagatgtgcgctattagatgtttctctgataatgtccccaatcataccagggagactggcattgacgagaactcaggtggaggcttgagaaggccgaaagggcccctgacctgcctggcttccttagcttgcccctcagctttgcaaagagccaccctaggccccagctgaccgcatgggtgtgagccagcttgagaacactaactactcaataaaagcgaaggtggacatgctgggctctgtggttaattggcgtctgattcctaaggcaccaggagaggctggaaaagaaagagggtgttgatggagacgatggtgatagggaagaggcaaggcctgaagttcacccaaagcagcagttggagcacttgcacaggcacacacttgacaacacaaattgccagttttcccagtgctagtcctgcacagttcacctcttttccctgacgctgtcagctg

SEQ ID NO: 72842 - DNA, 767 bp, Homo Sapiens
tttatttaaaaattaatttaatgcttggctaaatcttaattacatatataattatcaaacgatagtccttaatttccaaaaaaattcctcttttgaaaatcacagaatcagaaagcataaactttaaaacaagttctctgaatatttacaatgtggtataaacattatagaagaccatggatattaaattgcctgggtgtggctaatcagcaaggcgtattctttattgcatatttaactcacatatgtgggattttaaatatgacagactactaaaattcaaatgcatgtatctgcaagctgggcagggagtaaaatcatgaatgagacaggacggtcagcccaaaaccatgcaattaggttgtgggtttattattttcaaaagtgaaatttctatgttccatttgaaactatgttgcatattcatttagcattcacattaaacccacatttgactctaacgctgattcaaggaagaaagttcaacattcactcaatgactaagtccacaactcaactctcaatgttaaggcagcacagctacagtgatagcaacgctaaccaaaaggtaatgaacatttagtcacttgccagcccttttgttacaacagtgtagtaatttccctaagacaatttgctaccggatattttctgctgttaaaaggttcctctgtggaaaaaaacacaaatttccagtgtgaaagtaagtccatggtggtataatatatatatgcatattacacatttacactgcacacatcgtttac

SEQ ID NO: 72843 - DNA, 1699 bp, Homo Sapiens
gaaactgaaggccctggatgagagccataaccagaacctgaaggaatggcgggacaagcttcggccgcgcaagaaggctctggaagaggatctgaaccagaagaagcgggagcaggagatgttcttcaagctgaacgaggaggcggagtgcccaaacccctccaccccaagcaaggccgccaagttcttcccctacagttctgcggatgcttcttaacaaccgcccggggctgtggctggcagcttggtgggccccagggccttctccttcattctctgtgaacatgtaactcaggaccccttttccctcttgcgtctgtgccagctcaaatccagcccctcgccctgtgccaccccaactgtgcctgatagacctgccccagcgttcctgacttcttgctggcctgtggagggtgaggtgtaattatttgtcacctgaacctaatgtatattctccttgagccccagatcccttcaagctggaagggatggggctgttggtggggtcagggtccaagaggaatgggtgttctgtggcctcgagtcctctcctgtttgcgaaaataccagttttgctctctgtgggacaaagcactgctgatgaagttccccgggggctcatccgggctggaattcttggtttttcagccattccctgcagagtcactcaatcatcaaagtccctcaccagccattttctgttcccagaggagccaggcctgcagctggctgctcaggagatggcctcattcctccctgtttctcccagtttgctttccacttaagacaaaagccttgtctatgtggggggcggggaccggggaaagagggaggctgaaatgtttattctgcttctcccgtgtttcatgccatctcgcgtcccccttcctgcacatgggtgtgaatgcacacacatacgcgtacacacaggacttggtctgctggcctggcctcttctgcccaggtgggttggaacacgtttgctgcctgagcctgtgccactgagcatgttaggtggagcagttggtgtggcacgtgcggggtgttggcaccggaggcatggaaaagcacaggctgtactgccaggctgcgatgcgtgctggcccccgcacaggctcctgtgtgcagggactgattcctcagcacacgaggcttccacaacccagtctgctccatagcactctggcccaccctgtctgcaggtgaaacaggagggctgtttgcctctgccccatccccccgactgtgttcaggagtcccaccttgcatttcagacctgggctggcagtctgttggacttctcttcaggaagaaaaagcatcagggggaaatggaatgcccctgccccaggaacatggcagaagcacaggttctgtacctcagatggactcctgctgggccttcggggtctcagttggcttcccccagattctgattctacagctgcagaatgtatataacgcaataaaagcaaatgttttgaaccagaaagaaaaacgtgcaggacgcatttctcgccgcatatgtgggtccgcacccatccttggtcttaaggccgtaacaccttgcccgccccattttcgttgggggggcccactaagacaatgtcccgcgcgctttttactcgttcggcgccgctacattcacaaggagtgatgaccgcccccacagaggggaagtttcggcccggggaccgtta

SEQ ID NO: 72844 - DNA, 676 bp, Homo Sapiens
  misc_feature (15)..(15): n is a, c, g, or t
  misc_feature (67)..(67): n is a, c, g, or t
  misc_feature (127)..(127): n is a, c, g, or t
  misc_feature (203)..(203): n is a, c, g, or t
  misc_feature (274)..(274): n is a, c, g, or t
gaccaagaaaccganccaagtgccgcgcagctgctgagcaatcccttcgtcagcagcacaccagtancaagcctctgcggaagctggtggctgaggcaaaggccgaggtgatggaagagatcgagancggccgggatgagggggaagaggaggacgcgtggatgcccgcctccaccctggagaaccatactcagaactctctngaggtgagtccgccaagcctcaatgctgacaagcctctcgaggagtcacctccacccgctggcacccagcncagtctcaggacagtgtgaatgagccctgcagccagccctctggggacagatccctccaaaccaccagtcccccagtcgtggcccctggaaatgagaacggcctggcagtgcctgtgcccctgcggaagtcccgacccgtgtcaatggatgccagaattcaggtagcccaggagaagcaccttgcatttcagacctgggctggcagtctgttggacttctcttcaggaagaaaaagcatcagggggaaatggaatgcccctgccccaggaacatggcagaagcacaggttctgtacctcagatggactcctgctgggccttcggggtctcagttggcttcccccagattctgattctacagctgcagaatgtatataacgcaataaaagcaaatgtttgaaa

SEQ ID NO: 72845 - DNA, 544 bp, Homo Sapiens
gcacgaggtctgaatcttcaccatctttctgattccgcaccctgcctacgccaggagaagttgaggggagcatgcttccctgcagctgaccgggtcacacaaaggcatgctggagtacccagcctatcaggtgcccctcttccaaaggcagcgtgccgagccagcaagaggaaggggtgctgtgaggcttgcccaggagcaagtgaggccggagaggagttcaggaacccttctccatacccacaatctgagcacgctaccaaatctcaaaatatcctaagactaacaaaggcagctgtgtctgagcccaacccttctaaacggtgacctttagtgccaacttcccctctaactggacagcctcttctgtcccaagtctccagagagaaatcaggcctgatgagggggaattcctggaacctggaccccagccttggtgggggagcctctggaatgcatggggcgggtcctagctgttagggacatttccaagctgttagttgctgtttaaaatagaaataaaattgaagactaaagacctaaa

SEQ ID NO: 72846 - DNA, 1869 bp, Homo Sapiens
tttgttctgaggttgcttttattccaagaactctgtgagctccgcccagataccattggcgcctgcttgtgtccccaggggacctacacacaacagcaccagcaccatgagggcgctctcgacccacacaagccctggtccccgtcagtcaatgtgactgagtccgccattgaggccagtctggctggccccaagtggtccctctgagtccccaactccctggccagcaaggagtgaagctccatgccccttggtccacgcctctagagtctgagcatatcctgcagcctcgatctcaggaggcaacgcatgcagcccccctgcactcagaaagggggcttctccagtcgtggtcttcttctctgtccacaagtttccagatggcccctccttggagcccctgcccaggcagggaacggccacatcctcgggcagagccaagagtcaccgtctttcgtgggcctgggaccaggcccagccaggacgctaggaggctgcctctgctgccatgggctggatcaacatggtggtggcctgcagcgggtagtagcggccccgccaggtcttccagaagattcccttcttaagcttctgccgctgctgtgggatggagcggaagtactggccgttgaggttggaatggctgcaggtgccaaaccaccagcctccagagaggctcttggcgcagttcttgtccctgcggaggtcgtgatcctggtcccaagtggagaagggtacggagaggccgctgggtgggacggtggtggcgcccagctggccggccacgggtgcagtgagctgcaggctataggccgtgtcctcgccacccaggtgcacggagaactgcagcaactcggcgttgccatcccagtcccgcagctgcacggccaggcggctgttgcggtcccccatgatgctatgcaccttctccagacccagccagaactcgccgtggggatccccaaaccccgccttgtaggcttcccagggccgggttgaagtcccactgaagccatcgtggcgcctctgaattactgtccagcctccatctgaggtcatcttgcagttcaccaaaaatggcggagacccctgaggctggatttcaaatagtccacttctgcctctccccaacctggaacagctcctggcaatccctgggcagccggtgcaggcggctgacattgtgagccgggtcaactggctgggccatctcgggcagcctctttcttcgggcaggcttggccacctcatggtctaggtgcttgtggtccaggaggccaaactggctttgcagatgctgaattcgcaggtgctgcttctccaggtgccgctgctgctgggccaccttgtggaagagttgctggatcctgctgttctgagccttgagttgtgtctgcaggctgtgaaggacctcagggtccacccggctctcaggggctaacgggaggtcggtggacccctcggttccctgacaggcggacccgcacgcgctcaggcgccgctccagcgcgctcagctgactgcgggtgcgctccgcgtgttcgcgcagcccctggccgagctgcaggagtccgtgcgccaggacattcatctcgtcccaggacgcaaagcgcggcgacttggactgcacgggtccgccctgagcgctcagtagcacggcggtggcggcgcagagcatcagggctgccccggccgtcggagcaccgctcatcctcttaggtagcctgggagcggggattcggggactctcggggacgttggggttccaggtgcgaggactggagacgcggaggaccgggggtaagacccgcttggttgcagaagccgctggaaagaatcggatcacagtcgtgtgaggatccgcatccc

SEQ ID NO: 72847 - DNA, 2326 bp, Homo Sapiens
agagtatgaagtcgacggcgcgccgaattcggcacgaggagggttcctttttgtagcatcagaatttggaaaccattacttatatcaaattgcacatcttggagatgatgatgaagaacctgagttttcatcagccatgcctctggaagaaggagacacattcttttttcagccaagaccacttaaaaaccttgtgctggttgatgagttggacagcctctctcccattctgttttgccagatagctgatctggccaatgaagatactccacagttgtatgtggcctgtggtaggggaccccgatcatctctgagagtcctaagacatggacttgaggtgtcagaaatggctgtttctgagctacctggtaaccccaacgctgtctggacagtgcgtcgacacattgaagatgagtttgatgcctacatcattgtgtctttcgtgaatgccaccctagtgttgtccattggagaaactgtagaagaagtgactgactctgggttcctggggaccaccccgaccttgtcctgctccttattaggagatgatgccttggtgcaggtctatccagatggcattcggcacatacgagcagacaagagagtcaatgagtggaagacccctggaaagaaaacaattgtgaagtgtgcagtgaaccagcgacaagtggtgattgccctgacaggaggagagctggtctatttcgagatggatccttcaggacagctgaatgagtacacagaacggaaggagatgtcagcagatgtggtgtgcatgagtctggccaatgtaccccctggagagcagcggtctcgcttcctggctgtggggcttgtggacaacactgtcagaatcatctccctggatccctcagactgtttgcaacctctaagcatgcaggctctcccagcccagcctgagtccttgtgtatcgtggaaatgggtgggactgagaagcaggatgagctgggtgagaggggctcgattggcttcctatacctgaatattgggctacagaacggtgtgctgctgaggactgtcttggaccctgtcactggggatttgtctgatactcgcactcggtacctggggtcccgtcctgtgaagctcttccgagtccgaatgcaaggccaggaggcagtattggccatgtcaagccgctcatggttgagctattcttaccaatctcgcttccatctcaccccactgtcttacgagacactggaatttgcatcgggttttgcctcggaacagtgtcccgagggcattgtggccatctccaccaacaccctacggattttggcattagagaagctcggtgctgtcttcaatcaagtagccttcccactgcagtacacacccaggaaatttgtcatccaccctgagagtaacaaccttattatcattgaaacggaccacaatgcctacactgaggccacgaaagctcagagaaagcagcagatggcagaggaaatggtggaagcagcaggggaggatgagcgggagctggccgcagagatggcagcagcattcctcaatgaaaacctccctgaatccatctttggagctcccaaggctggcaatgggcagtgggcctctgtgatccgagtgatgaatcccattcaagggaacacactggaccttgtccagctggaacagaatgaggcagcttttagtgtggctgtgtgcaggttttccaacactggtgaagactggtatgtgctggtgggtgtggccaaggacctgatactaaacccccgatctgtggcagggggcttcgtctatacttacaagcttgtgaacaatggggaaaaactggagtttttgcacaagactcctgtggaagaggtccctgctgctattgccccattccaggggagggtgttgattggtgtggggaagctgttgcgtgtctatgacctgggaaagaagaagttactccgaaaatgtgagaataagcatattgccaattatatctctgggatccagactatcggacatagggtaattgtatctgatgtccaagaaagtttcatctgggttcgctacaagcgtaatgaaaaccagcttatcatctttgctgatgatacctacccccgatgggtcactacagccagcctcctggactatgacactgtggctggggcagacaagtttggcaacatatgtgtggttgaggctaccaactaacaccaatgatgaagttagatgaggatcctacaggaaacaagccctgtgggaacgggggttggtcaatggggctcccaaaagggggtgattctgaactacctgtccgggaaaggggctgcctggggaaaaacagct

SEQ ID NO: 72848 - DNA, 1625 bp, Homo Sapiens
  misc_feature (1593)..(1594): n is a, c, g, or t
  misc_feature (1597)..(1597): n is a, c, g, or t
aggcccggtgttaatcggccgaggcaaggctggcattgcagtgggcctctgtgatccgagtgatgaatcccattcaagggaacacactggaccttgtccagctggaacagaatgaggcagcttttagtgtggctgtgtgcaggttttccaacactggtgaagactggtatgtgctggtgggtgtggccaaggacctgatactaaacccccgatctgtggcagggggcttcgtctatacttacaagcttgtgaacaatggggaaaaactggagtttttgcacaagactcctgtggaagaggtccctgctgctattgccccatttcaggggagggtgttgattggtgtggggaagctgttgcgtgtctatgacctgggaaagaagaagttactccgaaaatgtgagaataagcatattgccaattatatctctgggatccagactattggacatagggtaattgtatctgatgtccaagaaagtttcatctgggttcgctacaagcgtaatgaaaaccagcttatcatctttgctgatgatacctacccccgatgggtcactacagccagcctcctggactatgacactgtggctggggcagacaagtttggcaacatatgtgtggtgaggctcccacctaacaccaatgatgaagtagatgaggatcctacaggaaacaaagccctgtgggaccgtggcttgctcaatgggggcctcccagaaggcagaggtgatcatgaactaccatgtcggggagacggtgctgtccttgcagaagaccacgctgatccctggaggctcagaatcacttgtctataccaccttgtctggaggaattggcatccttgtgccattcacgtcccatgaggaccatgacttcttccagcatgtggaaatgcacctgcggtctgaacatccccctctctgtgggcgggaccacctcagctttcgctcctactacttccctgtgaagaatgtgattgatggagacctctgtgagcagttcaattccatggaacccaacaaacaaaagaacgtctctgaagaactggaccgaaccccacccgaagtgtccaagaaactcgaggatatccggacccgctacgccttctgagccctcctttcccggtggggcttgccagagactgtgtgttttgtttcccccaccaccatcactgccacctggcttctgccatgtggcaggagggtgactggataattaagactgcattatgaaagtcaacagctctttcccctcagctcttctcctggaatgactggcttcccctcaaattggcactgagatttgctacacttctccccacctggtacatgatacatgaccccaggttccagtgtagaacctgagtcccccattccccaaagccatccctgcattgatatgtcttgactctcctgtctacttttgcacacacccttaatttttaattggttttcttgtaaatacagttttgtacaatgttatctctgtgggaggaaggaggcaggctgtggtgggactgggtagggtatagtatcactcctgagttccactgctctagaatctaaccagaaatagaaacctagtttttanntcngaagatgatttaaggccaaaagcttgtt

SEQ ID NO: 72849 - DNA, 583 bp, Homo Sapiens
gatcctggcatctatttatgcaactaaatacttttcagaaatggtatataaaaggctacagtttaatatctgtatttttataaaagtatgatgaagggtttggggtgtttttatttgtagcagaggtaagaatatgtattcatataatctgcctacttttgagttctcatattaacatttagataacatatgaagtatggcccccttggatccttgtttttaagttactttcgatgtgtatacgaacaaagaccagggagaaacagaacttttaaaactataggctgctgtgttggggccagaaataaggtgacaagtaaagacttttataatacctaccttcaaaattagaatcagcagcactgtacaaataaagtgcctgtgcttcacctcacaccaagaatcttgcctaaccctgtcagagtgcctaatatcctgtggtgattatgtataatgaaacagtcttattttgtgctctttggtttcttaaaaggaaagcttgttttctttcctttatcattacagaggtatgtctttggttcttaaactatctgtctaaaataaagctgtaaaaaattaacag

SEQ ID NO: 72850 - DNA, 235 bp, Homo Sapiens
cgtccctttacgagagtcaaacatgcctattaatacagtatatacagacaccccattctggaactaatctacagggacatccctaaccccatgtacaattcccagttttttgtaagtgtcagtgcgagagacatttgactcttgtgtttgtatctcctttttatgattgctgtacctacccatgtctttttggggaggggtgaaaaaagatttcaaataaaaatgtttagaaatt

SEQ ID NO: 72851 - DNA, 978 bp, Homo Sapiens
  misc_feature (79)..(113): n is a, c, g, or t
  misc_feature (837)..(898): n is a, c, g, or t
caaggcgtgatgatcatataggggcctagtcttagtagcgaacgacgagcgcagcgagtagtgagcgaggaagcggcgnnnnnnnnnnnnnnnnnnnnnnnnnnnnnnnnnnncagtcgacggtaccggacatatgcccgggaattcggccattacggtccggggactgcgttcggacccagacccgctgcaggcagcagcagcccccgcccgcgcagcagcatggagctctggggggcctacctcctcctctgcctcttctccctcctgacccaggtcaccaccgagccaccaacccagaagcccaagaagattgtaaatgccaagaaagatgttgtgaacacaaagatgtttgaggagctcaagagccgtctggacaccctggcccaggaggtggccctgctgaaggagcagcaggccctgcagacggtctgcctgaaggggaccaaggtgcacatgaaatgctttctggccttcacccagacgaagaccttccacgaggccagcgaggactgcatctcgcgcgggggcaccctgagcacccctcagactggctcggagaacgacgccctgtatgagtacctgcgccagagcgtgggcaacgaggccgagatctggctgggcctcaacgacatggcggccgagggcacctgggtggacatgaccggcgcccgcatcgcctacaagaactgggagacctgagatcaccgcgcaacccgatggcggcaagaccgagaactgcgcggtcctgtcaggcgcggccaacggaaagtggttcgacaagcgctgccgcgatcagctgccctacatctgccagttcgggatcgtgtagccggnnnnnnnnnnnnnnnnnnnnnnnnnnnnnnnnnnnnnnnnnnnnnnnnnnnnnnnnnnnnnnggggaccttgcagcccccatcctctccgtgcgcttggagcctctttttgcaaataaagttggtgcagcttcgcggagagg

SEQ ID NO: 72852 - DNA, 660 bp, Homo Sapiens
  misc_feature (18)..(18): n is a, c, g, or t
ctcttctcttctcctgcnccgttcctcatccacccctccccatttggaccataatagacaccaaaacaaacccaaattggtaaaaagaataatcaaaaagaagacattatccggttaagagtctgtgctggttgccaccccaagagagaacagttgtccaggatgctggctggtggaacaacctgctggcccgaaacaaggctgccaggtgcggatacctgagaaggactacttggtatcaaatacttttgagatggctacagtcagctagctggacagcccatgctgactggggacatacacttgcatctttgttgaaagcagaagaagacagaccctttccccaccttccttacctcctcttcccccattaaggcagctcatccaagcttgtatttaactgaataaatgagtagacattgtggacctcacaagattatttaattcttaagatgtgtagaccttgatggtaggtgtgacatgttagtttttcttacttgcatttatttaagacactgttacagagatactgttgtcaccttctggggcacggtctttggggagaggggagtgcatttagacttatgtggaactgtacaaattgtgatgtggctacatagaaagccatgtgctaagaataaactccatttaaaaaacatt

SEQ ID NO: 72853 - DNA, 718 bp, Homo Sapiens
  misc_feature (702)..(702): n is a, c, g, or t
caatctgtagctggagctgatacaatacaatgtttacctggccaaagagggttcgaggggacaagctggcctcacaataagatgcacagtgttagctaggtcatcgtgacaggcatgcctcacaccaagacggactatcaagacctgagccgacctgacttacataaatgacaaacactagtgctttacaaaggtggctggagttctccatcttctaaaatcaacatccaatccccttcagtcagcatcttcagtattcccttgaggactggaaaaccaaagcagctacgtccatctgtaacgcacccgcaccggacaggcacgagatatcacgtccacctggcaccatccaaagagggtaaattggagaaatcacacctttcaaatgttaatctgacactgtaaacagcagttgagttctcatttacatgggcaaagaaagcactttaagctattttcacaactttcctacggaagaaaaggaaacgattcagacggttaatggctaagttttaaacaaatgctctgcatcactacttggttaagaaataatacaatttttgcccttgtgtccctttttcttcttggattttgttgtcctctgaccaaactgaggggtgggaagtgcagatggtggactagaaaggtcatctgtatagtaggcaaatctctgtggccggggttgagggattggttgtccangaaatatcttcttctt

SEQ ID NO: 72854 - DNA, 1323 bp, Homo Sapiens
  misc_feature (1253)..(1270): n is a, c, g, or t
aaggtagcgaggcctgggtggcgatattcggcacgagggtggggtcacaactggtgcatgccagcgccaaagggacctgtctttaggggtcatttcagccagctcctcccatcacagatgacagctccaagcctagaaggggctcagtgacagggccaggacaagccctcaggactgtggcctcctggcccttggttcccctgccccacaacatggtctccacatggctggctggctggctgtccctgtgtgtgtgtgacacacggtgtgagtgcagggctgtgcccggggtgggagggtgtctatgtggcactgactgtcttagctcagagctggtggatcctctccatggacaatgacactttaaggattgtcttggtttgtttttcctatttgtggggtattttccccctcaggctcctgggtctgctgctgcctcaaggtgtcctgaccttgaggctgatgaggggacccctgcctgtttcccccatactgagttctagggaggtgctcaccccagactcttaggaagggtctagagaaatgagaggagcccaagccaggggccagctccgagaaagggtaacctccacgcttctctctcccaaattggaaatgaagacaggttttcaaaggcacaggctccccctgccagcttctaggatcttccttggtgtgcaatgggccagttaggggtaggcagcttgcacccagttctcctttatctcaacttattttcctggggagaggtgcctagagggattgaggtaacttcaactgggaattccaaggaaggtgggcaagtagccttggctctctcccaccatgtccatcaggattgagagtgtgtctagctcccgaccactttgtcttgacctactgaaaagttgggaactgaggggtgccttcattcccctttgttcactttctccagctcaacttgggacttgggtggtgggactggagacctcacccctgctcccgtcccgccccctttctatcccaacctgtttccatgtagcagacccttcctagggagcagggaggggaagccacagattgcaaacccaggggctcctttttcattctttctaaaaccttgatatcctcagcccaaaggcgatgcccccctgccacctccaagcctggaattgtgcataacccggatcttgtatctttgtataacggatgttatttgtacgaagggcagttcgtaaacagcacttgttcttttaataaaagaatgttttgcnnnnnnnnnnnnnnnnnngaccgcgtatgcggccgcaagcttattccctttagtgagggtaattttagctt

SEQ ID NO: 72855 - DNA, 961 bp, Homo Sapiens
atttgtatagtacaatctctgtggtagcagaaatatatgcacaaaaaacaattcaaataagagttcagagtaaaaaaaagtcagctaagactgtatcccgcaggacatttcatatatatggatttcacagctacactcgatccacgccccacaccacatacaggctgctgtctcccacaagaatgatgatgtcaggggcatcaggaaaggtaagggccgggaaaccgggcccttggagaaccctgcccaggggaggcccagcctactcacaggatccgacactccaggcagagcagagggcaggagaggcccaaagagctaggtcaagcagctggctcccctgggaggggagccgggagacagggaggtcctcacactgcccccgtggccacgcatggctgtctgcacactccatcaggaggaagggcaggggagaagtcacatgcagtacagtgaaactcatcagtgtcacacacgcccagcaggaggggagagctctgctccacacgctggcggccttggctgctccagagcaatccgctgctccagcttcagccatgggaccaagagggtaaaggagcagcttctggaggccccaggcagaggccaccttgcagcagtgactggcgactttgcagtacatctctgctcacttgctgtcccttgggagtgagcaccgtctataacacatcgccatctacaaaagcctggtcacagtgttcaccagcacattcatgaaaatttaaatcaacattaaccaaagtacctgcaagtaacactgcttactcttgctgtttgcctcatctgactggaaaccttagcccccaaatatgaaatgccttctctagattaaaaggattcagagatgttgcactattgcactatatttctgcttcccgatctcgtttctgagtcctagtgaaatcgtaaacaagagatgaaataaacgtcgctccatttt

SEQ ID NO: 72856 - DNA, 1701 bp, Homo Sapiens
gggaacaagaattctgttcctgtgaccgtcgccatggttgagagatggaagcaggcagcaaagcaacgcctcactccaaagctgttccatgaagtggtacaggcgttccgagcagctgtctccagaagctgctgttggaaaggtggcaaaggatagcagcaggatgctgcagccgtccagcagcccgctctgggggaagcttcgtgtggacatcaaggcttacctgggctcggccatacagctggtgtcctgtctgtcggagacgacggtgttggcggccgtgctgcggcacatcagcgtgctggtgccctgcttcctgaccttccccaagcagtgccgcatgctgctcaagagaatggtggtcgtatggagcactggggaggagtctctgcgggtgctggctttcctggtcctcagcagagtctgccggcacaagaaggacactttccttggccccgtcctcaagcaaatgtacatcacgtatgtgaggaactgcaagttcacctcgcctggtgccctccccttcatcagtttcatgcagtggaccttgacggagctgctggccctggagccgggtgtggcctaccagcacgccttcctctacatccgccagctcgccatacacctgcgcaacgccatgaccacccgcaagaaggaaacataccagtctgtgtacaactggcagtatgtgcactgcctcttcctgtggtgccgggtcctgagcactgcgggccccagcgaagccctccagcccttggtctacccccttgcccaagtcatcattggctgtatcaagctcatccccactgcccgcttctacccgctgcgaatgcactgcatccgtgccctgacgctgctctcggggagctcgggggccttcatcccggtgctgcctttcatcctggagatgttccagcaggtcgacttcaacaggaagccagggcgcatgagctccaagcccatcaacttctccgtgatcctgaagctgtccaatgtcaacctgcaggagaaggcgtaccgggacggcctggtggagcagctgtacgacctcaccctggagtacctgcacagccaggcacactgcatcggcttcccggagctggtgctgcctgtggtcctgcagctgaagtcgttcctccgggagtgcaaggtggccaactactgccggcaggtgcagcagctgcttgggaaggttcaggagaactcggcatacatctgcagccgccgccagagggtttccttcggcgtctctgagcagcaggcagtggaagcctgggagaagctgacccggggaagaggggacaccccttgacctggtactacagccactggcgcaagctgcgtgaccgggagatccagctggagatcagtggcaaagagcggctggaagacctgaacttccctgagatcaaacgaaggaagatggctgacaggaaggatgaggacaggaagcaatttaaagacctcttttgacctgaacagctctgaagaggacgacaccgagggattctcggagagagggatactgaggcccctgagcactcggcatggggtggaagacgatgaagaggaccaaggaggagggccgagggaggacagcagcaactcggaggggtgaatggtctgggattggagacccagaagccgaagcggggtgggcccggggagctgcgagcggccagggccgggacgacgggggcc

SEQ ID NO: 72857 - DNA, 915 bp, Homo Sapiens
  misc_feature (886)..(886): n is a, c, g, or t
aggggagagagtatgaagtcacggcgcgccgaattcggcacgaggggcagctgcggggagccgcaagaggcgcctggcggagctgacggtggacgagttcctagcttcgggctttgactccgagtccgaatccgagtccgaaaattctccacaagcggagacacgggaagcacgcgaggctgcccggagtccggataagccgggcgggagcccctcggccagccggcgtaaaggccgtgcctctgagcacaaagaccagctctctcggctgaaggacagagaccccgagttctacaagttcctgcaggagaatgaccagagcctgctaaacttcagcgactcggacagctctgaggaggaagaggggccgttccactccctgccagatgtgctggaggaagccagtgaggaggaggatggagcggaggaaggagaagatggggacagagtccccagagggctgaaggggaagaagaattctgttcctgtgaccgtcgccatggttgagagatggaagcaggcagcaaagcaacgcctcactccaaagctgttccatgaagtggtacaggcgttccgagcagctgtggccaccacccgaggggaccaggaaagtgctgaggccaacaaattccaggtcacggacagtgctgcattcaatgctctggttaccttctgcatcagagacctcattggctgtctccagaagctgctggtttggaaaggtggcaaaggatagcagcaggatgctgcagccgtccagcagcccgctctgggggaaagcttcgtgtggacatcaagggcttacctgggctcggctcatacaggtggtgtcctgtctgtcggacacgacggtgttggcggccgtgctgcgggccatcagcgtggnttgttgccctggttcctgacttccccacg

SEQ ID NO: 72858 - DNA, 1701 bp, Homo Sapiens
ttcagggagcaggggatcgacggggagaccctgccactgctgacggaggagcacctgctgaccaacatggggctgaagctggggcccgccctcaagatccgggcccaggtggccaggcgcctgggccgagttttctacgtggccagcttccccgtggctctgccactgcagccaccaaccctgcgggccccggagcgagaactcggcacaggagagcagcccttgtcccccacgacggccacgtccccctatggagggggccacgcccttgccggtcaaacttcacccaagcaggagaatgggaccttggctctacttccaggggcccccgacccttcccagcctctgtgttgaggttgccgggggtaggggtggggccacacaaatctccaggagccaccactcaacacaatggccctgcctcccaccgctttatttctttcggtttcggatgcaaaacaaaaaattttaaaagaaaatgtgacttcaaaggaaaggaacaaatttccaaagacttgggggagtgaaggcagagcctggtgcagatggacgaggtctgcagacggagggcagaggtggtggaaggggccaggggcctgcaggcctccccctggaactgggactggtctcggtctgctgacgtcagggtcagctcccccgcggagctgacttcagcagcccacagctgtggggcttcagcagccacaccagcccagcccagcccagctctcgatacgtttggtctttcatgctgaaaaataaataataaagcctgtcccgtgtctactgcctcccccaactgcacagacgccagcctctaggcctgactgccagggaggtggaaacactggccaccagcccggcagcccctacaggccccccagatgggctgcctcagtcgtcctctgagagctgcagatcctccagctcgtcctccggcccctgggccagctgctgcagctccccaggggccagccccgcctctgcgtctgggtctccatcccaagaccattcaccctccgagttgctgctgtcctcctcgccctcctcctcgtcctcttcatcgtcttccaccccatgccgagtgctcaggggcctcagtatccctctctccgagaatccctcggtgtcgtcctcttcagagctgttcaggtcaaagaggtctttaaattgcttcctgtcctcatccttcctgtcagccatcttccttcgtttgatctcagggaagttcaggtcttccagccgctctttgccactgatctccagctggatctcccggtcacgcagcttgcgccagtggctgtagtacaaggtcaagggtgtcccctcttcccgggtcagcttctcccaggcttccactgcctgctgctcagagacgccgaaggaaaccctctggcggcggctgcagatgtatgccgagttctcctgaaccttcccaagcagctgctgcacctgccggcagtagttggccaccttgcactcccggaggaacgacttcagctgcaggaccacaggcagcaccagctccgggaagccgatgcagtgtgcctggctgtgcaggtactccagggtgaggtcgtacagctgctccaccaggccgtcccggtacgccttctcctgcaggttgacattggacagcttcaggatcacggagaagttgatgggcttggagctcatgcggccacccaggctcgctccttg

SEQ ID NO: 72859 - DNA, 1567 bp, Homo Sapiens
  misc_feature (914)..(927): n is a, c, g, or t
gggcgcatgagcagtgctgctcccaacccgccagtcgcggtctccggcgccagctacgccgctgccgctgtcactatggcccattacaaagccgccgactcgaagcgtgagcagttccggaggtacttggagaagtcgggggtgctggacacgctgaccaaggtgttggtagccttatatgaagaaccagagaaacctaacagtgctttggattttttaaagcatcacttaggagctgctactccagaaaatccagaaatagagctgcttcgcctagaactggccgaaatgaaagagaagtatgaagctattgtagaagaaaataaaaaactgaaagcaaagcttgctcagtatgaaccacctcaggaggagaagcgtgctgaataggattcttctcagtttgaaagacaatgaaaaatggttttgtatgacttgaatagtttgtatagtatataatcttttctgaacagatgctatagaactcttttaatatgtttaattcacctatcacactctgttaaaaacacatagaatcatcaataaaaactcaatataactttctttgggtcttaaagcaggagaatccaaagtaaatcctgaacaaaacctaaacacagccatctaactcattaccttaaaagacattctgtttattagtctgattaggaatgatggcactggttgtattttagccaagacagtttagcatggagctattccttggtgcagttcaggatatgaacacaggtacagtcattctttgaaggtgacactgttctgtatattccctataggcagctggagagatctgtgtgacacaagatgcttttgtacgggttcccatgaatcttctgctcttgtttgtgtgacatggaacaaataacttctttgccaccactttgccttagataacnnnnnnnnnnnnnnccagtttgaactctgacaccacattttccttctatgcaatcatgcctgtctgataatcttgcattgctttcctctgagctttagtgggtcctagttgcacactggcctttctgtgctgtttttcaatttgcctaataatagcagttaccctgattgtaatttatgtaactttaaacaggatcacactgtaccccctgcctgccttatttgcttactgagcacaggacagaggcaatatacaactctgggttcacacacaagctgagatgagaagaggaatgagccatatattggggaaaatcatagtttgtaggtataattatatagtgcttttctccctcaaagtatttttctagccttgaattcattttatcttcattatccctgtgaagtaggtgggacaagtataaggggaagaggggtgctgaatttttaggccaaagactgatattaatacaaatcactcactaactgtagagccttgggcattatcagtgaactactctgagatttactgtcttcatctgtttaatgagtagaatgtccgtgatgcctacctcacagggttgttgtgagggtcaaatgagaatgtatgtgaaagatttgtaaatggtaaagcactatattcttgtttgttaaa

SEQ ID NO: 72860 - DNA, 518 bp, Homo Sapiens
tttctttgggaagatatagcttattgcatatcaagtatttgaacagtgcagtcatgaactggaatgaaattttagtttcaaagcaattttaaaggtttatatgaaaagggctttcattagatttgattgtattaaatcttaaatcactgaatgatttaaaatggatagttatagaaactgatattaatacaatttactgacagtaactaagttgaatataacagttaccttgttttactattttttactcaatttagaataaaattcacctaaattcctctgtctttgccccatagcttgctcagtatgaaccacctcaggaggagaagcgtgctgaataggattcttctcagtttgaaagacaatgaaaaatggttttgtatgacttgaatagtttgtatagtatataatcttttctgaacagatgctatagaactcttttaatatgtttaattcacctatcacactctgttaaaaacacatagaatcatcaataaaaactcaatataactctcttt

SEQ ID NO: 72861 - DNA, 447 bp, Homo Sapiens
cactgacccccggtgtctcttcaggccgccgactcgaagcgtgagcagttccggagtgttggtagccttatatgaagaaccagagaaacctaacagtgctttggatttttttaaagcatcacttaggagctgctactccagaaaatccagaaatagagctgcttcgcctagaactggccgaaatgaaagagaagtatgaagctattgtagaagaaaataaaaaactgaaagcaaagcttgctcagtatgaaccacctcaggaggagaagcgtgctgaataggattcttctcagtttgaaagacaatgaaaaatggttttgtatgacttgaatagtttgtatagtatataatcttttctgaacagatgctatagaactcttttaatatgtttaattcacctatcacactctgttaaaaacacatagaatcatcaataaaaactcaata

SEQ ID NO: 72862 - DNA, 1017 bp, Homo Sapiens
  misc_feature (533)..(546): n is a, c, g, or t
  misc_feature (568)..(581): n is a, c, g, or t
gaccactgcgggcagccttggacacactgggcctgcgtggaccgctgggcctctggctacatggcctactgtccttcctggctgccctgcatgggctccatgctgttctgagcctacttactgcccaccctttgcacttcgcctgcctctttggtctcctgcaggccttggtgctggctgtcagcctccgggagcccaatggggatgaggcggccactgactgggagagtgaggggttggagagggaaggtgaggagcagaggggagacccgggaaaggggctgtgaccgtggggtgggggcaaagggtgaagagagtgtgggctttaggagaaaagtgtgaggcatgacccaaattgtaagcatagggacctcagggatggggaagaaacccgagtacgagggtgcagggccccccttcatacacaggagagaacagaactatttagggtgtttgtgtttatggacagtgagggcactgctcttggattcaccagctgttatttttgcttttacttttctcccaccttcagnnnnnnnnnnnnnnccacctccactttttaaaagcnnnnnnnnnnnnnngtatgatggtggtgaataaagaccaaagggtcctctctacctttgaaaactctcctggggtggaggagaccagggcaggatagacagacctctgcagtaagagagtggttgggaaacccagggtgttccttggatctcaggatctgagccatcgagggaagagtggggctgctaggcaagtggattagggggtctggatagggccccacaggtgacagggagcctgcagggcggatctggtgatcatgggagccagagggagtggggacagtgcaggcagtattggcaggagggccagtgcagaagggctggtagctcaggcagtgtgggggaagcactgaagcctgtagtccccacttgggggctaggggtttgctcactcagcaataaataactgtgtcacatcaaatcctaaatataccactacaaagtgaaa

SEQ ID NO: 72863 - DNA, 687 bp, Homo Sapiens
  misc_feature (327)..(347): n is a, c, g, or t
ggccggggcaacaccagttactgtgagcatcaccctggtgtggtgagtcacctctagtcggccctcttgctgctgccaaccaaatcagtattagctttgagcactgcactgtttctccctcccttggacgacacaaagactagcatgaggcactgtttgtggggggcagcccctatcctgggttccagcatggacacaggggtagcctggggcttatagagaaacagctggtttcccctacccttttccggggaagaccccacgattggcctctagtcagcaaatggagataacagagtctggcctttccaatccccatctccttgnnnnnnnnnnnnnnnnnnnnngaaaaaaattgagcacttaaacccctcccttttggagggggccccctgaagcgtcaggctgggggcagtctggtacggaacatatttattgcctccatgcatgtgtgtgtgtgtctgtgaggactggtgtgcgtggacacgtctgaagcaggcgtgtggggctctttcagggaccacagaggagggagcagtttgcagtgcccagccaccctgaaatccccaataatggtgcctcagtgggccccagagttccagtgggagagtacggttccctcctgtctccctcttcttttccgcacctccatctttgtggataataaataaatatgcacaggtaaaa

SEQ ID NO: 72864 - DNA, 700 bp, Homo Sapiens
taaggttggaaaatcccactttacttcaagtgaagtcactgggttgtccccatgaaatatctccacaatgggtgtgctagacctttactctctgtggcaccaccaagaccccctcaccctgccagagccctctgaagtgtactcagaatggaggggctggaagtggggccagtggtcctggtagtcagcctccccttctgacacaagaattatcgtggaacagcttgtgtgaccgatcaactggtctctccatctttaagccattgtcttgttgactctgttactgcagagtttggggaggtctcatggcttctcgcatcctatttcctgagcttccctgaagccaacttctggccactggtatgtgatgcgagcacagtgcctcctcctgctcctccaggaagcttctgctgattgaacgcaggccagatggcgagatccggagcaaccttcttagatcaagggaagaaaggggcacaagaggggagtaggtaacaagataaaaggagctccctcccttgatgactacagagccatcgtggcagccctgggcctccatttcagacgttcatcttgcctaagccaccaccatcagggtctcagtcagtcatcattctcatttactcgggtggctgggtgagggcggaatataccttccagctgtctgagattaagcctaagccacaccatcagggtctca

SEQ ID NO: 72865 - DNA, 1015 bp, Homo Sapiens
ggcggacctcggtctactgtctcactgtcaccaagctggatggcaagctgcggcccacaaaacagccagtcaggttggctttcctggtttcagacatgctcataccattcccatttcctcagcctcttctcactgcctccagagaggtgggtgcctgggttgagagacacagctgctacgtgatagatgttgagagacagaagccaacgaaggaggtcattcatcaacaaatatatttattggagaccgactttgtgcaaagcaatgctaatcagggttctccatggagcttccctcagctcttacctcacctccctccatttacattagggccttctcccagggtgtgcccggtgggcagtgtgggactgggggtgtgggagttggtgagagcaggaggagaggtggggacagcaagaagccacagattggcatgaaggatcctgacctgactatccatgccatccatggcccccagactgactctgcacctggccctttgccagacagctctgtctccccatgtcctctggaacagctgggcatgggtcatggccattcatgacccttaagtgccacccttcttggaagaccccctccagaagcatactggaagccacctctggaaaagcctcatatggtgatatgccaaaatatttatgtcaatgtccaaacaaagtccaatgccatgagactgaagtctttgtggaaaccactgttacagacaagcttatttccaaagccacctcatttccaaacatctcactcaggaagggaggctcaatgtaacctcaggggccagttttagcatttgaaatggttctgcttggaaaatgatgccctgcaactaaccctggtctttcccatggcaatttaaccacatttggaaggcactgccttcagctgagtttatgaacaatgaatgccaaccttcaggttctagaagattggttgcactcccaaacctttattctattatattactattaaaatattctaattttgctattgaggt

SEQ ID NO: 72866 - DNA, 651 bp, Homo Sapiens
  misc_feature (344)..(354): n is a, c, g, or t
atattttcaggaaattggctagcaaccaccacgtcctactcctttagtacaaacaggcaaagattagcattggcaaaagttaaattaaaaataaagaacctagacatgtacattacagagatgaaggcgcaaacattttttaaacttcgaaaaccacagacaggcaaaaacatgtgtttgttcctcagcaagaattctccacatcttagtggctctgagaggaggctggggcatgtcccattctgcgttgtatcctcagtgctgggcacaaggtacaggtctaagagtcaaatacataaccaaagccaaactgcctgtgggaatgaaactatgatattttgacnnnnnnnnnnncttttatagcaagaactttgtcctgatatgagggagaaggaagccagtggcaaaaacagatggaatctgctatgcactaattccaacttgtgtgagagcttatttcactgggccccagtcttcctccagtctaagacatatgggtgatgtaataaccagctcagggacccaatataaaagcaaacaacctagaagtcatcctgtgaaagcactgaattatttacagaggatgttaccagacccactctaaaccaaataagcccttctagagaaatgagcatgaagtatgagaagaaa

SEQ ID NO: 72867 - DNA, 1053 bp, Homo Sapiens
gggaactcagaacacttagtccctatttgatgttaaaatatgaccgttaaacttctgggtaagataatgaatggcactatggtttatactgtttctgttttatgggctcttccagagacgtgaactggaaaaggctctgcagtgtctgggattcgctcagtgctgcaggggagggcaggtgtgaggggaatggccctggagggtgatggggctggggcatccgatgcagctttatagttctgtaattaccacttttaaactttttattacgaaaaatgtcaaggaccctggaattacggtgaggtaggcaggataatggccgccaagatgcccgtgttgtgacccccagaccttgtgagtgcctcacatggggagattgtcctaggtcatcttgcaggcccagggcagccccatgggcccttaaagcttgagagcctttcctgctgagtctgagagatgccagaagcaggagaggttagaacccgaggagggccgcacctgcgctgctggccttagaggaggaccgaggagtgtggtgcccctaagcagctgggactggggacctccgtcccagccctgcaagaaactgaattctgccagcagcccccatgatggaggaaaggaaggatcctgccctgccagcaccttgacctctgaccgccacaattgtaagcctgaggttttgtgtagtcaccatagaaaactcacacacataagaactctgtactgattcaacaatagaacatgtcacacacgaactggaaactgattctgtgggcgacaagagtctatagtaaacgttatgacagattctttgaatgcgctaatctcagactggactaaagttgggattaaatttaatttgtacttgagttcagtgcattgctgttctgggcataggaaatccaggttgctggtgatgaacagctgaaaagagctgtgtcaccatggttgtctctgtcagtcatgtgaccacccttacccttgtaaaatcaagcaagggagagattattttctaatgtaaatgaaaataaaaaataaagcagcttgccg

SEQ ID NO: 72868 - DNA, 934 bp, Homo Sapiens
gggggcctccgctcattcctgaccccgcagtgggcgcgatggcggaggctgtactgagggtcgcccggcggcagctgagccagcgcggcgggtctggagcccccatcctcctgcggcagatgttcgagcctgtgagctgcaccttcacgtacctgctgggtgacagagagtcccgggaggccgttctgatcgacccagtcctggaaacagcgcctcgggatgcccagctgatcaaggagctggggctgcggctgctctatgctgtgaatacccactgccacgcggaccacattacaggctcggggctgctccgttccctcctccctggctgccagtctgtcatctcccgccttagtggggcccaggctgacttacacattgaggatggagactccatccgcttcgggcgcttcgcgttggagaccagggccagccctggccacaccccaggctgtgtcaccttcgtcctgaatgaccacagcatggccttcactggagatgccctgttgatccgtgggtgtgggcggacagacttccagcaaggctgtgccaagaccttgtaccactcggtccatgaaaagatcttcacacttccaggagactgtctgatctaccctgctcacgattaccatgggttcacagtgtccaccgtggaggaggagaggactctgaaccctcggctcaccctcagctgtgaggagtttgtcaaaatcatgggcaacctgaacttgcctaaacctcagcagatagactttgctgttccagccaacatgcgctgtggggtgcagacacccactgcctgatctcacttctgtcagatgctcccatccactattaatgcactaggtgggaggagagggcggcaatgacactgcacctctcctttcccaccgcattccctggagctccctaaataaaactttttttaacgtga

SEQ ID NO: 72869 - DNA, 2385 bp, Homo Sapiens
  misc_feature (2295)..(2334): n is a, c, g, or t
ttgtgatgtggaagcaaggacccagtcctactgggacaccaaccccacgagggctcagggatactcgggcctttctgtgaaagttgtaaactccaccacagggcctggcgagcacctgcggaacgccctgtggcacacaggaaacacccctggccaggtgcgcaccctgtggcatgaccctcgtcacataggctggaaagatttcaccgcctacagatggcgtctcagccacaggccaaagacgggtttcattagagtggtgatgtatgaagggaagaaaatcatggctgactcaggacccatctatgataaaacctatgctggtggtagactagggttgtttgtcttctctcaagaaatggtgttcttctctgacctgaaatacgaatgtagagatccctaatcatcaaattgttgattgaaagactgatcataaaccaatgctggtattgcaccttctggaactatgggcttgagaaaacccccaggatcacttctccttggcttccttcttttctgtgcttgcatcagtgtggactcctagaacgtgcgacctgcctcaagaaaatgcagttttcaaaaacagactcagcattcagcctccaatgaataagacatcttccaagcatataaacaattgctttggtttccttttgaaaaaacatctacttgcttcagttgggaaggtgcccattccactctgcctttgtcacagagcagggtgctattgtgaggccatctctgagcagtggactcaaaagcattttcaggcatgtcagagaagggaggactcactagaattagcaaacaaaaccaccctgacatcctccttcaggaacacggggagcagaggccaaagcactaaggggagggcgcatacccgagacgattgtatgaagaaaatatggaggaactgttacatgttcggtactaagtcattttcaggggattgaaagactattgctggatttcatgatgctgactggcgttagctgattaacccatgtaaataggcacttaaatagaagcaggaaagggagacaaagactggcttctggacttcctccctgatccccacccttactcatcacctgcagtggccagaattagggaatcagaatcaaaccagtgtaaggcagtgctggctgccattgcctggtcacattgaaattggtggcttcattctagatgtagcttgtgcagatgtagcaggaaaataggaaaacctaccatctcagtgagcaccagctgcctcccaaaggaggggcagccgtgcttatatttttatggttacaatggcacaaaattattatcaacctaactaaaacattccttttctcttttttcctgaattatcatggagttttctaattctctcttttggaatgtagattttttttaaatgctttacgatgtaaaatatttattttttacttattctggaagatctggctgaaggattattcatggaacaggaagaagcgtaaagactatccatgtcatctttgttgagagtcttcgtgactgtaagattgtaaatacagattatttattaactctgttctgcctggaaatttaggcttcatacggaaagtgtttgagagcaagtagttgacatttatcagcaaatctcttgcaagaacagcacaaggaaaatcagtctaataagctgctctgccccttgtgctcagagtggatgttatgggattctttttttctctgttttatcttttcaagtggaattagttggttatccatttgcaaatgttttaaattgcaaagaaagccatgaggtcttcaatactgttttaccccatcccttgtgcatatttccagggagaaggaaagcatatacacttttttctttcatttttccaaaagagaaaaaaatgacaaaaggtgaaacttacatacaaatattacctcatttgttgtgtgactgagtaaagaatttttggatcaagcggaaagagtttaagtgtctaacaaacttaaagctactgtagtacctaaaaagtcagtgttgtacatagcataaaaactctgcagagaagtattcccaataaggaaatagcattgaaatgttaaatacaatttctgaaagttatgttttttttctatcatctggtataccattgctttatttttataaattattttctcattgccattggaatagatatctcagattgtgtagatatgctatttaaataatttatcaggaaatactgcctgtagagttagtatttctatttttatataatgtttgcacactgaattgaagaattgttggcnnnnnnnnnnnnnnnnnnnnnnnnnnnnnnnnnnnnnnnngcttttgagctcccatttttactatttgccatacctttttctagggctcgt

SEQ ID NO: 72870 - DNA, 1313 bp, Homo Sapiens
gggaccgtgacaatgcagctgaggaacccagaactacatctgggctgcgcgcttgcgcttcgcttcctggccctcgtttcctgggacatccctggggctagagcactggacaatggattggcaaggacgcctaccatgggctggctgcactgggagcgcttcatgtgcaaccttgactgccaggaagagccagattcctgcatcagtgagaagctcttcatggagatggcagagctcatggtctcagaaggctggaaggatgcaggttatgagtacctctgcattgatgactgttggatggctccccaaagagattcagaaggcagacttcaggcagaccctcagcgctttcctcatgggattcgccagctagctaattatgttcacagcaaaggactgaagctagggatttatgcagatgttggaaataaaacctgcgcaggcttccctgggagttttggatactacgacattgatgcccagacctttgctgactggggagtagatctgctaaaatttgatggttgttactgtgacagtttggaaaatttggcagatggttataagcacatgtccttggccctgaataggactggcagaagcattgtgtactcctgtgagtggcctctttatatgtggccctttcaaaagcccaattatacagaaatccgacagtactgcaatcactggcgaaattttgctgacattgatgattcctggaaaagtataaagagtatcttggactggacatcttttaaccaggagagaattgttgatgttgctggaccagggggttggaatgacccagatatgtttagtgattggcaactttggcctcagctggaatcagcaagtaactcagatggccctctgggctatcatggctgctcctttattcatgtctaatgacctccgacacatcagccctcaagccaaagctctccttcaggataaggacgtaattgccatcaatcaggaccccttgggcaagcaagggtaccagcttagacagggagacaactttgaagtgtgggaacgacctctctcaggcttagcctgggctgtagctatgataaaccggcaggagattggtggacctcgctcttataccatcgcagttgcttccctgggtaaaggagtggcctgtaatcctgcctgcttcatcacacagctcctccctgtgaaaaggaagctagggttctatgaatggacttcaaggttaagaagtcacataaatcccacaggcactgttttgcttcagctagaaaatacaatgcagatgtcattaaaagacttactttaaaatgtttaaa

SEQ ID NO: 72871 - DNA, 967 bp, Homo Sapiens
  misc_feature (206)..(206): n is a, c, g, or t
gcttgaattgtgttcgggaggttccatttaggcacatggatattaaaggggagcaaggcccattgattagggcccagagagggcccaatctggaggttaccttgccggatttccaagcggagggcccaaaagttgcccaaatcactaaacatatctggggtcattcccaacccccctgggtccagcaacatcaacaatttctctcnctggttaaaagatgtccagtccaagatactctttatacttttccaggaatcatcaatgtcagcaaaatttcgccagtgattgcagtactgtcggatttctgtataattgggcttttgaaagggccacatataaagaggccactcacaggagtacacaatgcttctgccagtcctattcagggccaaggacatgtgcttataaccatctgccaaattttccaaactgtcacagtaacaaccatcaaattttagcagatctactccccagtcagcaaaggtctgggcatcaatgtcgtagtatccaaaactcccagggaagcctgcgcaggttttatttccaacatctgcataaatccctagcttcagtcctttgctgtgaacataattagctagctggcgaatcccatgaggaaagcgctgagggtctgcctgaagtctgccttctgaatctctttggggagccatccaacagtcatcaatgcagaggtactcataacctgcatccttccagccttctgagaccatgagctctgccatctccatgaagagcttctcactgatgcaggaatctggctcttcctggcagtcaaggttgcacatgaagcgctcccagtgcagccagcccatggtaggcgtccttgccaatccattgtccagtgctctagccccagggatgtcccaggaaacgagggccaggaagcgaagcgcaagcgcgcagcccagatgtagttctgggttcctcagctgcattgtcacggtga

SEQ ID NO: 72872 - DNA, 1012 bp, Homo Sapiens
  misc_feature (54)..(54): n is a, c, g, or t
  misc_feature (73)..(73): n is a, c, g, or t
  misc_feature (98)..(98): n is a, c, g, or t
  misc_feature (132)..(132): n is a, c, g, or t
  misc_feature (155)..(584): n is a, c, g, or t
ccttccgaggagagcgacagttccgtagcgcagtcgaacagagaccacgagagntcaggggaacgctgttctnatgtccgtcggttcgccactctganttagctcgatttgtgatctgtcaggggcggagcntatgaaaacgccagcacgcgccnnnnnnnnnnnnnnnnnnnnnnnnnnnnnnnnnnnnnnnnnnnnnnnnnnnnnnnnnnnnnnnnnnnnnnnnnnnnnnnnnnnnnnnnnnnnnnnnnnnnnnnnnnnnnnnnnnnnnnnnnnnnnnnnnnnnnnnnnnnnnnnnnnnnnnnnnnnnnnnnnnnnnnnnnnnnnnnnnnnnnnnnnnnnnnnnnnnnnnnnnnnnnnnnnnnnnnnnnnnnnnnnnnnnnnnnnnnnnnnnnnnnnnnnnnnnnnnnnnnnnnnnnnnnnnnnnnnnnnnnnnnnnnnnnnnnnnnnnnnnnnnnnnnnnnnnnnnnnnnnnnnnnnnnnnnnnnnnnnnnnnnnnnnnnnnnnnnnnnnnnnnnnnnnnnnnnnnnnnnnnnnnnnnnnnnnnnnnnnnnnnnnnnnnnnnnnnnnnnnnnnnnnnnnnnaagaattcggcacgaggggaaaaaaggaggatagaaaaaggatggaagaaagaagcattgaaaacaaagacattcttcccacttcttggatttttaaaccacagtctggagtgatagctactgtagaaaggaaatagactttgtatgaactctttaagttgaaaagtaaaaaatatatgtggtttggatgtgtgctttaattcagctttagaaattaataccactacccgtgaattatatggcctgacaatatgaattaggtgtactgtactgaagaacagtactccacaaacatgggtggtaacaagagttccatcccaggaggccaaacggtgcaacagaagggtaggttagatgctattaagaaggcacttaatagtacatcatgtaagatggcaactgtattaaagaaaaatccggaaaacaaa

SEQ ID NO: 72873 - DNA, 2127 bp, Homo Sapiens
  misc_feature (47)..(81): n is a, c, g, or t
  misc_feature (766)..(794): n is a, c, g, or t
  misc_feature (1101)..(1116): n is a, c, g, or t
  misc_feature (1439)..(2057): n is a, c, g, or t
  misc_feature (2059)..(2061): n is a, c, g, or t
aaacctggatcgagcgcagcgagtcatatgagcgaggaagcggccgnnnnnnnnnnnnnnnnnnnnnnnnnnnnnnnnnnncagtcgacggtaccggacatatgcccgggaattcggccattacggccgggaataaacaagataatgcattatacaatttgggcatttctcgtttctcaagtgtatgcatcatggtaaatataaactaaccacaagataggtagattgattcatttcattttaatctccttgtgtaattcagtacctccataattgttctaatcttcttcccactgtttacaaattaccagttaattaactcgtgaaagaaaaattcacatatcagaataaaaataaatgtatactcactttataaaaatcaccactgctgtctttccttaatactagcagtggaaatgtaagtggcttactctacaaattttggtgctggcaaatacataggcaaactgttgggagctgctctagttacattcctcccttcttattccctttttctcttcctcactttattgcataacatattcctgtacccaaagcattctaccacagttctatttgactcccacttgtaataactcctttaaaaaattccatgtttaaccatatgaccctgcttgcttactcatattctccctccctctccccttcctttctctctcttccagaagtcatttgcctggtttgaaatatttgtagggattgcttattatatcattttagctgatgaacctcaggacaacgtctnnnnnnnnnnnnnnnnnnnnnnnnnnnnnaaatctcagctgttgaagagtgggcttggaatcagacttctgtgtccagtaaaaaactcctgcactgaagtcatttgtgactttgagtagttaccagactgattccagtggaacttgatctaatttcttttgatctaatgaatgtgtctgcttaccttgtttccttttaattgataagctccaagtagttgctaattttttgacaactttaaatgagtttcattcacttcttttacttaatgttttaagtatagtaccaataatttcattaacctgttctcaagtggtttagctaccattctgccannnnnnnnnnnnnnnnaattttatttgcttgagcacactgatcaaccactgaactgccttcttccattgtcctgcaatgatataagggttacatttttgtgtatatggctttcatagttgggatttcagagcactgataccagatattttcagtttgttctctgggggaatttcatttgcatctatgtttttagctatctgtgataacttgttaaatattaaaaagatattttgcttctattggaacatttgtatactcgcaactatatttctgtaaacagctgcagtcaaaaataaaacactgaaagttttcaaaaaaaacctcgttccgaattcttnnnnnnnnnnnnnnnnnnnnnnnnnnnnnnnnnnnnnnnnnnnnnnnnnnnnnnnnnnnnnnnnnnnnnnnnnnnnnnnnnnnnnnnnnnnnnnnnnnnnnnnnnnnnnnnnnnnnnnnnnnnnnnnnnnnnnnnnnnnnnnnnnnnnnnnnnnnnnnnnnnnnnnnnnnnnnnnnnnnnnnnnnnnnnnnnnnnnnnnnnnnnnnnnnnnnnnnnnnnnnnnnnnnnnnnnnnnnnnnnnnnnnnnnnnnnnnnnnnnnnnnnnnnnnnnnnnnnnnnnnnnnnnnnnnnnnnnnnnnnnnnnnnnnnnnnnnnnnnnnnnnnnnnnnnnnnnnnnnnnnnnnnnnnnnnnnnnnnnnnnnnnnnnnnnnnnnnnnnnnnnnnnnnnnnnnnnnnnnnnnnnnnnnnnnnnnnnnnnnnnnnnnnnnnnnnnnnnnnnnnnnnnnnnnnnnnnnnnnnnnnnnnnnnnnnnnnnnnnnnnnnnnnnnnnnnnnnnnnnnnnnnnnnnnnnnnnnnnnnnnnnnnnnnnnnnnnnnnnnnnnnnnnnnnnnnnnnnnnnnnnnnnnnnnnnnnnnnnnnnnnnnnnnnnnnnnnnnnnnnnnnnnnnnnnnnnnnnnnncnnntcgggagcgtgcgcttctcatagctacgctgtaggtactcattcgtgtaggtcgtcgctccagctg

SEQ ID NO: 72874 - DNA, 1165 bp, Homo Sapiens
  misc_feature (84)..(84): n is a, c, g, or t
  misc_feature (92)..(92): n is a, c, g, or t
  misc_feature (104)..(104): n is a, c, g, or t
  misc_feature (137)..(137): n is a, c, g, or t
  misc_feature (145)..(145): n is a, c, g, or t
ccgaaggagagtttcagattagctcaccaggtgagtgcttgagtactggacacagagtgaaactcccagccagtctacgtcccnaggagccntgccatgcatgntatgagtggatccagcagatccatcagtatacnacatgccntgaccacatgtgcacacatcatggacacccaacccagagaaacaaggatcagctgatccgggcagccgtgaagtttctgggacaccgacaccatctgctacagggtggaggagcccgagacattagtggaactcaaaaggaatgagtgggatccaatcatcgaatgggctgagaaaagatacggcgtggagatcagctcctccaccagcataatgggacccagcatccctgccaaaactcgggaggtgctcgtcagccacctggcatcttacaacacatgggctttacaagggattgagtttgtagctgcccagctcaagtccatggtgctaaccttgggcctgattgacctgcgcctgacagtggagcaggccgtgctgctgtcacgcctggaggaggagtaccagatccagaagtggggcaacattgagtgggcccatgactatgagctgcaggagctgcgggcccgcaccgccgccggcaccctcttcatccatctctgctccgagagcaccacagtcaagcacaagctcctgaaggagtgaggcctgggcagagcacactcagcaggatagaggcagtgcagccacagctcccccggccttcagggctccccagcctgtggggctggcttccttggcttttggggactcggcctcagcgtcaccctgagattccccccgagacacagtgcgctagtacggctgtccggaggtcagcctgatttcaacccaggtgcccctggcctggccagcagtgaatgtaggagatgaattgtgcaagtgactttctctcgactctgattttattaaatatttctccaccctggaaatgtgctgagccctgttttcacgtatgcctctgcacttctccattcttcctgttttgtctaggttccagagggttaaacagcttatctcccatggcgtgtttggatatctgctgcctgtggtcaggaaccttgcactggggaaacaatcatgtaatccacagacaactctatttgtgttcttcagcctc

SEQ ID NO: 72875 - DNA, 1003 bp, Homo Sapiens
  misc_feature (11)..(11): n is a, c, g, or t
  misc_feature (87)..(87): n is a, c, g, or t
  misc_feature (111)..(111): n is a, c, g, or t
  misc_feature (239)..(239): n is a, c, g, or t
aagtattcatntctgaatattgctgaaagacaaattcagtactactctcacaattgagcatatcacattcatgagcagaatcatgtnaacgcacacacaaagatacactgntgacagcaagagaacccggtctccagatcacagttagccctttatatactgcagtgacctgtttttctgaaggctccccgcaaatgaagtcctgaatggaaaaatcccataagtccataaattaactntgataaatatttttagaacagacaaaaagaaaatattgagtgatgtagttctaatcctcctaatatggaacctggcaagactgaatcattttactgtgaaatatataaacacaatagaatgagccaacatgatggtttctctccagtaagagtttttcttttggaaatgaggttaacctagccccaaatctagcaattctcataaaatccgattttagaattagcctcccagattaatctgaatgattgacttattttttcttaggcaagtcagtaagccacccactagacagccatatccagcaaaataagagaagtttccagatgccaaatgataagccaccatcaacccagaggggaagccttctggttggtttggctgtatgagattcaggaaggccagaatacccaaaattattcacacgacgttaacttattggtactggctaagcaatacatgtatttcctaaaggaggagatggtcttttggttgatttatggacacacttgtttcatctgactgtaaatatattgcatgctttattctgatggtgcactatttcatccagcaagcttttcatctgagaatgtttaatgttgaccttattcttagagcaagtagatctaaatatttttcagctgagttattagggagtcattattctgtggtacaatgctgcaaaaagcatcatgtggaagaatgggaactatgcttactttatgaagtgatgtataacacaatgaaatctgttttacaactaaaa

SEQ ID NO: 72876 - DNA, 754 bp, Homo Sapiens
  misc_feature (15)..(15): n is a, c, g, or t
  misc_feature (449)..(456): n is a, c, g, or t
  misc_feature (460)..(474): n is a, c, g, or t
ttcctaacaatgtcntggaagtgggatgatgtaaagggagaaaggccacagtccaatccctctgccttcagatagggaactcaaatcctgaaattactgttttctttctggccttttctcctggttagaggaggaagcggaaagtagttttgagtaatactttgttcatattaccccccttttgttttgtttctggcccctctaccaatagggcagtagcctcctgccctggatgggtataaggtgggcttggtccaacaggtgcccagagggtacatactcctttctggggagagaatgctccctaccatatagttgacagtggttaggaactctccctttccctacctaccttccttttaatagcagaattcctatttttcccttgattatgtgtattgatcaccctgcaatcctattatgtatctgagtgtgtgtatgtgtgtgtnnnnnnnntatnnnnnnnnnnnnnnnttctttaaaatttctgtggtttgtggctttttcttccatacattagttcccaccatcgcatgcccagggaccactgcctggcattatcgcatgctgggatcatcgggggagggtagtgaagctcaccactgtcctttgttttggagatttttatttttgcataagtagtccatcctatacagatagctgattaactgtattcccctttcccctatggctgctggtgtaaataaactgcatctccccattggtaaacagtaataaaattttaaaaaatgaa

SEQ ID NO: 72877 - DNA, 731 bp, Homo Sapiens
  misc_feature (83)..(83): n is a, c, g, or t
ctaccaaagctgctggagcctgaggcagagaaccagaggccggaggcagactgcctcttaacagccaggaatctcagaggatntgaaaaaggtgaaggacaggatgggcattgacagtagtgataaagtggacttcttcatcctcctggacaacgtggctgccgagcaggcacacaacctcccaagctgccccatgctgaagagatttgcacggatgatcgaacagagagctgtggacacatccttgtacatactgcccaaggaagacagggaaagtcttcagatggcagtaggcccattcctccacatcctagagagcaacctgctgaaagccatggactctgccactgcccccgacaagatcagaaagctgtatctctatgcggctcatgatgtgaccttcataccgctcttaatgaccctggggatttttgaccacaaatggccaccgtttgctgttgacctgaccatggaactttaccagcacctggaatctaaggagtggtttgtgcagctctattaccacgggaaggagcaggtgccgagaggttgccctgatgggctctgcccgctggacatgttcttgaatgccatgtcagtttataccttaagcccagaaaaataccatgcactctgctctcaaactcaggtgatggaagttggaaatgaagagtaactgatttataaaagcaggatgtgttgattttaaaataaagtgcctttatacaatg

SEQ ID NO: 72878 - DNA, 1194 bp, Homo Sapiens
  misc_feature (176)..(196): n is a, c, g, or t
  misc_feature (944)..(962): n is a, c, g, or t
  misc_feature (1168)..(1168): n is a, c, g, or t
gacagctcatatctcgtgtttgtgattgcagtaattcacgaacgttgactgtagattaagatcttaggattgcctggcagaattgcagagcgagtagtatactttgggattcatgcgtcaacatttatccatttattcaaactgttttccactttccagtccacacaccacccccnnnnnnnnnnnnnnnnnnnnngtcacaagtggatacttgaattgtgcctagtaacttttaaaagcatctaataccacccaactctagatttgcagtttaggacttcaagttcagaaccaaaaagcagagaatcgtttcatgtgacatgatgtttctatagacctcttgctctctaggtgacaatgcagagccagggcaaaggtgtttaagctgtgtcaccttccacagctttgtggccacattcatatttagataagctcggactctgctcccctcttctggagatggggagaggcaagtgtgtatgtgttgtcatacttactgcattaattcttcactcgaaccgtttacatcagcgaataaacccattgttcaatgcaaagtgcaaacagtgaaacatgaacttaaataaactggactagacccatcacatccaacaggatctatttagatttatagcatttaataaagtataagtcagaattcacaatatcttaaactgtgctgtttcctaagatcaagtaacagccaagtcagtgtaattttatgaaacctgtaatggccacatttgttgtgtctccgatgtatttctataattgcattaacaggaaaaaacttaatccaatataccagtgactttgagtcttaaatgttgcaagcaaaggataaaaattcaagggaattttgtcagatatggttactttcacattttcagttgttacttgattgtctccaaagccgtatatgtatcagacatataaatgtagtnnnnnnnnnnnnnnnnnnntagaaaacctctactataaaaaccaatgaactaaaaagaagtataaagcagaaaaaccatttgaatcaggctcagctcttcatctggaaagtaaagtttatataaaagtagtaaaaactagatattttataaaaattattggtagttcaagcgacgcgtgggtcgacgatatcccgggaattccgaccgtacccagcctgcttttntcaccactgttcatagtgtacatgct

SEQ ID NO: 72879 - DNA, 471 bp, Homo Sapiens
  misc_feature (98)..(138): n is a, c, g, or t
ggaagtccctaaactgcaaaatctaagagttgggtggttattaaaatgcttttaaagtcaactgtggcaccaattctaatgtaatccaacttgtgacnnnnnnnnnnnnnnnnnnnnnnnnnnnnnnnnnnnnnnnnnggcactgggaaaagtggaaacaaacatgtattgaaatacatattggaaataaaaatggtttgagcgtcagtgatattctcccagaatgtacttatcttacctcggcatgtactgtagtcactcagtatttgtatatgttgctagaatttagattgtaaaatagtgaaattttaatgtgttcatttgtttttaatgtatatatgtcttgctcagattatttggtttaaataaaacaacccttgaggtttgtagctttttcccttatactaggccaccccctttcccagggggaatttaattcccattgtcgggcccgcccctccgggccccttt

SEQ ID NO: 72880 - DNA, 1216 bp, Homo Sapiens
ggagtctccacacagtggtggggaggccttttggacagacggcagtcgggccccagagcaagaaggttggtgagggaagggctcagcttcccaccccacgtacagcaagggactccccaggtgcggcccaaggctccggaccacactggccccctgcggcggaggccaacgcagggcaccaccaccaccaacttgaattccgtcatcaatgctcaccgtcaatatgtttacaagttgtagcagttgggggaaaacagtcaacctcccagtgtaaaaccaagattcccagtgaagcacctgaggccaagcaggggagaggaatgaggggagcagctggacatgggcctcctgaggcctcggggctgtccttcattgcccacatggatagacggagctgtggtgcagagaacttttcccgcaacaggtgcaggactgccagggatcggagtgcgggccgcgcacggtgccaggattccgccgaggggaagccgctcacattgcagtcatcacagacttacgcacttgtttggacagtttttccagaggggatgggaaagggccttgttctagctgaatctgtgtatcatgaccatttctgacaggcagaatgaattgtctggtagccctgtcctgacccatccaagcgctgttggggctggtggtgacgtggtcacatgtcctggcatatctggggccacgcagtttagtctcttgtcccaggagaattgttagtgacccctctttctcttgcaagccccctccacactgggttggatgataccttaatgagtgacgctggcgagaggcaccctacccgacgcagctgtgaatggccggtgatgtatgtcaggaggccacagggagcggaggagcggggcaggcagccacagggccctgcggggagcacatcctcgcctccgtccggctgctgcccttcaacaacaagccctgatttttccagcaatgccagaaacctggattttaagtcttccaatttgattcaaaaatatttttaacattgtgagccagctagacccccagtgcaccaccccatattgaaaaacagttgtctggcatcagcttcaggagcgggtccggtcattctgaaactgtccctccagaggttcttccagccccacttctatgcgatgtcatcttttctaaaagagacaaatgaagccacagggaaagtgaaataaagccttgaacctcaaaa

SEQ ID NO: 72881 - DNA, 1048 bp, Homo Sapiens
  misc_feature (859)..(859): n is a, c, g, or t
  misc_feature (926)..(926): n is a, c, g, or t
  misc_feature (933)..(994): n is a, c, g, or t
  misc_feature (1010)..(1010): n is a, c, g, or t
  misc_feature (1015)..(1015): n is a, c, g, or t
tttccagaaatgaagagctttaatattcagaccacccagatgaaatgtcatggcaaatttgataaaaaccaagagggagtgaaactgacgctgggggaggaaagggtcaagtcgagggaaggtgaaaccaaaaggcactgagcatgcgtggtggggcagggaaggacaccatcactccagagacagtatggtaacaaagggacaggaatggtccaggccagcttcaggctcttcagaagccagagagatgtccaagtctaccaaaccgagttctccaaggcttttcaagaaatgggatttgcttgcaagatgaatgagggaggaggtcccatggcttctaagagatcaacccaagtcttccaatactcactgctaagtcccacctgggtcccccagagccaggaagctccctggtggcaggtccccctcttgccctcacggccctggagcgcttgaaggtgctggtccctgggaaggaggagcgaggaggaccccctccggagctggggagggaggtgcactgggttacagagccagcagagtgggggagttcaaggagtctgatgattggtccccgctgctactgcttctgcggtgagccttggagcaggattcggagggagatgcgggtgactcctgctccaggacgctaggataggtgaagacgaggttcgaggtgcccggagtgacagcaggtgtggaggtcaccacgatgggggtgtgcaggggctcctcaccgtagaagcccccagcaatgctgatgggcttgatgacagagcgctgggccttgtccagccccgccgacgaggacgaggggctgtcctcttccaggggctcctgttttcacactacagcgccnaaccgagcacccccactgcgcatgggctgcagccaaggggctgctcgtgccgaattctgggctcgangggcaannnnnnnnnnnnnnnnnnnnnnnnnnnnnnnnnnnnnnnnnnnnnnnnnnnnnnnnnnnnnngctcacattcaaacanatacnagcggaagcataatgtaagctggggtgctatgg

SEQ ID NO: 72882 - DNA, 1038 bp, Homo Sapiens
  misc_feature (43)..(43): n is a, c, g, or t
  misc_feature (89)..(89): n is a, c, g, or t
  misc_feature (145)..(145): n is a, c, g, or t
  misc_feature (971)..(996): n is a, c, g, or t
ttggtgccgcgtcccaccagcgcaacatcaccctcagtcagtncagtctcatcagatcacagcgtcttcttgctcagattgctatagcnctgagtccctgctgaccgctcccgagccagatctccatacttgcgtgtccagagtntagaactgcatgtgcttcagtctggctttagaccccctgtgctacaatttacagctacagagcagccacgctcagcccgcatgcggccaccaattctggaaaccacgtgtgtccctgcgaatggggcgatcaagtccagagccggggcactttcagagtttgaaggtaactgagagcagatggtcctccatttcaactccagaagtggggctctgggagggatgttctagccctccctggcatgtcagagccaggctctgcctggaggatccctccatccggctcctgtcatcccctacactttggccaagcaagaggtggtagaaccacttggctgctcattccttctggaggacacacagtctcagtccagatgccttcctgtctttctggccctttctggaccagatcctactcttcctttctaaatctgagatctccctccagggaatccgcctgcagaggacagagctggctgtcttcccccacccctaacctggcttattcccaactgctctgcccactgtgaaaccactaggttctaggtcctggcttctagatctggaaccttaccacgttactgcatactgatccctttcccatgatccagaactgaggtcactgggttctagaacccccacatttacctcgaggctcttccatccccaaactgtgccctgccttcagctttggtgaaagggagggcccctcatgtgtgctgtgctgtgtctgcaccgcttggtttgcagttgagaggggagggcaggaggggtgtgattggagtgtgtccggagatgagatgaaaaaaatacatctatatttaagnnnnnnnnnnnnnnnnnnnnnnnnnncctgagcaggcggccgcaagcttattccctttagtgagggta

SEQ ID NO: 72883 - DNA, 730 bp, Homo Sapiens
  misc_feature (576)..(587): n is a, c, g, or t
  misc_feature (657)..(670): n is a, c, g, or t
caagctgacccagctgaagatcgcccagcgccttcgactggaccagcccaagcttgacgaggtcacacgacgcatcaagcagggagccccaacggctatgcggtcctcttagccacccaggcaacccccagtgggcttggcactgaggggatgcccacagtagagcccggtctgcagaggcggcttctcaggaacctggtctcctacttgaaacagaagcaggccgcaggggtgatcagcttgccagtgggggggtccaagggcagagacggcacaggcatgctctacgccttcccaccctgcgacttttcccagcagtacctccagtcagcactaaggacattgggcaagctagaagaagaacacatggtgatagtcatcgtcagagacactgcctagcccaagcctgtctttcccagcgtcatgtttgtgtcacaaaagcagttattttaaaatctgatcccctctctaccctaccactttggtttgaattatctcctgggttattttggttcatttgggtggggatcaaagtcctgtccaccaccaaaactaagttcttagattttgggggannnnnnnnnnnnaaacgatgagaagggaatccggttatgttgatttctagtgtacaagatactgtctgctgtggttctgtannnnnnnnnnnnnngaccaactgtatggaaagttgtcagtaaaacctttgacagaggatggatttttaaacctg

SEQ ID NO: 72884 - DNA, 1213 bp, Homo Sapiens
gtgataccgggtcccgggctatggcgccggcgcagcgctgccctctgtgccgccagaccttcttctgtggtcgcgggcacgtttacagccgcaagcaccagcggcagctgaaggaggctttggagaggctcctgccccaggtggaggcggcccgcaaggccatccgcgccgctcaggtggagcgctatgtgcccgaacacgagcgatgctgctggtgcctgtgctgcggctgtgaggtgcgggaacacctgagccatggaaacctgacggtgctgtacggggggctgctggagcatctggccagcccagagcacaagaaagcaaccaacaaattctggtgggagaacaaagctgaggtccagatgaaagagaagtttctggtcactccccaggattatgcgcgattcaagaaatccatggtgaacaggtttggattcctatgaagaacacaggaggataaagtgatcaaggagatggcagctcagatccgtgaggtggagcagagccgacaggaggtggttcggtctgtcttagaggtgggtttccctcggaggatccagaccacctcaggcagtgccagacccagaagagggtcttcagcacctagaagctggaaagggatgaacagccaagtagcttccagcttacagcagccctcaaatttggacctgccaccagctccagagcttgactggatggagacaggaccatctctgacattcattggccatcaggatataccaggagttggtaacatccactcaggtgccacacctccctggatgatccaagatgaagaatacattgctgggaaccaagaaataggaccatcctatgaagaatttcttaaagaaaaggaaaaacagaagttgaaaaaactccccccagaccgagttggggccaactttgatcacagctccaggaccagtgcaggctggctgccctcttttggccgcgtctggaataatggacgccgctggcagtccagacatcaattcaaaactgaagctgcagcaatgaagaagcagtcacatacagaaaaaagctaatcatgctctctaccaactaccatgaggctaaaagcaaagtcaacaaacccctattataccttccaccaaattctttatcattgtctttcttaggaaacagacatactcattcatttgatttaataaagttttatttttccaaatgtacagctggttggacctgt

SEQ ID NO: 72885 - DNA, 986 bp, Homo Sapiens
tgcggccgctggtggtggtgataccgggtacccgggctatggcgccggcgcagcgctgccctctgtgccgccagaccttcttctgtggtcgcgggcacgtttacagccgcaagcaccagcggcagctgaaggaggctttggagaggctcctgccccaggtggaggcggcccgcaaggccatccgcgccgctcaggtggagcgctatgtgcccgaacacgagcgatgctgctggtgcctgtgctgcggctgtgaggtgcgggaacacctgagccatggaaacctgacggtgctgtacggggggctgctggagcatctggccagcccagagcacaagaaagcaaccaacaaattctggtgggagaacaaagctgaggtccagatgaaagagaagtttctggtcactccccaggattatgcgcgattcaagaaatccatggtgaaaggtttggattcctatgaagaaaaggaggataaagtgatcaaggagatggcagctcagatccgtgaggtggagcagagccgacaggaggtggttcggtctgtcttagagcctcaggcagtgccagacccagaagagggctcttcagcacctagaagctggaaagggatgaacagccaagtagcttccagcttacagcagccctcaaattaggacctgccaccagctccagagcttgactggatggagacaggaccatctctgacattcattggccatcaggatataccaggagttggtaacatccactcaggtgccacacctccctggatgatccaagatgaagaatacattgctgggaaccaagaaattaggaccatctatgaagaatttcttaaagaaaagggaaaacgaaggtgaaaaaatcccccagaccgagtgggggccacttgatcacaggtccgggaccgtgcaggtgggtgcctcttttggcgcgttggaaaatgggcgtggggccgaaatcatttaatgagcggggaaaaggct

SEQ ID NO: 72886 - DNA, 471 bp, Homo Sapiens
tttaatcatgcctagactttaactagcactttttttcccatttccaactacaggatataccaggagttggtaacatccactcaggtgccacacctccctggatgatccaagatgaagaatacattgctgggaaccaagaaataggaccatcctatgaagaatttcttaaagaaaaggaaaaacagaagttgaaaaaactccccccagaccgagttggggccaactttgatcacagctccaggaccagtgcaggctggctgccctcttttggccgcgtctggaataatggacgccgctggcagtccagacatcaattcaaaactgaagctgcagcaatgaagaagcagtcacatacagaaaaaagctaatcatgctctctaccaactaccatgaggctaaaagcaaagtcaacaaacccctattataccttccaccaaattctttatcattgtctttcttaggaaacagaca

SEQ ID NO: 72887 - DNA, 651 bp, Homo Sapiens
tggccctgacctacctgccccgctggcccaggaagctgctcaaatccacgctggtgctcatgcccctctttggcgtccactacattgtcttcatggccacaccatacaccgaggtctcagggacgctctggcaagtccagatgcactatgagatgctcttcaactccttccagggattttttgtcgcaatcatatactgtttctgcaacggcgaggtacaagctgagatcaagaaatcttggagccgctggacactggcactggacttcaagcgaaaggcacgcagcgggagcagcagctatagctacggccccatggtgtcccacacaagtgtgaccaatgtcggcccccgtgtgggactcggcctgcccctcagcccccgcctactgcccactgccaccaccaacggccaccctcagctgcctggccatgccaaggacgatgggttcctcaacggctcctgctcaggcctggacgaggaggcctctgggcctgagcggccacctgccctgctacaggaagagtgggagacagtcatgtgaccaggcgctgggggctggacctgctgacatagtggatggacagatggaccaaaagatgggtggttgaatgatttcccactcagggctggggccaagaggaaaaacaggg

SEQ ID NO: 72888 - DNA, 1037 bp, Homo Sapiens
  misc_feature (996)..(996): n is a, c, g, or t
cagtccggaattccctggatgcgcccccgccgcctgccaccgccgctgccggctacgcgggctgcagggtggctgtgaccttcttcctttacttcctggccaccaactactactggattctggtggaggggctgtacctgcacagcctcatcttcatggccttcttctcagagaagaagtacctgtggggcttcacagtcttcggctggggtctgcccgctgtcttcgtggctgtgtgggtcagtgtcagagctaccctggccaacaccgggtgctgggacttgagctccgggaacaaaaagtggatcatccaggtgcccatcctggcctccattgtgctcaacttcatcctcttcatcaatatcgtccgggtgctcgccaccaagctgcgggagaccaacgccggccggtgtgacacacggcagcagtaccggaagctgctcaaatccacgctggtgctcatgcccctctttggcgtccactacattgtcttcatggccacaccatacaccgaggtctcagggacgctctggcaagtccagatgcactatgagatgctcttcaactccttccagggattttttgtcgcaatcatatactgtttctgcaatggcgaggtacaagctgagatcaagaaatcttggagccgctggacactggcactggacttcaagcgaaaggcacgcagcgggagcagcagctatagctacggccccatggtgtcccacacaagtgtgaccaatgtcggcccccgtgtgggactcggcctgcccctcaacccccgcctactgcccactgccaccaccaacggccaccctcagctgcctggccatgccaaggccagggaccccagcccctggagaacctcgtgagaccacaccacctgccatggctgctccccaaggaccatggggttccttcaacggctcctgctcaaggcctggaccaagaagccttctgggccttgaacggcccactgcccctgctaaaggaaanatggggaaaaccatcctgtggacccagcccctgggggcttg

SEQ ID NO: 72889 - DNA, 711 bp, Homo Sapiens
  misc_feature (18)..(18): n is a, c, g, or t
  misc_feature (27)..(27): n is a, c, g, or t
  misc_feature (64)..(64): n is a, c, g, or t
  misc_feature (124)..(124): n is a, c, g, or t
gtgagtagagctgaccgnccgcagtcnagccacacatggactcataccggaagctgcctccacncaggcagcttgagccagcagctgtgaccggcaccctgtggcccacacggccagaagtgtntgccatctggccccccgcagacgcggtctgctgcctgtggtggagatcactctggaggcggctgtcatcggccactcccgggagccctctcctaccctcagtcctccatccctggagcagttagccccatacctgggccatgctggggcgggccctgcgcccaggacggatctcatgccttctcttttctctcccccggtgatttctccaagccagtggaatcctgaagggcttcgacccactcctcaaccttgtgctggacggcaccattgagtacatgcgagaccctgacgaccagcacaagctcacggaggacacccggcagctgggcctcgtggtgtgccggggcacgtccgtggtgctaatctgcccgcaggacggcatggaggccatccccaaccccttcatccagcagcaggacgcctagcctggccgggggcgcggggggtgcagggcaggcccgagcagctcggtttcccgcggacttggctgctgctcccaccgcagtaccgcctcctggaacggaagcattttcctttttgtataggttgaatttttgttttcttaataaaattgcaaacctcaaa

SEQ ID NO: 72890 - DNA, 978 bp, Homo Sapiens
ctggtaaccggtccggaattcgagaatgggccttcctgcaccttttccctccaaattggctccgcggctgtgcagcatctctgtgacggcgcggcggctgctggggggcccggggcctcgcgctggggacgttgcgtctgcaactgcggcgcgtttctattccaaggacaatgaaggcagctggttccgctccctctttgttcacaaagtggatccccggaaggatgcccactccaccctgctgtccaagaaggaaaccagcaacctctataagatccagtttcacaatgtaaagcctgaatacctggatgcctacaacagcctcacggaggctgtgctgcccaagcttcacctggatgaggactacccatgctcactcgtgggcaactggaacacgtggtatggggagcaggaccaggcagtgcacctgtggcgattctcaggtggctacccagccctcatggactgcatgaacaagctcaaaaacaataaggagtacctggagttccgaagggagcggagccagatgctgctgtccaggagaaaccagctgctcctcgagttcagcttctggaatgagccacagcccagaatgggtcccaacatctatgagctgaggacatacaagctcaagccaggaaccatgatcgagtgggggaacaactggggctcgggcccatcaagtacccggcacgaaaaacaggaacgcaggggggccggcttcttcctcacagataggaagagctctacgtgggggcaccatctcctgggccctataaaaaacctgcaggcctcggggaggagactcgaaaacccctgcctggaaggaataagaggggtggggatggaaaatggcctaactatacaggtcccccctggggcgaaccacatgggactctaaggatcattgatcccccctttgaaaaatctccacctcctggcaaggaatgcttgcttaaaaccttcccaccccctttt

SEQ ID NO: 72891 - DNA, 823 bp, Homo Sapiens
ttaggctagtacgaggcctggtgttaattcggcacgaggcatggctccgcggtctgtgcagcatctctgtgacggcgcggcggctgctggggggcccggggcctcgcgctggggaccgttgcgtctgcagctgcggcgcgtttctattccaagggacaatgaaggcagctggttccgctccctctttgttcacaaagtggatccccggaaggatgcccactccaccctgctgtccaagaaggaaaccagcaacctctataagatccagtttcacaatgtaaagcctgaatacctggatgcctacaacagcctcacggaggctgtgctgcccaagcttcacctggatgaggactacccatgctcactcgtgggcaactggaacacgtggtcctgctgtcttggttttgtcttggctctgggaggactctgaggggcagtgctcagttcagacaagggggaactgaaggctgacaagttctgaggattacagctctgcccaggccctttctactttccctgcctgcctccctccccctgctagaagtagtttctgatttccctgaatgaaagatagtgatcttttaggccttcatatatcttctaaaattcctcatctcaaggccaccagtccccagttatcacccttggaaatcctctgtttagcttagttgcacaaaaggtagtatgtccagtggctagaggtggggtgggaagagaggaggccaggccaggccctcaggaattccctggtttccactgggccacccacttgctggacagtctgagccaagtccctcctgctggagaaaagcctggaactgcc

SEQ ID NO: 72892 - DNA, 1198 bp, Homo Sapiens
  misc_feature (595)..(706): n is a, c, g, or t
  misc_feature (825)..(854): n is a, c, g, or t
  misc_feature (963)..(963): n is a, c, g, or t
ctcgtcaccacggtcaggaggaggttcagacattctgcccagaggggctggggaaagggatgggagccaggaaagatttaggggcaggagacagacacgtaacaggaactcggaaggtagaacttagaattcagaacttgggtttcaattgtagaatttggaatctggaatacagaattgggaagaagaacagagatgacaaaagaccacttgaagagaggttcctaatactagacagatggagagtggcttggctgtttccccctgcatattggggttgaaaacttaaatgtgtagttccagtccttctatgcagagtctctcctgccctccctccttcctgcaggcaaatatacaagctagaccctgttccctcaccctgtatcctgtctcccctaattgacattctatcagcccaaccctcattctgcagggccacctggtgtgtggaggtggcgggaggggtcagtgactctgggggtctcctcagtgacccccatacctcatcatgaacccttgggtagcttgattctgcctaccatccaggaaaacttgtgctggaattgctgatggaaacaattaaatatttactatnnnnnnnnnnnnnnnnnnnnnnnnnnnnnnnnnnnnnnnnnnnnnnnnnnnnnnnnnnnnnnnnnnnnnnnnnnnnnnnnnnnnnnnnnnnnnnnnnnnnnnnnnnnnnnnntatcaaaacaattcctttgccccacgaaccacaaaacgcacgggaaaatggcccatagttgccttcataggaaaatcctggtttggcgcagggctttgcctcctaaaaaattttataannnnnnnnnnnnnnnnnnnnnnnnnnnnnnaaaaaaacccaaaggggcaggttccgaaaggtcttttttcctggaaaacaaacccccccgcggggagctccaaaaggggggtggttttttattttccccaaaatcaaanaaaaaaccccgcgcccgcggggcgggctgcaaaccagggaggtgtttttttgttcccaaaattccccctttagaggcgtttttcccgtcgacgcaaaccttggataaaggcctctatttccccaaaaaaaccgggggtgggtgtccgccaaaacccgttggaacactcttcccccacaatgagggaaaatatagcgcgcgccccgccccctgtggcggggccctctttatggtat

SEQ ID NO: 72893 - DNA, 841 bp, Homo Sapiens
gggggcgcggggcggtgcctgcgaagagccacacggcgcgacaagatggcggataaggagaagaagaaaaaggagagcatcttggacttgtccaagtacatcgacaagacgatccgggtaaagttccagggaggccgcgaagccagtggaatcctgaagggcttcgacccactcctcaaccttgtgctggacggcaccattgagtacatgcgagaccctgacgaccagtacaagctcacggaggacacccggcagctgggcctcgtggtgtgccggggcacgtccgtggtgctaatctgcccgcaggacggcatggaggccatccccaaccccttcatccagcagcaggacgcctagcctggccgggggcgcggggggtgcagggcaggcccgagcagctcggtttcccgcggacttggctgctgctcccaccgcagtaccgcctcctggaacggaagcattttcctttttgtataggttgaatttttgttttcttaataaaattgcaaacctcaaaaaaggagagaagattcagggcggcgtgccgccgactgccgactcccggtatggtgccgcggcatgctagcgttatctttggtgggcggcctcgggccctaaaaaagttttttaaaaccattcctttgggcgcggcgggcccccatagggaaagagcgaccggaggccaaacctggttccccaaggaaaaatctgggctcagtgaatctagggcgtggggttcctcccccaaatataaaaacaccccccgcgggggatacccgagcggtttttcgtacaaaatcccaaatagcagtttctgaagggtctctcatcggcgaatccg

SEQ ID NO: 72894 - DNA, 925 bp, Homo Sapiens; identical to SEQ ID NO: 15808

SEQ ID NO: 72895 - DNA, 1211 bp, Homo Sapiens
  misc_feature (1183)..(1183): n is a, c, g, or t
cggtccggaattctcgggatgggccttcctgcacctttgcggctccaacatggctccgcggctgtgcagcatctctgtgacggcgcggcggctgctggggggcccggggcctcgcgctggggacgttgcgtctgcagctgcggcgcgtttctattccaaggacaatgaaggcagctggttccgctccctctttgttcacaaagtggatccccggaaggatgcccactccaccctgctgtccaagaaggaaaccagcaacctctataagatccagtttcacaatgtaaagcctgaatacctggatgcctacaacagcctcacggaggctgtgctgcccaagcttcacctggatgaggactacccatgctcactcgtgggcaactggaacacgtggtatggggagcaggaccaggcagtgcacctgtggcgattctcaggtggctacccagccctcatggactgcatgaacaagctcaaaaacaataaggagtacctggagttccgaagggagcggagccagatgctgctgtccaggagaaaccagctgctcctcgagttcagcttctggaatgagccacagcccagaatgggtcccaacatctatgagctgaggacatacaagctcaagccaggaaccatgatcgagtgggggaacaactgggctcgggccatcaagtaccggcaggagaaccaggaggcagtgggcggcttcttctcacagataggagagctctacgtggtgcaccatctctgggcctataaagacctgcagtctcgggaggagactcgaaacgctgcctggaggaagagaggctgggatgaaaatgtctactatacagtccccctggtgcgacacatggagtctaggatcatgatccccttgaagatctcgcctctgcagtgatgctggcctacacctccacctccttccccttctccctcaggcaaccccgacagacagtggcactcctggccctggcctggctgggtttggtcttggctctggggagaactctgagggggcagtgctcagttcagacaagggggaactgaaggctgacaagttctgaggattacagctctgcccaggccctttctactttccctgcctgcctccctcccccctgctagaagtagtttctgatttccctgaatgaaaagatagtgatctttttaggccttncatatatccttctaaaaattccctcatc

SEQ ID NO: 72896 - DNA, 661 bp, Homo Sapiens
catcaggccggcctcggccaacatctccctgtatgagcgctggcggtctgcctctaaccacagcgagatgttctctgctgaccaggtcgacaaatgctacaagtgcatcgtcaagcagggccagaccctcttcatcccctcaggctggatctacgccacactcacccctgtggactgcctggccttcgcgggacatttcctccacagcctgagtgtggagatgcagatgagagcatatgaagtggaaaggaggttgaaactgggcagcctgactcagtttcccaactttgaaactgcgtgctggtacatggggaagcacctgctggaggcattcaaaggctctcacaaatctgggaagcagctgccccctcatctagtccaaggagctaaaattctcaatggtgctttccgatcgtggacgaagaagcaggctttggcagagcatgaggacgagctcccggagcacttcaaaccttcacagctaatcaaagacctggccaaagagatccggctcagtgagaatgcctccaaagccgtccgaccggaagtgaatactgtcgcctcgtcagatgaggtgtgtgacggggaccgggagaaggaggagcccccgtctcccattgaggccaccccgcctcaatccctcctggagaaagtgtccaaa

SEQ ID NO: 72897 - DNA, 1251 bp, Homo Sapiens
  misc_feature (282)..(296): n is a, c, g, or t
  misc_feature (317)..(368): n is a, c, g, or t
  misc_feature (432)..(573): n is a, c, g, or t
aaccagagacagtaaagctttattgtgtaaaagctgagttggtagaagtatgaaacggcaacaatgtttagcccagcccatctatttacaatatataggggttggggtttcccatacacatctgtaccacccgccctcagcctcaagatttatccctatcagcaacattcatttcctggatttgtcactggccacaaaagacacaactcttcagggtgatatcccatcacataaacctacatacacattatctcctagtccctctagctctcttcccagtcnnnnnnnnnnnnnnngagacagggtctagctgtcannnnnnnnnnnnnnnnnnnnnnnnnnnnnnnnnnnnnnnnnnnnnnnnnnnntgggatcaagtgatcctaccttagcctccccaatagttgagactacaggtgtgcaccaccacannnnnnnnnnnnnnnnnnnnnnnnnnnnnnnnnnnnnnnnnnnnnnnnnnnnnnnnnnnnnnnnnnnnnnnnnnnnnnnnnnnnnnnnnnnnnnnnnnnnnnnnnnnnnnnnnnnnnnnnnnnnnnnnnnnnnnnnnnnnnnctctcttcccagtctacagctcctacagagcactctgagggcctgtctgcccagtggaggaggcttccgctggtgttctagggggcatcttgggcattgactcaggtggggggccactctcttcttggagatgaccctggtaaagccggcgaaggcgagacagttctctctccggtggctgtttccagttgtaccatgggtaccaggggtcacctgagaccagggtgggggctggcggagtagcactcacagccccatgagaggtactgaagtcaaggtcccgtggttcaacctgggggatgtggtaaatgaggagaccatgatccctggctttctggatggcctgggtcaacccgcttgtgctgcttcacacagactcctgtgtatggagcatagaagatgatacccgtgtggggcgcagacaaattgctccaagagctttcacgtttcctaaagtcaaacatggcaactttgtgatctccacagaagggggcaagggatcccccaacaactttaattccgaacggaatacatggtcttcccaagtcccgcctgtgggggggtacacccaacccttgtggggtttgcggggggtaatatcagccccaaaacggggggccaaaaaacccataatccgccctcccggggaaattccccttcctggaattctccagaata

SEQ ID NO: 72898 - DNA, 924 bp, Homo Sapiens
  misc_feature (859)..(860): n is a, c, g, or t
cagtcgacggtaccggacatatgcccgggaattcggccattacggccggggacgtcaagatggcggcgtctgtattaaacaccgtgctgaggcggcttcctatgctatctctcttccgaggttctcacagagttcaggttcccctccagactctttgcaccaaagctccctctgaggaagattctttgtcctcagttcccatttctccttataaggatgagccctggaaatatctggaatcagaagaataccaggagcgatatggttctcgccccgtctgggctgactaccgccgcaaccacaagggtggtgtacccccacagcggactcggaagacatgtattcgtcggaataaagttgttgggaatccctgccccatctgtcgagatcacaagttgcatgttgactttaggaacgtgaagctcttggagcaatttgtctgcgcccacacgggtatcatcttctatgctccatacacaggagtctgtgtgaagcagcacaagcggttgacccaggccatccagaaagccagggatcatggtctcctcatttaccacatcccccaggttgaaccacgggaccttgacttcagtacctctcatggggctgtgagtgctactccgccagcccccaccctggtctcaggtgacccctggtacccatggtacaactggaaacagccaccggagagagaactgtctcgccttcgccggctttaccagggtcatctccaagaagagagtggccccccacctgagtcaatgcccaagatgccccctagaacaccagcggaagcctcctccactggggcagacagggccctcagagtggctctgtagggagctgtaaactggggaannagagggccaggctggggggcctcacctcctgggaatcccagcactttggggaaaccccaagtgg

SEQ ID NO: 72899 - DNA, 1321 bp, Homo Sapiens
  misc_feature (765)..(765): n is a, c, g, or t
  misc_feature (768)..(889): n is a, c, g, or t
  misc_feature (953)..(1004): n is a, c, g, or t
  misc_feature (1025)..(1039): n is a, c, g, or t
aagatggcggcgtctgtattaaacaccgtgctgaggcggcttcctatgctatctctcttccgaggttctcacagagttcaggttcccctccagactctttgcaccaaagctccctctgaggaagattctttgtcctcagttcccatttctccttataaggatgagccctggaaatatctggaatcagaagaataccaggagcgatatggttctcgccccgtctgggctgactaccggccgctaaccacaagggtggtgtacccccacagcggactcggaagacatgtattcgtcggaataaagttgttgggaatccctgccccatctgtcgagatcacaagttgcatgttgactttagggagtctgtgtgaagcagcacaagcggttgacccaggccatccagaaagccaggatcatggtctcctcatttaccacatcccccaggttgaaccacgggaccttgacttcagtacctctcatggggctgtgagtgctactccgccagcccccaccctggtctcaggtgacccctggtacccatggtacaactggaaacagccaccggagagagaactgtcttccccttcgccggctttaccagggttcatctccaaagaagagagtggcccccccaacctgagtcaatgccccaagatgccccctagaacaccagcggaagcctcctccactgggcaagacaggccctcagagtgctctgtaggaggctgtagacttgggaagagaggcccaggcgtggtggctcantcnnnnnnnnnnnnnnnnnnnnnnnnnnnnnnnnnnnnnnnnnnnnnnnnnnnnnnnnnnnnnnnnnnnnnnnnnnnnnnnnnnnnnnnnnnnnnnnnnnnnnnnnnnnnnnnnnnnnnnnnnntgtggtggtgcacacctgtagtctcaactattggggaggctaaggtaggatcacttgatcccannnnnnnnnnnnnnnnnnnnnnnnnnnnnnnnnnnnnnnnnnnnnnnnnnnntgacagctagaccctgtctcnnnnnnnnnnnnnnngactgggaagagagctagagggactaggagataatgtgtatgtaggtttatgtgatgggatatcaccctgaagagttgtgtcttttgtggccagtgacaaatccaggaaatgaatgttgctgatagggataaatcttgaggctgagggcgggtggtacagatgtgtatgggaaaccccaacccctatatattgtaaatagatgggctgggctaaacattgttgccgtttcatacttctaccaactcagcttttacacaataaagctctactgtctctggttt

SEQ ID NO: 72900 - DNA, 1986 bp, Homo Sapiens
  misc_feature (1212)..(1220): n is a, c, g, or t
  misc_feature (1843)..(1843): n is a, c, g, or t
  misc_feature (1941)..(1941): n is a, c, g, or t
aaggaagcgaggcctgggtggcgatttcggcacgaggcctccctgcagggagctgcttatgggacaccgcttcctgcgcggcctcttaacgctgctgctgccgccgccacccctgtatacccggcaccgcatgctcggtccagagtccgtcccgcccccaaaacgatcccgcagcaaactcatggcaccgccccgaatcgggacgcacaatggcaccttccactgcgacgaggcactggcatgcgcactgcttcgcctcctgccggagtaccgggatgcagagattgtgcggacccgggatcccgaaaaactcgcttcctgtgacatcgtggtggacgtggggggcgagtacgaccctcggagacaccgatatgaccatcaccagaggtctttcacagagaccatgagctccctgtcccctgggaagccgtggcagaccaagctgagcagtgcgggactcatctatctgcacttcgggcacaagctgctggcccagttgctgggcactagtgaagaggacagcatggtgggcaccctctatgacaagatgtatgagaactttgtggaggaggtggatgctgtggacaatgggatctcccagtgggcagagggggagcctcgatatgcactgaccactaccctgagtgcacgagttgctcgacttaatcctacctggaaccaccccgaccaagacactgaggcagggttcaagcgtgcaatggatctggttcaagaggagtttctgcagagattagatttctaccaacacagctggctgccagcccgggccttggtggaagaggcccttgcccagcgattccaggtggacccaagtggagagattgtggaactggcgaaaggtgcatgtccctggaaggagcatctctaccacctggaatctgggctgtcccctccagtggccatcttctttgttatctacactgaccaggctggacagtggcgaatacagtgtgtgcccaaggagccccactcattccaaagccggctgcccctgccagagccatggcggggtcttcgggacgaggccctggaccaggtcagtgggatccctggctgcatcttcgtccatgcaagcggcttcattggcggtcaccgcacccgagagggtgccttgagcatggcccgtgccaccttggcccagcgctcatacctcccacaaatctcctagtctaataaaaccttcccatctcnnnnnnnnnggagagagaactgtctcgccttcgccggctttacccagggtcatcctcccaagaagagagtggcccccccacctgagtcaatgccccaagatgccccccctaaaaacacccagcggaaagccctccctccacgtgggggcggacaagggccccttccatagcggcctcctggtaagggaagcctggttaagaccttggggcaaacaaagaagggcccacgggcgcgttggcgggggtccaaggactcactccccgcggttgaaatgcacacccccctacggatgttctgcgggtcacgctcttcatgtgcggggcgtgcaaaaagggggcgccacttgtcttccactccagcctttcacattgatacacctctccaggctgggaggcagttcccccgcggtggtatagggtcgcctgtgacgagccgtgggagcgtttggaggggtttgcgtgtcgagctacacttggttttatcttatgtttcacgaacaacctacaccaacagcgctacgactacccttccttaacccccgcggccagactttctcccctcgcccggcgtgcacaactgcgtcgcacacagtgccgccacggctgagatccataggctgtccttcaccggnttacagcctctcgtatacgcgaccgattgggcgcataccccacactacactcagcataccacaccccctacaaattcgcgcaagacgcctccatcaangcccccaacgagtccttttctcgcacccaacccgactacccgccc

SEQ ID NO: 72901 - DNA, 882 bp, Homo Sapiens
gggattcctgtcctgggcgtacgtcaagatggcggcgtctgtattaaacaccgtgctgaggcggcttcctatgctatctctcttccgaggttctcacagagttcaggttcccctccagactctttgcaccaaagctccctctgaggaagattctttgtcctcagttcccatttctccttataaggatgagccctggaaatatctggaatcagaagaataccaggagcgatatggttctcgccccgtctgggctgactaccgccgcaaccacaagggtggtgtacccccacagcggactcggaagacatgtattcgtcggaataaagttgttgggaatccctgccccatctgtcgagatcacaagttgcatgttgactttaggaacgtgaagctcttggagcaatttgtctgcgcccacacgggtatcatcttctatgctccatacacaggagtctgtgtgaagcagcacaagcggttgacccaggccatccagaaaggccagggatcatggtctcctcatttaccacatcccccaggttgaaccacggggaccttgacttcagtacctctcatgggggctgtgaatgctactccgccaacccccaccctgggtctccaggtgacccccgggtacccatgggaacaactggaaaacagccacccgggagaaaagaactggcctcggcctttcgccgggcttttaccaagggccatctcccaaagaagaagagtgggcccccccaccttgagttccaagggcccaagaaggctcccctaaaacaccaagcggaaaaccctccttcccctggggcaagacagggcccctccaaaagtgcttcttgtaggaaactgtgaaaccggggcaaaaaatagacccgtcgg

SEQ ID NO: 72902 - DNA, 1245 bp, Homo Sapiens
  misc_feature (13)..(13): n is a, c, g, or t
  misc_feature (39)..(39): n is a, c, g, or t
gggatcaatcagngactcccagaaaggaaggagaatgtngagaagggccctaagagttcgtctctcacctgggggctggtgacgtggtcaccacaagctgaagacaggctaatggggtggcgggtgtgtgtttaaacctcacgtgcctggaagctgcacattgaccaaaggagggagggaagtgctaaccatgtatagagtgggcaggcggttccagggagacaagcagcatgttattaaattgggcctaggcagttggacgataatggagaaaaagcagggatgctataatgagtcctccccaagggtgagttcagcaccccagccctgttctgcttgtatcccagtgatacttgggaggtaggaagaaaatgggagtaagagaacaatttggggctgaagggagtgtcagaggcacgttgatccttgttttgttgtcatggaaacttcggggctggtgggacttaggccaaaagctcagaggcacagccaaaatttagaagcttgctactcctacgactcggcctataaggaagagagaagctgtctgtactttggggactacattgctgaaggaaaaaaatcactccctggctaattaagattgcttccaaattgggggaatgtgtgtcatttcctttaccaaggccagtcatccctgcttccacccatggtcaggacagtcagccactacgtgatgctgtataaattggattacaaaccatattcttgttcagcttgcactaatctatataaataaaatatgtactttgaaaaaaattaggctacatgagtttcaaatggactgtgatgttatagacctgctttctctttggttctgggccagtgtcagacggggacaggggtgataggcctggtgtcctaggggccatttgtgtaccttgaggccgtgttaacatggcctgggggaaagaaagctctcctgtcacttggagtctcattcctaaaccctccttcccagggagcaagtgtggggcagggtttcagagcacaggctttggtgtccagcctgggtacatccagctgtcccgctgtctaactgacattgtgtgagatgcttactctctctgagctccctcctcctggctcccaactttattataaaatggggaaaatgattgtgcttgccctacagaattgtagtatgaattaaaagtctggatttaatgtatttaatatagaaaattttagcttttattaataaaagtttttggcatacaagtc

SEQ ID NO: 72903 - DNA, 1379 bp, Homo Sapiens
  misc_feature (12)..(12): n is a, c, g, or t
cccaccccaccntgccccttgtcctctcagagcctcagcttctgggggagacatgctctccacacaggggggaggaactaagtcatggtcctggctggaaggtactgaaggcttccgcagctttggctgcacgtcaccctcttgagcctaacctttcctgccgtccctcctgttgtgaaataaccacattctgtctctgcttggcttcccctccaccctaaagtctcaggtgacggactcagactcctggcttcatgtggcattctctctgctcagtgatctcacttaaatctatatacaaagccttggtcccgtgaaaacactcgtgtgcccaccagcggccttgaagaggcaggtctgggccagatgctgggcaggaaaccccagcggcagatgggcctgtgtgcacccaacgtgatgctatgcatgtctgaccgacgatccctcgaccagaatcagattcaggagctcagtttctttttcacttgggtctctggattcctgtcatagggaaggtatatcaggaggggaagaggcctttctagaattttctttgagcaggtttacaatttagcttacatttttcgactgtgaacgtgaataggctgctttttgctttcttctttccagaccccacagtagagcacttttcacttatttgggggaggcttcaggggactgttctcaccttaactcagccagaaagatgccctagttgtgatcaaaggtaactcgaggtggagggtagccctggggcccctcgacatcaccgtcattgatggagcctgaaccgtgtgctcctcggcagatgctgttgttgttacttccctccaagaggctggaaaagggctcagagctgctgagcaggaaccggagggtgacccatttcaggaggtgccggtaccagcctgactaggtacaggcaagcttgtgtgggcccaacaggcccttggtagagctggtgccagatgtgggctcagatcctgggcatgatgggccgagccacctcggatcccactgattggccagccgagcgagaaccaggctgctgcatggcactgaccgccgcttccagcttcctctgagccgcagggcctgctacgcgggcaagcgtgctgcctctcttctgtgtcgttttgttgccaaggcagaatgaaaagtccttaaccgtggactcttcctttatcccctcctttaccccacatatgcaatgacttttaattttcacttttgtagtttaatcctttgtattacaacatgaaatatagttgcatatatggacaccgacttgggaggacaggtcctgaatgtcctttctccagtgtaacatgttttactcacaaataaaattctttcagcaagttccttgtctaaaaaaa

SEQ ID NO: 72904 - DNA, 824 bp, Homo Sapiens
gggggtgtcataaactgtaacagtggtttgggttcagcatgtaaatgcaactttgattttcttgaggaccgattgacctgtcatgtccctgtatcctcatgctcatcatctcagcaggcctgagaggctgggtcagtttgggtgttcatcatgaggattgcttctgccatggagctgatggacatgggcaggttgctgagaaggtggggtgaaagtgagtgccgggggtgggtgagtgccctggtcttgttcataggggagcctttccctagcagtggaacgctgtggtcattttctctagcatattcccttgggaagtctagatttgctattaatctggctgagaatctaagttctgtgccttagagacagtttgcactttcccatattgtgcctgggacagccatatgattttttttcccaccaaacaagtatgcaaacagaaaccagttcaaagggggatggagtaaaagatgaggcagtagaaatgcctttgaatggttttctgtagctaattctctttaaattttgtcctgctttttttctttatgcagtgctaggtgttttaagttttctagtagtattgcttttgagttacagtataacctgagttactcctctgctctaacattgttgcagaagaactagtttattgttagccaggttgcttgaaaggttgagagtggagtggtttggcatttctgttttaaataaacatttaagctcttaatcagtactgtgcttcagtaagcctgtgcatggaccttagtctctggggataaacatccagattctaagcctccgtgaatctttgattctgtgag

SEQ ID NO: 72905 - DNA, 790 bp, Homo Sapiens
  misc_feature (749)..(749): n is a, c, g, or t
tttagtagcaaaatatactttaatggaaaaatcattttaagtaactgaataaaaatgtgtaccaggaactttcccaatagacagcagaatatgtacattttgtgagggtagagcagcatctatttaatataatttttatatagaaaatacaggcatatttaaaaatggaaacatgtaagaaagtatgtcacaaggaataacaaaatatatcacaaaataaaaaaagtaaccccaagtaacaagtttactaaacaagacccagcaccatgttggactttctttgcataagttccaggatgcccaggcactaccgaggagagatgatcctgcttttgggagagccagatggtcgtgcagtggttaaaacccagtcctccttttcctggaacagttatgtcccgtccaagaagaaagacagtgacatcggtttggtcttacacattttccaccatttaagcagggagactggcaaacagctgtatgacagcgagaccccgtccagccaggcgggcagtcacactggtaaggggccacacagcgacctccgttcagacagggaagaatgcagattggttcttcacagaggcgccccatccagccctctggacaggaacaagcatttgggcgttggcagatgcccccattctgacatggaaatcgacagacagctctgcaaataggaggtgatgtccatgttccattttctaaacaaacactcctcaggaaaccctccaacatgtatccactgntacatgagtaggtgatcatgtctccatattgataatgtacg

SEQ ID NO: 72906 - DNA, 443 bp, Homo Sapiens
tttcttgttcactcttaagtccctttattgcattcagagaatatataggtatttaaactttgacaataattttaccttgatacatccaagtttgacttgctttttaatatatttatagatataaaattaggcctctaacagtgatagggacagggagattgctgccaccaaacaatgtttcttaaaaaaataacagaagaggtaatatccttcctattcttccttcacttctgcccctcctcccacctcttcccagcctccctcacctgacctatttagggggtgatgggatgaagagaagagagtgaaggatatgtaatcaagtgcaaaatactgtggtaagtacagagaatgaataaggtggaaaggaaagtgaagagtgtgggatggttaggggctttaaggacttcccaggaaaataggattctgggatggggttgctg

SEQ ID NO: 72907 - DNA, 1624 bp, Homo Sapiens
tgggctaggtagcgaggctgggtgtgtgaattcggcacgagggctggaggcctcgtggaggacacagcagcatgggacagtcagggaggtcccggcaccagaagcgcgcccgcgcccaggcgcagctccgcaacctcgaggcctatgccgcgaacccgcactcgttcgtgttcacgcgaggctgcacgggtcgcaacatccggcagctcagcctggacgtgcggcgggtcatggagccgctcactgccagccgtctgcaggttcgtaagaagaactcgctgaaggactgcgtggcagtggctgggcccctcggggtcacacactttctgatcctgagcaaaacagagaccaatgtctactttaagctgatgcgcctcccaggaggccccaccttgaccttccaggtcaagaagtactcgctggtgcgtgatgtggtctcctcactgcgccggcaccgcatgcacgagcagcagtttgcccacccacccctcctggtactcaacagctttggcccccatggtatgcatgtgaagctcatggccaccatgttccagaacctgttcccctccatcaacgtgcacaaggtgaacctgaacaccatcaagcgctgcctcctcatcgactacaaccccgactcccaggagctggacttccgccactatagcatcaaagttgttcctgtgggcgcgagtcgcgggatgaagaagctgctccaggagaagttccccaacatgagccgcctgcaggacatcagcgagctgctggccacgggcgcggggctgtcggagagcgaggcagagcctgacggcgacaacaacatcacagagctgcctcaggctgtcgctggcccggggcaacatgcgggcccagcagagtgcagtgcggctcaccgagatcggcccgcggatgacaccgcagctcatcaaggtccaggagggcgtcggggagggcaaagtgatgttccacagttttgtgagcaagacggaggaggagctgcaggccatcctggaagccaaggagaagaagctgcggctgaaggcgcagaggcaggcccagcaggcccagaatgtgcagcgcaagcaggagcagcgggaggcccacagaaagaagagcctggagggcatgaagaaggcacgggtcgggggtagtgatgaagaggcctctgggatcccttcaaggacggcgagcctggagttgggtgaggacgatgatgaacaggaagatgatgacatcgagtatttttgccaggcggtgggcgaggcgcccagtgaggacctgttccccgaggccaagcagaaacggcttgccaagtctccagggcggaagcggaagcggtgggaaatggatcgaggcaggggtcgcctttgtgaccagaagtttcccaagaccaaggacaagtcccagggagcccaggccaggcgggggcccagaggggcttcccgggatggtgggcgaggccggggccggggccgcccagggaagagagtggcctgagcccaaaccgcaccggagcagcggctggattgaacgccccagattggggcccgagatgtggccctcggtttcctttcataaaggagttgtgtccccagcccttccactccagtaaagaactgaattggca

SEQ ID NO: 72908 - DNA, 510 bp, Homo Sapiens
tgcgctccgtgatggactgtgcccgggtcctggtcatggacaaggggcaggtggcagagagcggcagcccggcccagctgctggcccagaagggcctgttttacagactggcccaggagtcaggcctggtctgagccaggaccctcaaccgtaccccagttggaccagcccgcacagcctgcagtgctggagatggaagtgacccgtggtcatcgatagctccacacgatattgagtctagacctgtgtttgctctctgggaggaaaatggcagagaaagtggccaattatcacagagcatcagagccggaaggacctagcaatacacaggtctgcccgggcagggcccatctcgccctgtccaccctgcagccaatgtcaacagcgactctcagccccgctgtactctggactcacctgggggcctcaagcacatgcccaggctcccggctagacccttaaatcagaatctctgaggctgggaactgccatgctgtgtgtactttttac

SEQ ID NO: 72909 - DNA, 618 bp, Homo Sapiens
  misc_feature (551)..(562): n is a, c, g, or t
ttgcactaaagcagggacaggaccctgggggttcaggaagcgggtctcaggccgctggtttattcctggaggtggggctggagaccagaatggaaaggggcttcctgagctgctagggggtgaaggacccccgaacccgcatttcttgagtgagagcaaacactcgaggcaggagccagcacccctcccactgcatgcccggcccccagcccaccttgccccctgacccaccttcacccgtgccccttctttctgcccttcctcaccgaagaagggctaggaacaccctggagaggctgcaggtccggccacggacgctcagctgagccccggtctgctccttcagcctccttgctcttgttggagcacaggccccaggcttcctgccagggccccgattcttcttatgtcctccagccccgccctggcgtggacatccactcactccttccagcaataagaaccgtccttggtcgtggagagtactgtgaaacaaaccaatgcacttaccaggaggcacaagactcttgaagaagatgtaaaatgaaccnnnnnnnnnnnnacaaaaaacaaaaagcaaatattcataaagagaaataaaatgtaattttaaagtag

SEQ ID NO: 72910 - DNA, 1118 bp, Homo Sapiens
ccctgtttccaaccttctcttcccctgttgccaaggtctaactcatggatttttctctttcctcatggatgatcttcagcaagagtggactgggaagctgcacctggctcccaccttcaacaagagcctctgccatccacttgagggtattgagagccagtgggcttttgtgtagcctttttgttctgcaagcaactttctaaagttgtgtacatgaacatacacccacatccagactacagtgatttagagttgttttgattgggtaccgtgggagcagggaaattggttttttaaaaagcaactgtttaattgcttaaataagctatgtattaaatctgtctccagttagggctatcttcctagcataggccccttaagtagcatgggggatatattttttgctataacgtaaaaattttcctttaaccactgccctctccttctttctccttcaaggttctttccccctcagttttgttgttgtcttactctggagatgccaagtgtattttttctttctatgtaattttagattcgccttacaatgtaaatcttcacattggagataatattggttggaccttgcccatcttcactctagccttcgtatttgtgaaggactcagccaccttccttcttcaccccatgcttctcaccaaatttttgttgtcattgagggcacttggataactcaagttgatatttatagctgatcaatctatatgtgtcacagaactatgctgcctaaagtgatcttggctccttaatggtccttttggccccttggatagttaacagctgagtaattctaatctcttctgtgttttccttgccttaaccacaaattgtggtgctttttgtatattttatgtataaatcacaaagttgaattctgactatttttaagacaaaagtctgttaaacttttttattgtaaagaatatttattatgcgaatctctattattttatggtatttattgcaaaagactgttgaaatgtactcatgtttgaatataacaaaatatcaatacttaacggaaaataaggtgacacgaagaaagtacatatgttaactataatgcagaaaatatattaattaatgaaactgtcaaa

SEQ ID NO: 72911 - DNA, 983 bp, Homo Sapiens
  misc_feature (672)..(672): n is a, c, g, or t
  misc_feature (801)..(801): n is a, c, g, or t
  misc_feature (901)..(901): n is a, c, g, or t
  misc_feature (903)..(903): n is a, c, g, or t
gtaaacaatgctttatgcggggtagggtgggtgctggacaggcctccaggtaataaataacaggtactagcaacagcagggccagatggggagttggggacaaatgaccctgatctcaggctttgggagctcttggggtatggttaggggttcagggggacagacgttagccaagacagaggaagcagcagcaggtacgggattcccccttcccccgtggctcagtcttgccccaaagccaggccccaccaggccagggaagggggacaggtggcaacgtagcttctccggggccagggcaggttaggacacggcctctcaaagcctgggcctgggccccagcagggctggtcctggagaacaggtgagctggctccacagagctcagcagccacacggctgaggggccacggcctgggcactccgaggctgccgaagctggcggagggacgcatccccgtactgaatgccagagcccatcctctccgggtctagctcgcctgagtcaatcttgttgaggatagtgcgggcacacttgaggaacgcctcctccacgttctcgcctgtgagagcgctggtctccaggaacatcagctcattctcctgggcaaagcgggaggcctccaggaaagtgacctcccgctcagggtccaggtccttcttgttgcacanaggatgacacgatttttgggctggcagggtgcgggatccgtcagccagcagcagtgagttgtatgtctcccggctgtgatgtcgtaaacaaacaggctccagcgccctcgggtatactccgcgtcactnacgaaacgctctggcagccgtgtccaatctgtgttcacatctcccacacgtttacaccgggatcaactcacccatgttggttgggtcgtttgcgggatangngaacaaagggttaggagaaaggaagtaaagattccactcccagctctaacccaaacatccttttggggttgggtaaggaa

SEQ ID NO: 72912 - DNA, 1039 bp, Homo Sapiens
gacctacgacttcctcttcaaattcctggtgattggcagtgcaggaactggcaaatcatgtctccttcatcagttcattgagaataagttcaaacaggactccaaccacacaatcggcgtggagtttggatcccgggtggtcaacgtgggtgggaagactgtgaagctacagatttgggacacggctggccaggagcggtttcggtcagtgacgcggagttattaccgaggggcggctggagccctgctggtgtacgacatcaccagccgggagacatacaactcactggctgcctggctgacggatgcccgcaccctggccagccccaacatcgtggtcatcctctgtggcaacaagaaggacctggaccctgagcgggaggtcactttcctggaggcctcccgctttgcccaggagaatgagctgatgttcctggagaccagcgctctcacaggcgagaacgtggaggaggcgttcctcaagtgtgcccgcactatcctcaacaagattgactcaggcgagctagacccggagaggatgggctctggcattcagtggggatgcgtccctccgccagcttcggcagcctcggagtgcccaggccgtggcccctcagccgtgtggctgctgagctctgtggagccagctcacctgttctccaggaccagccctgctggggcccaggcccaggctctgagaggccgtgtcctaacctgccctggccccggagaagctacgttgccacctgtcccccttccctggcctggtggggcctggctttggggcaagactgagccacgggggaagggggaaatccgtacctgctgctgcttcctctgtcttggctaacgtctgtccccctgaacccctaacatatcccaagagctcccaaaagcctgagaccaggggtcattttgcccccaactccccatctgggccctgcctgttgctagtacctgttaatttattaccctggaaggcctgtccagacacccaaccctaccccccataaaggcatttgtttacacccttggaaaa

SEQ ID NO: 72913 - DNA, 901 bp, Homo Sapiens
  misc_feature (199)..(249): n is a, c, g, or t
tattttaaataaatattttaattctattgttgacatttacaagtagaaagcatacagtatgttacaaatatcaaaatgagaaaaatatgaatgttacataagtaacaaatataaaaaaagtattttcttaccttccctgaaagtaagaaaactattcagcataggaaaatatcagtatcaaaaacacagcttaggtgtnnnnnnnnnnnnnnnnnnnnnnnnnnnnnnnnnnnnnnnnnnnnnnnnnnngtaagtgttgaaatctgatttcatataaattataaaaactgggtacttagagtaaatgttatctggttggaaaataagtccaatcataagctttccttaggtcaattctttaaaatattaaaagcatacgaaaaattttcaataaataacttttaagagtgtttcttagaagtgctgctgagaacatcattcgcatagcaaggtggcagtgttctggggacaacatgcaaccattctgttcctaatggaagcctcatgaaagtcaggagactataatcatttgctcaaggatccagaagttttaagacaattctataagaaagcgttaaagtgctgaacaaaatgacttaatttcagtacccactgtcatgtaaaacttactcaaatactcagacatttctgagcaacatcaaatacagaaactatcattctgaaaagtgttaatatacttaatctttcattccccgataggagggttcctttttaccctttacaaggattggtttaacatcaagaatcttgcaatgcaaaatataattataataatacagttgaaacaatacacatacgcccctgggaaagcacaagttcttttctgcaatggtaaaggtatcaatttttaaaaatcccaaatcaaaccctggtaaataag

SEQ ID NO: 72914 - DNA, 847 bp, Homo Sapiens
aaatttaatatggaaagtgagaatttgaaccttcaccatccaccactctattcaggtaaaacaatgaatgagccaccttagcaggagcagatttttcccagaagctgctgcctcttcctgaggcagaaaattggattactaaggctcaaaactaaaagagatgtcagcattgttggatagaaatgtcacctatatgggatttgcctgttttaataactttgtaaggaattcttgctcttctaggggtgcctggcgcaaccgtgggcaagttactgctcctctttaaacctcgtggtggttattgaaacagatttattagaaggagagggtaggtgcagagctggagagccatgggtgaggcagcttgtgacctgcctagcagccgctgaccacctctccaacagaagcctagtcctgttcagagcagcactgtcactgcaagtccagccccctttgccaggggctccattccacccctttcctgcagggaggggtgccatgagtcttgcttttggctcatacaggagagagggaaggctgccaggcactgcttgtatccctgctgataagaggagggagtcactccaggaataagacaaaaggagaggaggaggccatcacctctggcctcttccatcgtacacttcctgtctctggtttaatcatgatgcatggagctacaacagccatcttaggtccccgaggtgcccagcatcacgtaaaacatcgatatgctaagaagaacaaaaagagcccaatctctgatgttattgagctcctgcatgaactctggacctgcctgcctcagacttctgtgaaagaataaaatttctttttgcctaaaaaa

SEQ ID NO: 72915 - DNA, 1337 bp, Homo Sapiens
ggcaaaagtgaatttcccataaggaccctaaagaccctgctacacaccttatgcaaattaaaagggcccaagatcctggaccacctaacgatgatcgacaacaaaaacgagtctgagctggaggcccatctctgccggatgatgaagcacagtatggaccagactgggagcaagtctgataaggaaacagaaaagggagcatctcgaatagatgaaaaatcatcaaaggccaaagtgaatgatttcttagctgagatttttaagaagattggctctaaagaaaacactaaagagggactagcagagttatatgaatataagaagaaatactcagatgctgacattgaaccatttctgaaaaattcctcacagttcttccagagctatgtcgaaagaggccttcgggtgattgagatggagagggagggcaaaggtcgtatttccacttcaacaggcatctcccctcagatggaagtcacatgtgtgcccacgcccacaagcacagtgtcctccataggtaacacaaatgggggaagaagtggggccatctgtctacttggaaaggctaaagatccttcgacagcgatgtgggtctggacaacaccaagccagatgaccgacctcctttgacctctttgctctccaaaccagcagttcctactgtcgcctcttccacagacatgccccacagcaaactctctcagccccgggagtcacgggagcagcaccagcattcagacctggattctaaccagactcactcttcagggaactgtgacctcctcctccttccaaaggtaacatagacgacttgaaaaaaagactggagagaataaagagcagtcgcaaatgaagctgccccactcccccggcaccctgcagctttagtttactaaactagaagtcctcatagtttaaaatggcctcagcaggcctagtgtatacaaactggttgtatgtatcatgccgtggagctagggggaggagtcattgtggcacaagtatttgtacatactctgcttctctctgtcagcgtcctgctgctctagaagactgtccgtggatgagtttagtgtacagacttgtaaacagctgccccctctctgctcagtctagttcccagatccttttctttttaattgctcatttgtaaaattgtcctaatctttcctagctttttaatagttaatattagaaactctttaatagttttcctttcagtttgtgagctcttctctgtcgccctgaagggtcactgtattctgtatgaatgcatggcatgatacaactaatttaagagtcttttataaataaagtttgcattaactatacctgac

SEQ ID NO: 72916 - DNA, 2329 bp, Homo Sapiens
  misc_feature (2177)..(2185): n is a, c, g, or t
  misc_feature (2207)..(2268): n is a, c, g, or t
tggaccggtccggattcccgggatatcgtcgaccacgcgtccggctggggcgccctccggaagcgtttccaactttccagaagtttctcgggacgggcaggagggggtggggactgccatatatagatcccgggagcaggggagcgggctaagagtagaatcgtgtcgcggctcgagagcgagagtcacgtcccggcgctagcccagcccgacccaggcccaccgtggtgcacgcaaaccacttcctggccatgcgctccctcctgcttctcagcgccttctgcctcctggaggcggccctggccgccgaggtgaagaaacctgcagccgcagcagctcctggcactgcggagaagttgagccccaaggcggccacgcttgccgagcgcagcgccggcctggccttcagcttgtaccaggccatggccaaggaccaggcagtggagaacatcctggtgtcacccgtggtggtggcctcgtcgctggggctcgtgtcgctgggcggcaaggcgaccacggcgtcgcaggccaaggcagtgctgagcgccgagcagctgcgcgacgaggaggtgcacgccggcctgggcgagctgctgcgctcactcagcaactccacggcgcgcaacgtgacctggaagctgggcagccgactgtacggacccagctcagtgagcttcgctgatgacttcgtgcgcagcagcaagcagcactacaactgcgagcactccaagatcaacttccgcgacaagcgcagcgcgctgcagtccatcaacgagtgggccgcgcagaccaccgacggcaagctgcccgaggtcaccaaggacgtggagcgcacggacggcgccctgttagtcaacgccatgttcttcaagccacactgggatgagaaattccaccacaagatggtggacaaccgtggcttcatggtgactcggtcctataccgtgggtgtcatgatgatgcaccggacaggcctctacaactactacgacgacgagaaggaaaagctgcaaatcgtggagatgcccctggcccacaagctctccagcctcatcatcctcatgccccatcacgtggagcctctcgagcgccttgaaaagctgctaaccaaagagcagctgaagatctggatggggaagatgcagaagaaggctgttgccatctccttgcccaagggtgtggtggaggtgacccatgacctgcagaaacacctggctgggctgggcctgactgaggccattgacaagaacaaggccgacttgtcacgcatgtcaggcaagaaggacctgtacctggccagcgtgttccacgccaccgcctttgagttggacacagatggcaacccctttgaccaggacatctacgggcgcgaggagctgcgcagccccaagctgttctacgccgaccaccccttcatcttcctagtgcgggacacccaaagcggctccctgctattcattgggcgcctggtccggcctaagggtgacaagatgcgagacgagttatagggcctcagggtgcacacaggatggcaggaggcatccaaaggctcctgagacacatgggtgctattggggttgggggggaggtgaggtaccagccttggatactccatggggtgggggtggaaaaacagaccggggttcccgtgtgcctgagcggaccttcccagctagaattcactccacttggacatgggccccagataccatgatgctgagcccggaaactccacatcctgtgggacctgggccatagtcattctgcctgccctgaaagtcccagatcaagcctgcctcaatcagtattcatatttatagccaggtaccttctcacctgtgagaccaaattgagctaggggggtcagccagccctcttctgacactaaaacacctcagctgcctccccagctctatcccaacctctcccaactataaaactaggtgctgcagcccctgggaccaggcacccccagaatgacctggccgcagtgaggcggattgagaaggagctcccaggaggggcttctgggcagactctggtcaagaagcatcgtgtctggcgttgtggggatgaactttttgttttgtttcttccttttttagttcttcaaagatagggagggaagggggaacatgagcctttgttgctatcaatccaagaacttatttgtacannnnnnnnncaataaaacttttccaatggcnnnnnnnnnnnnnnnnnnnnnnnnnnnnnnnnnnnnnnnnnnnnnnnnnnnnnnnnnnnnnngacagcgtatgcggccgcaagcttattccctttagttgagggttaattttggcgtaggcac

SEQ ID NO: 72917 - DNA, 458 bp, Homo Sapiens
cttaatgaaatcaagcattttaattcactgtgggaggcatcctgaccacggacatccataacagcaaagcacaaatcgttttcgtctgtagtcatatcctgaaacataggtggacaaatttttaactgagagacaaaaatcacatagttgaattgagcagaacacttaagtgctttctgcatctatttaggagtctatttcttaccaataaacttgacaacgcatttggaaaactagtgaacaccttacagctttcattttgctttaatgtttcaattcaagccggtgtaaaaataatttccaaggcatttctgtttattctttagtaatttcactactggctatgtcagcaatatctttttcaatctggttccttttgtatatgatgtcactgtgacctctgtgaaatatagtgatggcttttacctactttgaaaagaattttcacatagagtcag

SEQ ID NO: 72918 - DNA, 1161 bp, Homo Sapiens
  misc_feature (998)..(998): n is a, c, g, or t
  misc_feature (1011)..(1011): n is a, c, g, or t
  misc_feature (1029)..(1029): n is a, c, g, or t
  misc_feature (1036)..(1036): n is a, c, g, or t
aaaaaaactttacaatttaagagataaatattaagaaaataatacaagtagtactaaagagactgaagtttgggaaacaacggttatagtctgagtcatattttttagacgtgatttcgaaagaaacactaaatgtggattagaaaggaaacatccattactgtattttcgatacttgtgatgttccacagatgagctcatcacagtcttcttctacatcaggtgatttccagagttaagattcaagcaaaaatataaaagtaaaaagaaccaatttcacaccatcttggactttataaactcgtagtaccataaatgtgcaaataatctgatatttatcacagtcatttatttaaaacataaactttccaatttctgcagctttttatttggtctatactaatgcctcacaaaggcaaactcaggttgtagagttcctcctgcctggtcctcagagcaataccacatctattttctgaactcttcaggaaggattcaggactgctggccaagacttccaatggcatatgactgttcttccactgttatggccttgaagagagaaatcccctcctcctctgaatgatagtctcatggccaacattcttctgagaggactcttccatgctcacaggcacatcatgctgattttaaaaaaggaaagttggagagaaagaaagcagagcttctcctctgtggggaacagcttcttcatcacagtgcagttatgatatgttccctccttatccccctgaagccaaggcaatagatctgaaggatggtgtcagacatcataatcgggagccttgccctgggcttgccttagccagatctgtagtgtaacaaatgctcccacagtcacatgaaagaaaagctgccagaggttgcgcagttcatagagatacatgttgcatagacagattaagccaaaagtcaaaaaagatttgacattccgccagcccgtgtagtagacaagtaaataacactggtaaaggcanggctgctgtccanggaaaaatgcaatgatgntattaanatcatcaccatcactttaatggtataatggccagtttcagtgtacatctaatcacgaagttgagcaaggttcctcgaaaggcattttaaatactttctgcactcttgcattcctgtgctttgttc

SEQ ID NO: 72919 - DNA, 767 bp, Homo Sapiens
  misc_feature (47)..(47): n is a, c, g, or t
  misc_feature (344)..(392): n is a, c, g, or t
  misc_feature (497)..(565): n is a, c, g, or t
aaaccctttctgaactttcactttctatgtctacctcaaagaattgntgtgaggcttgagataatgcatttgtaaagggtctgccagataggaagatgctagttatggatttacaaggttgttaaggctgtaagagtctaaaacctacagtgaatcacaatgcatttacccccactgacttggacataagtgaaaactagccagaagtctctttttcaaattacttacaggttattcaatataaaatttttgtaatggataatcttatttatctaaactaaagcttcctgtttatacacactcctgttattctgggataagataaatgaccacagttagaaggnnnnnnnnnnnnnnnnnnnnnnnnnnnnnnnnnnnnnnnnnnnnnnnnnagtggctcagcctgagttcaaaaacctcaaaactggggaagctgacagtgcagccagccttcagtctgtggccaaaggcccaagagcccctggcaaccaacccannnnnnnnnnnnnnnnnnnnnnnnnnnnnnnnnnnnnnnnnnnnnnnnnnnnnnnnnnnnnnnnnnnnnagaaagccagaagactcagcaaacaaggtagacagtgtctaccaccacagtggccataccaaagaggctaccgattccttcctgctacctggatccctgaagttgccctggtctctgcaccttctaaacctagttcttaagagctttccattacatgagctgtctcaaagccctccaataaattctcagtgtaagcttcaaa

SEQ ID NO: 72920 - DNA, 689 bp, Homo Sapiens
  misc_feature (431)..(444): n is a, c, g, or t
caatcgagacaaagaatatcagtctcagatagcacttcaagaaaaagaatctgaaattcagcttcttaaagaacacctttgtttggcagaaaataaaatggccatccagagtagagatgtggcccagttcagaaatgttgtcacacaattggaagctgatttagacattaccaaaagacaactaggaacagagcgctttgaaagggagagggccgtacaagaacttcgccgccaaaattattcaagtaatgcttatcatatgagttctacaatgaagccaaatacaaaatgtcattcaccagaacgtgctcaccatcgatctcctgaccgaggcctagatcgatcattagaagagaatctttgctacagagatttctgacacctgaaatgattcttcacatccctgagaaaggtcaaagttacaaactgannnnnnnnnnnnnngctacatgagtgcatttatcttttaaatgcttggcaatgttaaatgtatttattaactttgtgtctctgaatctctgttctaatgtgccatgttgcagtgatctgagatgacttataaaaacaaaaatgtatatggctctttctatccatgcagtgatagtgagtgtaaaatctgcttacttcactattgaacactattctgttcactatctggagtaaataaagaagcttattaaaacaggaaa

SEQ ID NO: 72921 - DNA, 602 bp, Homo Sapiens
agcatgtaattctatttttatttcttgactacataacctagcagtggtctaatactgaccgtttcaatttaaatgctggaaaaatactgaccaagactttctgtgaaaaagataatggaaaacagaaaccagttagtaaagccatgcaaataggaagtgattttcagccccaagaggactttgtatcatctatggctccatttaaacccaagtagcatctgtcctggtggattttgaacatccttttgatttaacacagaagaaggtttgttctacctttaaaagcatatcctcttttttcccccaacagactcctcaacaagtggcttctaagacaagactggggttgttttcttactgaaaatcctgtgtttatccagtcttttccttttcaatttctgagtttagcttacctaacagcaaaacagaatcctcaaatttctcacagagcaatgaaaagcaaaacagttggtttctctgatcaacatcattttcagtatgaaaacaaaagttatgactcctagacctttgaaatatttacaaattgtactttaaacaacgagatttttcagtgtgcttctaaaaccctcgtgccgaattct

SEQ ID NO: 72922 - DNA, 944 bp, Homo Sapiens
  misc_feature (47)..(47): n is a, c, g, or t
  misc_feature (81)..(81): n is a, c, g, or t
  misc_feature (116)..(116): n is a, c, g, or t
  misc_feature (138)..(138): n is a, c, g, or t
  misc_feature (140)..(140): n is a, c, g, or t
  misc_feature (147)..(147): n is a, c, g, or t
  misc_feature (152)..(152): n is a, c, g, or t
  misc_feature (171)..(172): n is a, c, g, or t
  misc_feature (187)..(187): n is a, c, g, or t
  misc_feature (260)..(260): n is a, c, g, or t
  misc_feature (269)..(270): n is a, c, g, or t
  misc_feature (300)..(300): n is a, c, g, or t
ggagctgcgcacgcacatcctatacatcagtcagcacagaccacggntcttccccaggctcagcggcccagcagcccagcngggtacacatgcgagacagagcccgacagccgctnagatcacctagcacgctgtccntngtgtccntggcntgggacatgtgttcacgcnnaggcggagaagctcntaggagcccatagcttccaggagctcacccagcacgtccacgcggccctcagtcacgcgtccccgggcagcgnccacggatnntgagtcccttacgtccagctgcaacgtctncaggagtcccggagggcatgccagggcccgggccgcctcccacagccggccctgtgttgtcaggtccctcaacgtggcatacactggaggttttgggagaggaggaagatctgacttcccttctagcctccaagggctcctcccttctctccctccctgtccctacctatctatacctttgaagctctgggatggatctgaagccagacgtacggccaagtgcaggccgatgcccgaggaacagccggtgatgagcaccacggtgcgggccatggtgagactgtggggagaggctggggctctgggcttgatatcacctgcttcgccccgccccgcctgcgggcccccaccccttgttgtgtctcccacgcaatctcaaggataagccttcctgcgggtccctggcccgctctccccaccctgttctgagccaaaacagacatgagcccactgcttggaacaacaaactgtcctggttgctggtcagagggaggggaggctttacaagcaggtgtgggttcccacgtgggcacagagtggccccctgggcagattcccctgggtatgcctctgtgccacaggagcgattatagtgaccgcagtttgctgcagaggctgtgaaagtaaaggcgttgggaggtggg

SEQ ID NO: 72923 - DNA, 845 bp, Homo Sapiens
cattatgttagaaaattttaatatatgattttggtagggccaatacatagtaaagacatagctttatttcaattgaaccgaataaaatgatgtatttcagtaaattaaggcaaaggagatagatgctatgaccagtggtgcaaaatttttcaaaaatttatacattagatttacctttacaaggttatagtcaagaataattaatttgtattttaagcaaactctactgcttttcaaaaaatgtcttaatcttgagtgaggaatagtgaaggtaatcttaatatactgtttaactttaaaaaataattttagaattatagaaaagtttcaaaaagagtatagaatttatgcacacccttctgccagctttccttaatgttaacaatgtacataaccataatatgattttcaaaaccaggaaattaacattacagtagtgttttaattttacacatgtaattaatggaagaaatgaaagcctaccccaatattcagttagatttataccagtaagtacagcacagggccttataagaaattaacaaattatggttttaataaaaaaacaaacttattcataaattcgggcgggctttttttggttggcagtgaggcatcctaaacttgaaccaaaggaaacatattttttaaaggggagtaacagagttcccagcttacaccagtattcaaggttgattataaaggcgtgggttaatgttggtgcaagactcctccgggtctaactcaagagagcataatatcctattcaagggagatggcctctttctagaggtatggaacgtgaaaaatttaccttttgaagtaaaaggacccgagagacgaag

SEQ ID NO: 72924 - DNA, 1140 bp, Homo Sapiens
  misc_feature (473)..(497): n is a, c, g, or t
ccccattttttcaaggatggaaaggtcagagaaaaataaaataaaacatctttcaatagtctttcctggtaaaagcagcgtctctctgggctggggagtaaagggtgtggggcaaggggagtggggagaggctgaaaccttcccccaaaccccagttttagatcctttggtttccttctcccagaagatggcagaagggcatggtgggaacagcagggagaaaatatggtgatgacaaaccccagatgatcaaggggctgatgctcctggggcccagaggtaccaccagagccttctatgagacagtgctgggcaatgggggggcccgcagggccttcttgtgggctgcatagttggcttgagggggagcaggaggttaggggtggggaccagggttgcagcctactagcctcgggcagggctgcagagtgattttggtaatccagatgaactatcaataatttaaaacttgnnnnnnnnnnnnnnnnnnnnnnnnnaaaatctcccccctttccctccccccttagaagaagctaggatgtcaagagtcatggagagaggagggggaaggggatgtagaggctcctgcccaggggtacctctgatagcccaaatggtgtatacattgctactcagcacaaaggcctgtcctagtaactccaggcctgtcccttcattgtcccctctcctgggactgggcacccccatggactcttacccaccctacccctttcccccctcaagccccagggctaaggagcttttcactttcccaaagtctgtgtgttcgagtgctggcttgtccatttggcatcttcccggacaggctggccggtgggtggtgtagggggttggctgatcatggcagcaggcctgctggaagactgggaggggcaccgcttcctgccctcaccgccgccacctcctgctaccactgagtgtcgcttgtggttgccctcctcacccatggggggatctactcggaagtcttcaagacgtcggaatttgccgaggtattcttgcagtttggggtcaatgtccaaatttttggctttggaatatttcaagaaggcccagaacttctccagcccatacagttggccagcttcatagtccttcaccgtttcctcctgaaaatcc

SEQ ID NO: 72925 - DNA, 1061 bp, Homo Sapiens
  misc_feature (78)..(143): n is a, c, g, or t
aatacaaaagaaagctctgtacataggactgtgaccatgtccactattcctgggtcagcatcccaggggaagtagaannnnnnnnnnnnnnnnnnnnnnnnnnnnnnnnnnnnnnnnnnnnnnnnnnnnnnnnnnnnnnnnnntaccccagagccaccgaggaagggaaacaccaagggtcgctgcacataaaaatatcacctcaactcatccctgacacacgcatgtcctcccaaggccacgctcacacaacacacattataagcactttgcctgattcactcactgggtctgtcttttgtgggaaggagaggaagaattcatcaaaggtctcctccccatgggtgggggagtggggagtgagtgagtgatggtggagtgaaacaagagcagagaaaaggggctgggcagttacagacctgagtcccaagctcccctgctctctggcccctgatttgccatgccccagccttgaaagccacccataagccccagctatctccaggagaaagcccagaaaggtgacttccatcttggcaccccaaactggggcaagacagcaatgagggttagaggttagggggttctcaaacatgtcggcaaatcatccccttgataactaggctgtgcataaaatcttcccccatcccttcacctaatcacagaagccagcttgttcctactgaaggcagtcttaggggttaagaaaatttcaccccactgctgccctgtttctgaaaaagctccccttctggatataggtggtgaaggtaggctctgacacagggtaaaagaccctcccccctatgctggcccaccctcaaggtctaccccaaagggggaggaggggggtgggcatggcccctgtacaaattacataaatactgaggttacacttagaaaaataaagtcattttcttcaaggctttttgtcttaatttaaaaaaagttacagtagctgctcactccctgggagaactgcccatttctggctcccctttggctgcactcagcccaagaagctgctcccacttcttctgacccccattcctgcctctcac

SEQ ID NO: 72926 - DNA, 818 bp, Homo Sapiens
gcctcaagcaacatcatacctagagacgctgctggggaaggtcagcacacccaagaactttgggagtgtgtgtctgttttggtttgtgagaaagtagctgcccctcattctggccagttctttccagtagccatggggctggctacaagaagcaaaactgcccatgcaaagagaacacaggtcacttttcaaaacacttgcatcattaccctaaaaataggctgttatgcgttttgacaattgcgctatcctacactctgagggagttggcaacgcatgcggtatagtggagtgggaagagttgagactgaaagttaagagaagggttttcaagtcccggctcatctcaccccagtgactttgacagtgtgctcactctcagagccatggattacctggaacaaagtgcagattagtgcccacggtcctttccaggtataacatgctatcgttctttaattttattatatatacatacttttcttctgttttttgctttaagaactaaccccgatcaagagtattttctttagctagcttaaaaagaaaacatatattttatgtaaaaacacatacatggccaaatgcaatactgaagagacaatcatcctgtatcttttatggtttttcctgcttctgagtgtcgttctacaatgcccgttgacttattccattgcgtctctgctttagggtatggtttggtcgctttggttgtcatgagaaagagacattctccttgcagctacctccatgtgagtgaattcctggataaagcaagatttcctttcaataaacgctgtcacccaatgggaaaaaaa

SEQ ID NO: 72927 - DNA, 1925 bp, Homo Sapiens
  misc_feature (1819)..(1877): n is a, c, g, or t
gttacggctaggtgcgaggctgggtgtgcgaatcggccgaggcttcgtgcatggcagagatggcgactgcgactcggctgctggggtggcgtgtggcgagctggaggctgcggccgccgcttgccggcttcgtttcccagcgggcccactcgcttttgcccgtggacgatgcaatcaatgggctaagcgaggagcagaggcagcttcgtcagaccatggctaagttccttcaggagcacctggcccccaaggcccaggagatcgatcgcagcaatgagttcaagaacctgcgagaattttggaagcagctggggaacctgggcgtattgggcatcacagcccctgttcagtatggcggctccggcctgggctacctggagcatgtgctggtgatggaggagatatcccgagcttccggagcagtggggctcagttacggtgcccactccaacctctgcatcaaccagcttgtacgcaatgggaatgaggcccagaaagagaagtatctcccgaagctgatcagtggtgagtacatcggagccctggccatgagtgagcccaatgcaggctctgatgttgtctctatgaagctcaaagcggaaaagaaaggaaatcactacatcctgaatggcaacaagttctggatcactaatggccctgatgctgacgtcctgattgtctatgccaagacagatctggctgctgtgccagcttctcggggcatcacagccttcattgtggagaagggtatgcctggctttagcacctctaagaagctggacaagctggggatgaggggctctaacacctgtgagctaatctttgaagactgcaagattcctgctgccaacatcctgggccatgagaataagggtgtctacgtgctgatgagtgggctggacctggagcggctggtgctggccggggggcctcttgggctcatgcaagcggtcctggaccacaccattccctacctgcacgtgagggaagcctttggccagaagatcggccacttccagttgatgcaggggaagatggctgacatgtacacccgcctcatggcgtgtcggcagtatgtctacaatgtcgccaaggcctgcgatgagggccattgcactgctaaggactgtgcaggtgtgattctttactcagctgagtgtgccacacaggtagccctggacggcattcagtgttttggtggcaatggctacatcaatgactttcccatgggccgctttcttcgagatgccaagctgtatgagataggggctgggaccagcgaggtgaggcggctggtcatcggcagagccttcaatgcagactttcactagtcctgagacccttcgcccccttttcctgcacctagtggcctttcttgggaagtagagatgtggcggctttcccaccctgcccacagcaggccctcctgcccagctgctcttgtcagccctctggcctctggatgaggttgagttctccacaacagctcccaagcatcatgggcctcgcagccgggcctgtgccacggctagtgttgtgtgatttaaaatggactcagcaggaagcatattgtctggggattgttgggacaagttttggtgactctgtgcccttgctctctaacttctgagcccacctcccagggtaggcacctgggggcatgcaggtgcccacctcccagggtaggcacctgggggcatgcaggtacccacctctttctcttgggtgaggctctggcaaggagatctctctgctcaagcacagcagaatcatggcccctctccatgaattggaacttggtacaggttaagtatccctnnnnnnnnnnnnnnnnnnnnnnnnnnnnnnnnnnnnnnnnnnnnnnnnnnnnnnnnnnntcagtctcttttctgggggaaaaaaataataaacctagcctagccagg

SEQ ID NO: 72928 - DNA, 968 bp, Homo Sapiens
  misc_feature (41)..(75): n is a, c, g, or t
  misc_feature (890)..(908): n is a, c, g, or t
acgacgagcgcagcgagtcagatgagcgaggaagcggccgnnnnnnnnnnnnnnnnnnnnnnnnnnnnnnnnnnncagtcgacggtaccggacatatgcccgggaattcggccattacggccggggtggcaagaggtgggcagacatcttttcaaaatacaactctggcacctataacaatcaatacatggttctggacctgaagaaagtaaagcttgaaccacagtcttgacaaaggcactctgtacattgtggagcaaattcctacatatgtagaatattctgaacaaactgatgttctacggaaaggatattggccctcctacaatgttcctttccatgaaaaaatctacaactggagtggctatccactgttagttcagaagctgggcttggactactcttatgatttagctccacgagccaaaattttccggcgtgaccaagggaaagtgactgatacggcatccatgaaatatatcatgcgatacaacaattataagaaggatccttacagtagaggtgacccctgtaataccatctgctgccgtgaggacctgaactcacctaacccaagtcctggaggttgttatgacacaaaggtggcagatatctacctagcatctcagtacacatcctatgccataagtggtcccacagtacaaggtggcctccctgtttttcgctgggaccgtttcaacaaaactctacatcagggcatgccagaggtctacaactttgattttattaccatgaaaccaattttgaaacttgatataaaatgaaggagggagatgacggactagaagactgtaaataagataccaaaggcactattttagctatgtttttcccatcagaattatgcaataaaatatattaatttgtcnnnnnnnnnnnnnnnnnnngaccgcgtatgcggccgcaagcttattccctttcagtgagggttaattttcagcttggca

SEQ ID NO: 72929 - DNA, 1597 bp, Homo Sapiens
ctccaggagcctgcccgaggtgcccgagaccatcgagctggaggttcggaccagcacagccagtggcctcctgctctggcagggtgtggaggtgggagaggccggccaaggcaaggacttcatcagcctcgggcttcaagacgggcaccttgtcttcaggtaccagctgggtagtggggaggcccgcctggtctctgaggaccccatcaatgacggcgagtggcaccgggtgacagcactgcgggagggccgcagaggttccatccaagtcgacggtgaggagctggtcagcggccggtccccaggtcccaacgtggcagtcaacgccaagggcagcgtctacatcggcggagcccctgacgtggccacgctgaccgggggcagattctcctcgggcatcacaggctgtgtcaagaacctggtgctgcactcggcccgacccggcgccccgcccccacagcccctggacctgcagcaccgcgcccaggccggggccaacacacgcccctgcccctcgtaggcacctgcctgccccacacggactcccgggccacgccccagcccgacaatgtcgagtatattattattaatattacttatgaacttttcgtaagaaaccgaggcgatgccacgctttgctgctaccgccctgggctggactggaggtgggcatgccaccctcacacacacagctgggcaaagccacaaggctggccagcaaggcaggttggatgggagtgggcacctcagaaagtcaccaggacttggggtcaggaacagtggctgggtgggcccagaactgcccccactgtccccctacccaccgatggagcccccagatagagctgggtggcctgtttctgcagcccttgggcagttctcactcctaggagagccaacctcggcttgtgggctggtgccccacagctacctgagacgggcatcgcaggagtctctgccacccactcaggattgggaattgtctttagtgccggctgtggagcaaaaggcagctcacccctgggcaggcggtccccatccccaccagctcgtttttcagcacccccacccacctccacccagcccctggcacctcctctggcagactccccctcctaccacgtcctcctggcctgcattcccaccccctcctgccagcacacagcctggggtccctccctcaggggctgtaagggaaggcccaccccaactcttaccaggagctgctacaggcagagcccagcactgatagggccccgcccaccgggccccgcccaccccaggccacatccccacccatctggaagtgaaggcccagggactcctccaacagacaacggacggacggatgccgctggtgctcaggaagagctagtgccttaggtgggggaaggcaggactcacgactgagagagagaggagggggatatgaccaccctgccccatctgcaggagcctgaagatccagctcaagtgccatcctgccagtggcccccagactgtggggttgggacgcctggcctctgtgtcctagaagggaccctcctgtggtctttgtcttgatttttcttaataaacggtgctatccccgcaaaaa

SEQ ID NO: 72930 - DNA, 1006 bp, Homo Sapiens
  misc_feature (39)..(39): n is a, c, g, or t
  misc_feature (154)..(154): n is a, c, g, or t
  misc_feature (272)..(272): n is a, c, g, or t
gcgtacatcaccagacgttgactgatcgattatcgctcnttaggattgcctgagccagatcgcagaggcacagcagacgcgcgttgtatgtccgtagcagagagccaagcctgagtcatgtcatccgatggaatccgccgaccaataccagctncaggcgcctggtgcacagaatacatcaataccagcagggacccgcacaggtgttgagtgcagaagtcaaacagccagcatggagatatccaggaagagacataatatcaccttaaatntgctgttgaagaaatatacaaaaacaagttaaggtgaactgcacagctgaatactttacccttcaacgggacaaagaaactgcaccagaagtcaacttcacatttgaaggagaaactggaaagaatccagatgaagaagacaacacattttatcaaagacttaagtccatgaaggaaccgctagaagcacaaaatattccagacaattttggaaatgtatctccagaaatgacgctcgttctacatttagcctgggttgcctgtggttatataatatggcaaaattctactgaagacacatggtataaaatggtaaaaattcaaactgtcaagcaagtgcaaagaaatgatgactttattgaattagactacaccattctacttcataatatagcatctcaggagattattccctggcaaatgcaagttctctggcatccacaatacggcactaaagtaaaacataatagccgtctgccaaaggaagtacaactggaataaacaaaaaccctaacactggaagtgtaaacatgtctattgatgtgtatgccaatttcactggcatctagcttatgaggccaaataatcccaaagtgtcactttatataaatgtcttgattacagtatagaactttatagagtccataatacaaagtatcactacataaaaatgtctttaaaacagtaatagtggtatgtatatccaaaataaaaagcttcaatttcagcctcat

SEQ ID NO: 72931 - DNA, 1169 bp, Homo Sapiens
  misc_feature (68)..(102): n is a, c, g, or t
aatgtatagatatatacgggtccgttttcgaacgacgagcgcagcgagtattagcgaggaagcggcgnnnnnnnnnnnnnnnnnnnnnnnnnnnnnnnnnnncagtcgacggtaccggacatatgcccgggaattcggccattacggccggggagcagcttccggagtcggaaggagctgaggaagaagactgactgaaggagcttgcgacttttccgcctcggcaaccggacccagcagcaagcaggacgggcggcgctctgctactggtcccgttaagccagagtagcccaagccctgaagtcactgctcatccggaatggaaatcccgccgaccaactacccagcctccagggcggccttggtggcacagaactacatcaactaccagcaggggaccccgcacagggtgtttgaggtgcagaaggtcaaacaagccagcatggaggatattccaggaagaggacataagtatcaccttaaatttgctgttgaagaaattatacaaaaacaagttaaggtgaactgcacagctgaagtactttacccttcaacgggacaagaaactgcaccagaagtcaacttcacatttgaaggagaaactggaaagaatccagatgaagaagacaacacattttatcaaagacttaagtccatgaaggaaccgctagaagcacaaaatattccagacaattttggaaatgtatctccagaaatgacgctcgttctacatttagcctgggttgcctgtggttatataatatggcaaaattctactgaagacacatggtataaaatggtaaaaattcaaactgtcaagcaagtgcaaagaaatgatgactttattgaattagactacaccattctacttcataatatagcatctcaggagaatattccctggcaaatgcaagttctccgggcatccacaatacggcactaaagtaaaacataatagccgtctgccaaaggaagtacaactggaataaacaaaaaccctaacactggaagtgtaaacatgtctattgatgtgtatgccaatttcactggcatctagcttatgaggccaaataatcccaaagtgtcactttatataaatgtcttgattacagtatagaactttatagagtccataatacaaagtatcatctaaacaaaatgtcttaaaa

SEQ ID NO: 72932 - DNA, 2745 bp, Homo Sapiens
  misc_feature (256)..(287): n is a, c, g, or t
tgcgcccgggacaatcctcgccttgtctgtggcgccggcatctggagctttctgtagcctccggatacgcctttttttcagggcgtagccccagccaagctgctccccgcggcggccgcacagcagcccgagcgccccctttccagagctcccctccggagctgggatccaggcgcgtagcggagatcccaggatcctgggtgctgtctgggcccgctccccaccatgacctcctcggggcctggaccccggttcnnnnnnnnnnnnnnnnnnnnnnnnnnnnnnnnggcctcagcctccgaccggccccggggccgagacccggtcaacccagagaagctgctggtgatcactgtggccacagctgaaaccgaggggtacctgcgtttcctgcgctctgcggagttcttcaactacactgtgcggaccctgggcctgggagaggagtggcgagggggtgatgtggctcgaacagttggtggaggacagaaggtccggtggttaaagaaggaaatggagaaatacgctgaccgggaggatatgatcatcatgtttgtggatagctacgacgtgattctggccggcagccccacagagctgctgaagaagttcgtccagagtggcagccgcctgctcttctctgcagagagcttctgctggcccgagtgggggctggcggagcagtaccctgaggtgggcacggggaagcgcttcctcaattctggtggacttcatcggttttgccaccaccatccaccaaatcgtgcgccagtggaagtacaaggatgatgacgacgaccagctgttctacacacggctctacctggacccaggactgagggagaaactcagccttaatctggatcataagtctcggatctttcagaacctcaacggggctttagatgaagtggttttaaagtttgatcggaaccgtgtgcgtatccggaacgtggcctacgacacgctccccattgtggtccatggaaacggtcccactaagctgcagctcaactacctgggaaactacgtccccaatggctggactcctgagggaggctgtggcttctgcaaccaggaccggaggacactcccgggggggcagcctccccccgggtgtttctggccgtgtttgtggaacagcctactccgtttctgccccgcttcctgcagcggctgctactcctggactatccccccgacagggtcacccttttcctgcacaacaacgaggtcttccatgaaccccacatcgctgactcctggccgcagctccaggaccacttctcagctgtgaagctcgtggggccggaggaggctctgagcccaggcgaggccagggacatggccatggacctgtgtcggcaggaccccgagtgtgagttctacttcagcctggacgccgacgctgtcctcaccaacctgcagaccctgcgtatcctcattgaggagaacaggaaggtgatcgcccccatgctgtcccgccacggcaagctgtggtccaacttctggggcgccctgagccccgatgagtactacgcccgctccgaggactacgtggagctggtgcagcggaagcgagtgggtgtgtggaatgtaccatacatctcccaggcctatgtgatccggggtgataccctgcggatggagctgccccagagggatgtgttctcgggcagtgacacagacccggacatggccttctgtaagagctttcgagacaagggcatcttcctccatctgagcaatcagcatgaatttggccggctcctggccacttccagatacgacacggagcacctgcaccccgacctctggcagatcttcgacaaccccgtcgactggaaggagcagtacatccacgagaactacagccgggccctggaaggggaaggaatcgtggagcagccatgcccggacgtgtactggttcccactgctgtcagaacaaatgtgtgatgagctggtggcagagatggagcactacggccagtggtcaggcggccggcatgaggattcaaggctggctggaggctacgagaatgtgcccaccgtggacatccacatgaagcaggtggggtacgaggaccagtggctgcagctgctgcggacgtatgtgggccccatgaccgagagcctgtttcccggttaccacaccaaggcgcgggcggtgatgaactttgtggttcgctaccggccagacgagcagccgtctctgcggccacaccacgactcatccaccttcaccctcaacgttgccctcaaccacaagggcctggactatgagggaggtggctgccgcttcctgcgctacgactgtgtgatctcctccccgaggaagggctgggcactcctgcaccccggccgcctcacccactaccacgaggggctgccaacgacctggggcacacgctacatcatggtgtcctttgtcgacccctgacactcaaccactctgccaaacctgccctgccattgtgcctttttagggggcctggcccccgtcctgggagttgggggatgggtctctctgtctccccacttcctgagttcatgttccgcgtgcctgaactgaatatgtcaccttgctcccaagacacggccctctcaggaagctcccggagtccccgcctctctcctccgcccacaggggttcgtgggcacagggcttctggggactccccgcgtgataaattattaatgttccgcagtctcactctgaataaaggacagtttgtaagtcttg

SEQ ID NO: 72933 - DNA, 1372 bp, Homo Sapiens
ctgggaccagccaaggagactaacattgctgtgttctggtgcctgctcacggtgaccttctccatcaagatgttcctgacagtgacacggctgtacttcagcgccgaggaggggggtgagcgctctgtctgcctcacctttgccttcctcttcctgctgctggccatgctggtgcaagtggtgcgggaggagaccctcgagctgggcctggagcctggtctggccagcatgacccagaacttagagccacttctgaagaagcagggctgggactgggcgcttcctgtggccaagctggctatccgcgtgggactggcagtggtgggctctgtgctgggtgccttcctcaccttcccaggcctgcggctggcccagacccaccgggacgcactgaccatgtcggaggacagacccatgctgcagttcctcctgcacaccagcttcctgtctcccctgttcatcctgtggctctggacaaagcccattgcacgggacttcctgcaccagccgccgtttggggagacgcgtttctccctgctgtccgattctgccttcgactctgggcgcctctggttgctggtggtgctgtgcctgctgcggctggcggtgacccggccccacctgcaggcctacctgtgcctggccaaggcccgggtggagcagctgcgaagggaggctggccgcatcgaagcccgtgaaatccagcagagggtggtccgagtctactgctatgtgaccgtggtgagcttgcagtacctgacgccgctcatcctcaccctcaactgcacacttctgctcaagacgctgggaggctattcctggggcctgggcccagctcctctactatcccccgacccatcctcagccagcgctgcccccatcggctctggggaggacgaagtccagcagactgcagcgcggattgccggggccctgggtggcctgcttactcccctcttcctccgtggcgtcctggcctacctcatctggtggacggctgcctgccagctgctcgccagccttttcggcctctacttccaccagcacttggcaggctcctagctgcctgcagaccctcctggggccctgaggtctgttcctggggcagcgggacactagcctgccccctctgtttgcgcccccgtgtccccagctgcaaggtggggccggactccccggcgttcccttcaccacagtgcctgacccgcggccccccttggacgccgagtttctgcctcagaactgtctctcctgggcccagcagcatgagggtcccgaggccattgtctccgaagcgtatgtgccaggtttgagtggcgagggtgatgctggctgctcttctgaacaaataaaggagcatgccgatttttac

SEQ ID NO: 72934 - DNA, 980 bp, Homo Sapiens
ggccggtgggtgagtgcaccgcgttctcgcacgcgtcatggcggtcctcggagtacagctggtggtgaccctgctcactgccaccctcatgcacaggctggcgccacactgctccttcgcgcgctggctgctctgtaacggcagtttgttccgatacaagcacccgtctgaggaggagcttcgggccctggcggggaagccgaggcccagaggcaggaaagagcggtgggccaatggccttagtgaggagaagccactgtctgtgccccgagatgccccgttccagctggagacctgccccctcacgaccgtggatgccctggaggcctactactacatgctgggaccagccaaggagactaacattgctgtgttctggtgcctgctcacggtgaccttctccatcaagatgttcctgacagtgacacggctgtacttcagcgccgaggaggggggtgagcgctctgtctgcctcacctttgccttcctcttcctgctgctggccatgctggtgcaagtggtgcgggaggagaccctcgagctgggcctggagcctggtctggccagcatgacccagaacttagagccacttctgaagaagcagggctgggactgggcgcttcctgtggccaagctggctatccgcgtgggactggcagtggtgggctctgtgctgggtgccttcctcaccttcccaggcctgcggctggcccagacccaccgggacgcactgaccaatgtcggaggaccagacccatgctgcagttcctccctgcacaccagcttcctgtctcccctgttcatccctgtggcctctggacaaagcccattgcacgggacttcctgcaccagcccgccgttttgggggagaacgcgtttcctcccctgctgtcccgatttctgccccttcgactcctggggcgccctctgggtttgcctgggtgggtgcttgttgccctgcctgccggggctgggcggta

SEQ ID NO: 72935 - DNA, 1094 bp, Homo Sapiens
  misc_feature (937)..(937): n is a, c, g, or t
  misc_feature (943)..(945): n is a, c, g, or t
ggagccctaggccggtgggtgagtgcaccgcgttctcgcacgcgtcatggcggtcctcggagtacagctggtggtgaccctgctcactgccaccctcatgcacaggctggcgccacactgctccttcgcgcgctggctgctctgtaacggcagtttgttccgatacaagcacccgtctgaggaggagcttcgggccctggcggggaagccgaggcccagaggcaggaaagagcggtgggccaatggccttagtgaggagaagccactgtctgtgccccgagatgccccgttccagctggagacctgccccctcacgaccgtggatgccctggtcctgcgcttcttcctggagtaccagtggtttgtggactttgctgtgtactcgggcggcgtgtacctcttcacagaggcctactactacatgctgggaccagccaaggagactaacattgctgtgttctggtgcctgctcacggtgaccttctccatcaagatgttcctgacagtgacacggctgtacttcagcgccgaggaggggggtgagcgctctgtctgcctcacctttgccttcctcttcctgctgctggccatgctggtgcaagtggtgcgggaggagaccctcgagctgggcctggagcctggtctggccagcatgacccagaacttagagccacttctgaagaagcagggctgggactgggcgcttcctgtggccaagctggctatccgcgtgggactggcagtggtgggctctgtgctgggtgccttcctcaccttcccaggcctgcggctggcccagacccaccgggacgcactgaccatgtcggaggacagacccttgctgcagttccctcctgcacaccaaccttcctgtcctccccggttcatccctggggctctggacaaagcccattgcacggggacttcctgcaccaanccccgnnntgggggagaaccggtttctcccctgctgttccgaatctgcccttcaatctgggcgccccctgggtttccctgggggggcctgtggcctgcctgccgcctggccggtgaaacccggccccccctggagggctacctggggcctggcgcaa

SEQ ID NO: 72936 - DNA, 891 bp, Homo Sapiens
cgatacaagcacccgtctgaggaggagcttcgggccctggcggggaagccgaggcccagaggcaggaaagagcggtgggccaatggccttagtgaggagaagccactgtctgtgccccgagatgccccgttccagctggagacctgccccctcacgaccgtggatgccctggtcctgcgcttcttcctggagtaccagtggtttgtggactttgctgtgtactcgggcggcgtgtacctcttcacagaggcctactactacatgctgggaccagccaaggagactaacattgctgtgttctggtgcctgctcacggtgaccttctccatcaagatgttcctgacagtgacacggctgtacttcagcgccgagggaggggggtgagcgctctgtctgcctcacctttgccttcctcttcctgctgctggccatgctggtgcaagtggtgcgggaggagaccctcgagctgggcctggagcctggtctggccagcatgacccagaacttagagccacttctgaagaagcagggctgggactgggcgcttcctgtggccaagctggctatccgcgtgggactgggcagtggtgggctctgtgctgggtgccttcctcaccttcccaggcctgcggctggcccagacccaccgggacgcactgaccatgtcggaggacagacccatgctgcagttcctcctgcacaccagcttcctgtctcccctgttcatcctgtggctctggacaaagcccattgcacgggacttcctgcaccagccgccgtttgggggagaccgcgttttctccctgctgtccgatttctgccttcgactctggggcgccctctggtttgcctggtgggtgctgggccctggcttgccggccttgccgggtg

SEQ ID NO: 72937 - DNA, 1118 bp, Homo Sapiens
  misc_feature (294)..(294): n is a, c, g, or t
cccagctactttgctcccctgcattgttgattggcgagtaaatcaccggagcatcaacgtgaagagtgcaacactcttaggaaatgcctaggcccaaattcccaaagttttttcaattattttcctcatgcacgcatgagccccatccatgccgacaggcgtgcaaggtggcgcgtagcgagccccacgttccccctggtgccggagtggtctggctccatacatatcaacctgaaagacgaagacggggcggaagaccaagatcatcgagatgacgattgataccccaagaantgactcatcaagagtctgccgtacatgtgaaaatgatgccagaattccagaaaagttcagttcgaatcaagaaccctacaagagtagaagaacttatctgtggtcgtatcaaaggaggagctgccaaacttcagataataacggactttgatatgacactcagtagattttcatataaagggaaaagatgcccaacatgtcataatatcattgacaactgtaagctggttacagatgaatgtagaaaaaagttattgcaactaaaggaaaaatactacgctattgaagttgatcctgttcttactgtagaagagaagtacccttatatggtggaatggtatactaaatcacatggtttgcttgttcagcaagctttaccaaaagctaaacttaaagaaattgtggcagaatctgacgttatgctcaaagaaggatatgagaatttctttgataagctccaacaacatagcatccccgtgttcatattttcggctggaatcggcgatgtactagaggaagttattcgtcaagctggtgtttatcatcccaatgtcaaagttgtgtccaattttatggattttgatgaaactgtaagaatatcaaatcgttcttcataattttaaaatctgaaaatattttaatcatgtaaatttatttattgttacttaatatatatcctatatccagaaattaggccaagccgataggcccactgtgggactccatccttctcagtgttaatatatccatattttaaaaacaatgtgcccttcttaaactttcattccccaagctatagactaataataaaagtagtaaaactt

SEQ ID NO: 72938 - DNA, 931 bp, Homo Sapiens
acgcgagctgctgtttttttcctgcttggacgcgcatgagggccccgtccatggaccgcgcggccgtggcgagggtgggcgcggtagcgagcgccagcgtgtgcgccctggtggcgggggtggtgctggctcagtacatattcaccttgaagaggaagacggggcggaagaccaagatcatcgagatgaagattggataaccaagaaatgactaatcaagagtctgccgtacatgtgaaaatgatgccagaattccagaaaagttcagttcgaatcaagaaccctacaagagtagaagaaattatctgtggtcttatcaaaggaggagctgccaaacttcagataataacggactttgatatgacactcagtagattttcatataaagggaaaagatgcccaacatgtcataatatcattgacaactgtaagctggttacagatgaatgtagaaaaaagttattgcaactaaaggaaaaatactacgctattgaagttgatcctgttcttactgtagaagagaagtacccttatatggtggaatggtatactaaatcacatggtttgcttgttcagcaagctttaccaaaagctaaacttaaagaaattgtggcagaatctgacgttatgctcaaagaaggatatgagaatttctttgataagctccaacaacatagcatccccgtgttcatattttcggctggaatcggcgatgtactagaggaagttattcgtcaagctggtgtttatcatccccaatgtcaaaagtttgttgtccaacttttatggatttgatgaaactggggtgctcaacaggattacaaaggagaactaatttcatgtattttaacaaacatgatggtgccttgaggaataccggaatatatcatcactaaagacatagtaacatattcttcggggagactccaag

SEQ ID NO: 72939 - DNA, 1085 bp, Homo Sapiens
aatgtgaatataaacagtggtaaaaaagcaggctggtacggtccggaattcccgggatatcgtcgaccacgcgtcgcgcgcttccgagactcgcagtctacgcgagctgcctgtttttttcctgcttggacgcgcatgagggccccgtccatggaccgcgcggccgtggcgagggtgggcgcggtagcgagcgccagcgtgtgcgccctggtggcgggggtggtgctggctcagtacatattcaccttggaagaggaagacggggcggaagaccaagatccatcgagatgatgccagaattccagaaaagttcagttcgaatcaagaaccctacaagagtagaagaaattatctgtggtcttatcaaaggaggagctgccaaacttcagataataacggactttgatatgacactcagtagattttcatataaagggaaaagatgcccaacatgtcataatatcattgacaactgtaagctggttacagatgaatgtagaaaaaagttattgcaactaaaggaaaaatattacgctattgaagttgatcctgttcttactgtagaagagaagtacccttatatggtggaatggtatactaaatcacatggtttgcttgttcagcaagctttaccaaaagctaaacttaaagaaattgtggcagaatctgacgttatgctcaaagaaggatatgagaatttctttgataagctccaacaacatagcatccccgtgttcatattttcggctggaatcggcgatgtactagaggaagttattcgtcaagctggtgtttatcatcccaatgtcaaagttgtgtccaattttatggattttgatgaaactggggtgctcaaaggatttaaaggagaactaattcatgtatttaacaaacatgatggtgccttgagggatacagaatatttcaatcaactaaaagacaatagtaacataattccttctgggagactcccaaggagactttaagaatgccagatggaagtgggccaatgtttgagcactttctgaaaaattgggatattctaaatggatagaagggggatggagcctttttagaaaaagtac

SEQ ID NO: 72940 - DNA, 1333 bp, Homo Sapiens
  misc_feature (65)..(113): n is a, c, g, or t
  misc_feature (381)..(425): n is a, c, g, or t
  misc_feature (511)..(542): n is a, c, g, or t
  misc_feature (1117)..(1131): n is a, c, g, or t
  misc_feature (1220)..(1232): n is a, c, g, or t
agattccggcagcgatgaagatttcctaatggaagatgatgacgatagtgactatggcagttcgnnnnnnnnnnnnnnnnnnnnnnnnnnnnnnnnnnnnnnnnnnnnnnnnnaaaagaaaatgcccaaacccagactaaaggctacagtgacgccaagtccagtgaaaggcaaagggaaagtgggtcgccccacagcttcaaaggcatcaaaggaaaagactccttctcccaaagaagaagatgaggaaccggaaagcccgccagaaaagaaaacatctacaagccccccacccgagaaatctggggatgaagggtctgaagatgaagccccttctggggaggattaaaagtgatgatggtctggggagagatttttttnnnnnnnnnnnnnnnnnnnnnnnnnnnnnnnnnnnnnnnnnnnnnaacctacttaagatagaacatggttttggctatggcttgactcatgggctttcagtgcttttttccatttgttgatagtaacattnnnnnnnnnnnnnnnnnnnnnnnnnnnnnnnnaaagcaaaccattgtatgtgtaagtgtttaagttacctttttgtctattggtctctttgccagccctcccctttcccaatgaaagccatgtcaaattaatcactggattgactgcttcatctttttatttttaatgaaaggtgtaccacggttgtaaagcaataagatttgagatgaacactattgaaacttcgctttttgctaaaaaatagcaagttgaatagtaatcaaaaaacatagaaagattttagttcaaaatgattgctcctttctctacctggacttttaaaaaatcaattgtcatctaatatgagtttatttgtctatagacacaagtatcaatgtctaaaaaaaatcatgactttaaacttccaccgatgaggcaggtaggagataaagatgaattctgaactgttactaaaagtactcattttttaccttgtagggagggtgggcaatggggttacctgaccttatttgagggtatgggctttcttttttatttcatcacttgttatctcaaagagactcggagccagtgatccttttatcctgctacagtctttagggagctnnnnnnnnnnnnnnngcaggggctgccaaaactcttgatttcatatttccttctctaaatatatatgtatcctgttttttggataaaattttaccaagaatccnnnnnnnnnnnnnccctagaatttaatcaacaagatcagtctacaggtcacagtggatttcttttcaaactgacaatgtttaggttttaagcaaataaagttccagttaatgtg

SEQ ID NO: 72941 - DNA, 1260 bp, Homo Sapiens
  misc_feature (80)..(114): n is a, c, g, or t
aactgataatcactatagggcgctagctcgttttagccgaacgacgagcgcagcgagtcattgagcgaggaagcggccgnnnnnnnnnnnnnnnnnnnnnnnnnnnnnnnnnnncagtcgacggtaccggacatatgcccgggaattcggccattacggccggggagcttccgggtttcctgggctactacgatggcgatgagtttcgagtggccgtggcagtatcgcttcccacccttctttacgttacaaccgaatgtggacactcggcagaagcagctggccgcctggtgctcgctggtcctgtccttctgccgcctgcacaaacagtccagcatgacggtgatggaagctcaggagagcccgctcttcaacaacgtcaagctacagcgaaagcttcctgtggagtcgatccagattgtattagaggaactgaggaagaaagggaacctcgagtggttggataagagcaagtccagcttcctgatcatgtggcggaggccagaagaatgggggaaactcatctatcagtgggtttccaggagtggccagaacaactccgtctttaccctgtatgaactgactaatggggaagacacagaggatgaggagttccacgggctggatgaagccactctactgcgggctctgcaggccctacagcaggagcacaaggccgagatcatcactgtcagcgatggccgaggcgtcaagttcttctagcagggacctgtctccctttacttcttacctcccacctttccagggctttcaaaaggagacagacccagtgtcccccaaagactggatctgtgactccaccagactcaaaaggactccagtcctgaaggctgggacctggggatgggtttctcacaccccatatgtctgtcccttggatagggtgaggctgaagcaccagggagaaaatatgtgcttcttctcgccctacctcctttcccatcctagactgtccttgagccagggtctgtaaacctgacactttatatgtgttcacacatgtaagtacatacacacatgcgcctgcagcacatgcttctgtctcctcctcctcccacccctttagctgctgttgcctcccttctcaggctggtgctggatccttcctaggggatgggggaagccctggctgcaggcagccttccaggcaatatgaagataggaggcccacgggcctggcagtgagaggtgtggccccacaccgatttatgatattaaaatctcaactcccaaaaaaaa

SEQ ID NO: 72942 - DNA, 824 bp, Homo Sapiens
ggggggctactacgatggcgatgagtttcgagtggccgtggcagtatcgcttcccacccttctttacgttacaaccgaatgtggacactcggcagaagcagctggccgcctggtgctcgctggtcctgtccttctgccgcctgcacaaacagtccagcatgacggtgatggaagctcaggagagcccgctcttcaacaacgtcaagctacagcgaaagcttcctgtggagtcgatccagattgtattagaggaactgaggaagaaagggaacctcgagtggttggataagagcaagtccagcttcctgatcatgtggcggaggccagaagaatgggggaaactcatctatcagtgggtttccaggagtggccagaacaactccgtctttaccctgtatgaactgactaatggggaagacacagaggatgaggagttccacgggctggatgaagccactctactgcgggctctgcaggccctacagcaggagcacaaggccgagatcatcactgtcagcgatggccgaggcgtcaagttcttctagcagggacctgtctccctttacttcttacctccccacttttccagggctttcaaaaggagacagaacccagtgtcccccaaagactggatctgtgactccacccagactcaaaaaggactcccagtccctgaagggctgggaacctgggggatggggtttctccacccccccatatggtctggcccccttggaataggggggaaggcttgaaacaaccagggggagaaaaattaatggggctttctttcttcggcccctacccttcccttttccccattc

SEQ ID NO: 72943 - DNA, 607 bp, Homo Sapiens
  misc_feature (76)..(76): n is a, c, g, or t
gtcattagggctgagggctcggctgtagggcttccttaggctgagagtgcccccaggctgacatctgtgttgcttntgttcagaaccattactctggcacatgctcaatggtatattgcagggaggagaggagtagatttagatttgagtaaatgccaatcactttacacatgaaggtgggtgggactttccttccattcatcccttgctctcttggatctgaactcttctggagcctcagctcaggatagctgctggccactcctgtcctgcggattgtgcaggtgcctttcctcccaaaagaaaaggcatcaggctccccaagccccacagctctcctttccaccaaagccaggtttcctggtaaggtcactcgaagataagggatggggatgggggctgactgacaaaaaattttagccccaggtctcagtacctggctggggagggggatatttttccttccttaagtagttttacattgccaccagtgtgtatgtgttcactatataaaatgttcctctgctctttgaaagtaagagtgttgtgtctgtacaaatccttttaacatgcattcattggagtaaattctgagtatctactgtga

SEQ ID NO: 72944 - DNA, 750 bp, Homo Sapiens
  misc_feature (56)..(57): n is a, c, g, or t
  misc_feature (699)..(707): n is a, c, g, or t
aagaaaaaatcagcaaggagtgtgggaaaactgcatgccccagccctcccccgccnncagggtgaattggaagccctggaatgggccgaggcacaccaggcagctgatctgggtgcatgtgggccacagaccactctcacaaggttaaatctttaacaagagcctcatgtttgttaggagaaggtgggaccccagcccaagcacttccccattgcagcctggcatgaaatctttgccttttagtggggatcactcctgcccgagtcctggctgtggtggggactctgcaagttgctaacccagcgtccattctctttcctccgtactaacagaaccccggtgcctctgcccagttccaatagcgggcagacgagagccatgtcctgggctcccttgcagcccggggtgtgcaactgtggcgtggaggtgggtggtgctgggagagacttgcagggaagctcctgtgaaggggactcagctgccacatgcaggacccttcccctttgccttcttcctgcctggaacatggatgtgatggctggtgctgggacagctgtcctgagagcgtgaggaaagggtcacaccctaaggacagtggagcagaacacaggaaggaccctgggcctttgctgacgcagaacgcgggaaggaccctgggcctttgctgacataccagccccagactacttaaattcagcnnnnnnnnnaatgtgagaaaataaatgcacccctctctggtttaagccactg

SEQ ID NO: 72945 - DNA, 1012 bp, Homo Sapiens
  misc_feature (41)..(83): n is a, c, g, or t
  misc_feature (87)..(121): n is a, c, g, or t
aagaactgtatcgacttactatgggcgctagcctcgttagnnnnnnnnnnnnnnnnnnnnnnnnnnnnnnnnnnnnnnnnnnnccgnnnnnnnnnnnnnnnnnnnnnnnnnnnnnnnnnnncagtcgacggtaccggacatatgcccgggaattcggccattacggccggggagagcagtcctctctggggagcctgaagcaaacatggatcaagaaactgtaggcaatgttgtcctgttggccatcgtcaccctcatcagcgtggtccagaatggattctttgcccataaagtggagcacgaaagcaggacccagaatgggaggagcttccagaggaccggaacacttgcctttgagcgggtctacactgccaaccagaactgtgtagatgcgtaccccactttcctcgctgtgctctggtctgcggggctactttgcagccaagttcctgctgcgtttgctggactgatgtacttgtttgtgaggcaaaagtactttgtcggttacctaggagagagaacgcagagcacccctggctacatatttgggaaacgcatcatactcttcctgttcctcatgtccgttgctggcatattcaactattacctcatcttctttttcggaagtgactttgaaaactacataaagacgatctccaccaccatctcccctctacttctcattccctaactctctgctgaatatggggttggtgttctcatctaatcaatacctacaagtcatcataattcagctcttgagagcattctgctcttctttagatggctgtaaatctattggccatctgggcttcacagcttgagttaaccttgcttttccgggaacaaaatgatgtcatgtcagctccgccccttgaacatgaccgtggccccaaatttgctattcccatgcattttgtttgtttcttcacttatcctgttctctgaagatgttttgtgaccaggtttgtgttttcttaaaataaaatgcagagacatgttttaaaatgaa

SEQ ID NO: 72946 - DNA, 1018 bp, Homo Sapiens
  misc_feature (42)..(71): n is a, c, g, or t
  misc_feature (75)..(109): n is a, c, g, or t
aggctagtttttttattagacccggaaaaacagaacccgtannnnnnnnnnnnnnnnnnnnnnnnnnnnnnccgnnnnnnnnnnnnnnnnnnnnnnnnnnnnnnnnnnncagtcgacggtaccggacatatgcccgggaattcggccattacggccgggggaatgatgaaagagtgcaagctctcacttccccttcctgtacagggcaggttgtgcagctggaggcagagcagtcctctctggggagcctgaagcaaacatggatcaagaaactgtaggcaatgttgtcctgttggccatcgtcaccctcatcagcgtggtccagaatggattctttgcccataaagtggagcacgaaagcaggacccagaatgggaggagcttccagaggaccggaacacttgcctttgagcgggtctacactgccaaccagaactgtgtagatgcgtaccccactttcctcgctgtgctctggtctgcggggctactttgcagccaagttcctgctgcgtttgctggactgatgtacttgtttgtgaggcaaaagtactttgtcggttacctaggagagagaacgcagagcacccctggctacatatttgggaaacgcatcatactcttcctgttcctcatgtccgttgctggcatattcaactattacctcatcttctttttcggaagtgactttgaaaactacataaagacgatctccaccaccatctcccctctacttctcattccctaactctctgctgaatatggggttggtgttctcatctaatcaatacctacaagtcatcataattcagctcttgagagcattctgctcttctttagatggctgtaaatctattggccatctgggcttcacagcttgagttaaccttgcctttccgggaacaaaatgatgtcatgtcagctccgccccttgaacatgaccgtggccccaaatttgctattcccatgcattttgtttgtttcttcccttatcccggtccctgaagatgttttgtgaacc

SEQ ID NO: 72947 - DNA, 782 bp, Homo Sapiens
  misc_feature (454)..(454): n is a, c, g, or t
  misc_feature (599)..(613): n is a, c, g, or t
ggggtacagggcaggttgtgcagccggaggcagagcagtcctctctggggagcctgaagcaaacatggatcaagaaactgtaggcaatgttgtcctgttggccattgtcaccctcatcagcgtggtccagaatggattctttgcccataaagtggagcacgaaagcaggacccagaatgggaggagcttccagaggaccggaacacttgcctttgagcgggtctacactgccaaccagaactgtgtagatgcgtaccccactttcctcgctgtgctctggtctgcggggctactttgcagccaagttcctgctgcgtttgctggactgatgtacttgtttgtgaggcaaaagtactttgtcggttacctaggagagagaacgcagagcacccctgggctaacatatttggggaaacgcatcataactctttcctggttcctcatgtccgttgcntgggcatatttcaactattaacctcatccttccttttttcgggaaatggacttttgaaaaactacataaaagaacgatcttccaccacccattctcccccctctaacttttccaattcccctaacctcttctggcttaaataatnnnnnnnnnnnnnnnttccccatccaaaatcccaaaacccctaccaaggcccctcccaaaaattttccccctttttggaagaagaaatttcgggccccccttcttttttagaaagggggctggtaaaaatactctttttgggcccccctctcgtgggggttttttccccacgcttttttggaga

SEQ ID NO: 72948 - DNA, 999 bp, Homo Sapiens
ggcagataggccgcgtgttaatcggcacgaggctcgtgccgaatggcacgagggggccttaagggctctgagaggagtctaccttgccttcttatgggaagggagaccctaaagaaactttctcctctttgtcctcctttttctcccccactctgaggtttccccaagagaaccagattggcagggagaagcattgtggggcaatgttcctccttgacaatgtagcaataaatagatgctgccaagggcagaaaatggggaggttagctcagagcagagtagtctctagagaaaaggaagaatcctcaacggcaccctggggtgctagctccttttgtagaatgtcgagcagagctgagattaatatctgggcttttcctgaactgattctggttattgagcccttccgtgttagacctaccgcctcccacctcttctgtgtctgctgtgtattcggtgacacgttcataaggactagtcccttctggggtatcagagccttagggtgcccccatccccttccccagtcaactgtggcacctgtaacctcccggaagcatgaaggactatgctctgaggctatactctgtgcccatgagagcagagactggaagggcaagaccaggtgctaaggaggggagagggggcatcctgtctctctccagaccatcactgcactttaaccagggtcttaggtacaaaatcctacttttgcagagccttccagctctggaacctcaaacatccgtcatgctctctcccagctcctttgcattagcaagaaccagtcaggaaagaagagaaacagaactcgggcacttattccggggcggagacacggggttttgaaggcacgggcaaagggtactggaccaagtttgttgacaaggtggagatggggctccaaggaggggataatcagaaggccggtactgtaagttacggcaagagaaagatacgtacgccgaaggcaggaggacgacaagcttacgagaccga

SEQ ID NO: 72949 - DNA, 617 bp, Homo Sapiens
  misc_feature (178)..(240): n is a, c, g, or t
gtccttgggggaggaggcagcttctcctggggcatggctggaactgtggcgacaggagcaacgataatggggggctgcactggggttggagccacagccacagcaggagcccgcactggttctcgaaggaggacagtcacattgggggctggatcatgatcaggtatcttcccattannnnnnnnnnnnnnnnnnnnnnnnnnnnnnnnnnnnnnnnnnnnnnnnnnnnnnnnnnnnnnntcgactttctggtggtgagttttcgccatctccttgcgctggttggctagggcttcttcatatgacgtttccttcatggagaaagtcgacaccaggaagatgccaatggcagaaacaaccatgaatcctccaaagaccacaacccccaaggtttgagtgtcgtaaatatccatcctggcttgctttcctttcactaggaggtctgccccggcctttgcttcaacagagagggaaatggcacctccaggacctcagaaccggaagcttctttctgcagccagagacgcgagagggaaagcgagagggcaggagccgccgccttcgcagccgccgcggagccgggagagaggagccggccaagcctccgccaagaaacc

SEQ ID NO: 72950 - DNA, 341 bp, Homo Sapiens
aacgatcctatgaggcaggacactggtgagcacagccgtacgactttggaggtgacccccaatgtgagccacagcaatatctattcacccaaggaaacaatccgcagaagaggcacgaagtgatatgcactacagtgtggctgagggcctcaaacctgctgccccctcagcccgaaatgccccctacttcccttgtgacaaggccagcaaagaagaagagagaccctcctcggaagatgagattgccctgcatttcgagccccccaatgcacccctgaaccggaagggtctggttagtccacagagcccccagaaatctgactgccagcccaactcgccca

SEQ ID NO: 72951 - DNA, 1051 bp, Homo Sapiens
  misc_feature (68)..(68): n is a, c, g, or t
  misc_feature (75)..(76): n is a, c, g, or t
  misc_feature (188)..(188): n is a, c, g, or t
  misc_feature (195)..(195): n is a, c, g, or t
  misc_feature (205)..(205): n is a, c, g, or t
  misc_feature (213)..(213): n is a, c, g, or t
  misc_feature (219)..(219): n is a, c, g, or t
  misc_feature (261)..(261): n is a, c, g, or t
  misc_feature (275)..(275): n is a, c, g, or t
  misc_feature (288)..(288): n is a, c, g, or t
  misc_feature (324)..(324): n is a, c, g, or t
ttgtgttggattgagccgtacattcacacaggacagtatgactgatacgatttatacgactcacttanggattgnncctcgagccagaattcggcacgaggtcactctagcctacatagagcttctgttgctgtctcttgccatgcacttgtgcggtgatacacactttgacagtaccaggagacaantgactancagatccccngacatgcntcttcnccttggcaagctcagttgccctgatagtagcatgtttctgtntctgatgtaccttnttctcttcttctntgcatcagccaattcccagaatttccccaggcaatntgtagaggacctttttgggtcctatatgagccatgtcctcaaagcttttaaacctccttgctctcctacaatattcagtacatgaccactgtcatcctagaaggcttctgaaaagaggggcaagagccactctgcgccacaaaggttgggtccatcttctctccgaggttgtgaaagttttcaaattgtactaataggctggggccctgacttggctgtgggctttgggaggggtaagctgctttctagatctctcccagtgaggcatggaggtgtttctgaattttgtctacctcacagggatgttgtgaggcttgaaaaggtcaaaaaatgatggccccttgagctctttgtaagaaaggtagatgaaatatcggatgtaatctgaaaaaaagataaaatgtgacttcccctgctctgtgcagcagtcgggctggatgctctgtggcctttcttgggtcctcatgccaccccacagctccaggaaccttgaagccaatctgggggactttcagatgtttgacaaagaggtaccaggcaaacttcctgctacacatgccctgaatgaattgctaaatttcaaaggaaatggaccctgcttttaaggatgtacaaaagtatgtctgcatcgatgtctgtactgtaaatttctaatttatcactgtacaaagaaaaccccttgctatttaattttgtattaaaggaaaataaagttttgtttgttaaa

SEQ ID NO: 72952 - DNA, 794 bp, Homo Sapiens
  misc_feature (61)..(86): n is a, c, g, or t
  misc_feature (743)..(743): n is a, c, g, or t
gtgcctagctaaaattaaccctcactacaagggaataagcttgcggccgcatacgcggtcnnnnnnnnnnnnnnnnnnnnnnnnnnatctgagagataatattcctgaataatcatagagtaaaataaaataaaaaagttacattgtaaggtataaaaagcctgggcgaaatgctccaggggccttgcccaaaggccggaaaacccccgccccgccaggtgccccatgggggccatggatgtcccaacccccgctggggcggtatctccacggggcgggcactctgctccccaccccatgtggggacaaagtgtcagtgtgaggaagggcaggggcaaaagcccatcagtgccgggggtacctccagagcgcaccccaacccaccctgtcgtctttggcaaatacgcatatgcagatgcaggaatccaggggccccgagccccaggtctccgtgtgcctcctcctccctggcactccacccactgaaaaatccgaggctgaggcagggtaagtggggtagggcaagctgtggggggtgggtgcaggggtcatatctggagagcgcaggcaggcgacacaaagctcaatcctcttccctccacagggcagcagggcggggtgggcactcccggccagcccgctcatgcgtcgtacttcttaccagtccggtggatgtgctggaagagggtcatggagaaggcatgcccaggatctgcatgatgaggatgcacatcccaccgtgnccagcacgtgcttattgtcatcgaaccacatcttcaccttgtcatagcagc

SEQ ID NO: 72953 - DNA, 740 bp, Homo Sapiens
gagacgtgagtaggcaagacatttattcactcatgatatatcagtgcaaagtgtgcctacagtatacaaggtaaactcacaactcatcaaaactaaaactttttacaatgtgcaatacatgtagggatattaattcaatatataaatgtcacatgtctcccaaatgtcacccaggctttctgttatttcttaaaatatacaagtcaatattaccagagaaaagaaaagaaaatcccattattttatcctaaacttatgtatacttctctaaagattcttaggcttgtaagcaatgagatttaagtctatttttagatgttagcatcctggactgacttgcaggctgtggaaacacaagacagagtggtcacatgactaaatgaaacgggactggctgctacaggtgagggataaaattgagagagaagaatctgatttatatcacttagatttttcagtgtcttaaatattaacctatgacttgttagaattcatatagttctctcacttaacctgtactatcagggtcattgttaggtttattaacaatattttactttgacacaggaaaacatttaatagcattcaacataaaggtaaatatcaaaatatctaggacaacaatgagttatgcattatactaattgtactcacgccttcctatgaagtccacatttttaaaaaaatatattattgcatatgaaaccacaaacaggcattctgatttcagccccattctt

SEQ ID NO: 72954 - DNA, 1173 bp, Homo Sapiens
  misc_feature (777)..(777): n is a, c, g, or t
  misc_feature (779)..(843): n is a, c, g, or t
  misc_feature (873)..(991): n is a, c, g, or t
  misc_feature (1080)..(1089): n is a, c, g, or t
ggctaggtagcaggctgggttgaaatcggcacgaggcactggcgactaggtttcagcggccgctgcgatgaccaaaataaaggcagatcccgacgggcccgaggctcaggcggaggcgtgtaccggggagcgcacctaccaggagctgctggtcaaccagaaccccatcgcgcagcccctggcttctcgccgcctcacgcggaagctctacaaatgcatcaagaaagcggtgaagcagaagcagattcggcgcggggtgaaagaggttcagaaatttgtcaacaaaggagaaaaagggatcatggttttggcaggagacacactgcccattgaggtatactgccatctcccagtcatgtgtgaggaccgaaatttgccctatgtctatatcccctctaagacggacctgggtgcagccgcaggctccaagcgccccacctgtgtgataatggtcaagccccatgaggagtaccaggaggcttacgatgagtgcctggaggaggtgcagtccctgcccctacccctatgaggggctccggtagcacctgggcacctgccgctggaagctattgggctggcagcaggacgactggctgtcctcctgcccacccacactgacggcatcttcccagttccccaaggcacgccttcttcccaggcagctctaacagccctttcatgaaggtaatgctagtcttctgtccatcagtgccatttcctgtagaactaaaggctgttccaagaatgtggggtggggaaagtaaatgctaagactancnnnnnnnnnnnnnnnnnnnnnnnnnnnnnnnnnnnnnnnnnnnnnnnnnnnnnnnnnnnnnnnnncacacacaacaccccagccaaaatccccannnnnnnnnnnnnnnnnnnnnnnnnnnnnnnnnnnnnnnnnnnnnnnnnnnnnnnnnnnnnnnnnnnnnnnnnnnnnnnnnnnnnnnnnnnnnnnnnnnnnnnnnnnnnnnnnnnnnnnaaacctggggcgggggccgctttttcaaacccccggccgggggaaaacgcccccctttggggacttttgggaagaacaccttttttttnnnnnnnnnncaatttttggggaacacttcccctcccggaattttaaccccccctgggggaaaataaaaattttttaaggcggaaaaggggggg

SEQ ID NO: 72955 - DNA, 951 bp, Homo Sapiens
  misc_feature (870)..(870): n is a, c, g, or t
  misc_feature (873)..(903): n is a, c, g, or t
tatcggcacgagggtcacgattgggcttgagtcggagacttcctttcctgattggccgtgttgtacggcggcttctcgcgcagctgatgacctggaagtgatgcctaaagctgtggaccgcgtgggctcgcctccctgggactaggtttcagcggccgctgcgatgaccaaaataaaggcagatcccgacgggcccgaggctcaggcggaggcgtgttccggggagcgcacctaccaggagctgctggtcaaccagaaccccatcgcgcagcccctggcttctcgccgcctcacgcggaagctctacaaatgcatcaagaaagcggtgaagcagaagcagattcggcgcggggtgaaagaggttcagaaatttgtcaacaaaggagaaaaagggatcatggttttggcaggagacacactgcccattgaggtatactgccatctcccagtcatgtgtgaggaccgaaatttgccctatgtctatatcccctctaagacggacctgggtgcagccgcaggctccaagcgccccacctgtgtgataatggtcaagccccatgaggagtaccaggaggcttacgatgagtgcctggaggaggtgcagtccctgcccctacccctatgaggggctccggtagcacctgggcacctgccgctggaagctattgggctggcagcaggacgactggctgtcctcctgcccacccacactgacggcatcttcccagttccccaaggcacgccttcttcccaggcagctctaacagccctttcatgaaggtaatgctagtcttctgtccatcagtgccatttcctgtagaactaaaggctgttccaagaatgtggggtggggaaagtaaatgcctaggnccnnnnnnnnnnnnnnnnnnnnnnnnnnnnnnncttggtcgggccgccctcggcccctcaagaaggctttcctagaaccat

SEQ ID NO: 72956 - DNA, 655 bp, Homo Sapiens
  misc_feature (376)..(376): n is a, c, g, or t
tttttttagtcttagcatttactttccccaccccacattcttggaacagcctttagttctacaggaaatggcactgatggacagaaaactagcattaccttcatgaaagggctgttagagctgcctgggaagaaggcgtgccttggggaactgggaagatgccgtcagtgtgggtgggcaggaggacagccagtcgtcctgctgccagcccaatagcttccagcggcaggtgcccaggtgctaccggagcccctcattggggtaggggcagggactgcacctcctccaggcactcatcgtaagcctcctggtactcctcatggggcttgaccattatcacacaggtggggcgcttggagcctgcggctgcacccangtccgtcttaaaggggatataaacatagggcaaatttcggtcctcacacatgactgggagatggcagtatacctcaatgggcagtgtgtctcctgccaaaaccatgatccctttttctcctttggtgacaaatttctgaacctctttcaccccgcgccgaatctgcttctgcttcaccgctttcttgatgcatttgtagagcctccgcctgaagcggcgaaaaaccaagggctgccccaatggggttctgttgaccaacagctttctgtaagtgcgctc

SEQ ID NO: 72957 - DNA, 901 bp, Homo Sapiens
ggccgagggaatctataaacatgaaccatggacgcagaactcatggatatggaggacaggctgtatttaccatattgcattacaaagaggaatcccaggttcccacatacatcaggcaacaaaatgaagtttctccacaagaagaattaagcctccttctcagtagcagagtccagtgccttgcagagcctgaagcctggggagaaggcccagcctgggaccctctgggctgctgtggctcctctgcccccacagatcctatcctccaagccagcccacctctgccttcatcatatcccaggatactgtttgtaaataatctgctgtaagctttcttaactgttttttgtaacaagcaaagagaatatggcaaatatttgtatattcccaaggggccgggtgctttcctgtcctgccagagcatggatgaagtttcgctgggtgctcgtgactggccagttttgtgcagctgactgtctcagccaaaccactgatcttccctggaggccttcggcctgcctgcctgcctgaggtccccgctgccagtcccgggccctggagagcagatgctgtcttgttatgtacaggaggaccttttaaaaaaatcaagtttctattttttgctggtagtccgcatacccataccctctgtttttgaaaggcaaaggccaatcagtccccatttgtagcatggcaccagggtcttaggcctagtcctctcattcctcccaccctccgagatggtcagtgtgtcatgggaagcccacccccagctctgccagtgctctctgggcctggctcccagtcagtggtggccacgatgcggtacagggcatccctccttcccatctacgggtgttctcaataaacaatgtacagttgtttgggcccagaaaaaaaa

SEQ ID NO: 72958 - DNA, 715 bp, Homo Sapiens
  misc_feature (84)..(84): n is a, c, g, or t
gtcaccccagccgccagttgcccaagatctgatacaaggtacccatgaagagattatgaactacctgaaggtggagactgtacnggtggtgtgttggagctggcttgtaatgtcttatgagtgacaatcgttagtttgaggaattttgtgagacagttgtcaaattgttgctagcttgaaatctgcggcaattggagtatttacaccatagaaatgctataagtgaagacctacctttcccttaagagctagttgttaaacctttaccagcataccactggaccttgtctaaaatttctttgtgttcccagtgtcttgcccagtagatacaagataaatattgccagaatcagatatcaggaagtagtaagaaaaggagttaatatgcaaactaaatcactcgctcaattgaataattgagatcttctgttcatttgttccttggaccttaatcatttgcattttggagaaaattttttctgctttaaaagtctgtaatttcagtttttgtgtcggggagagggaaaaactatttgtctgtagttgctttttgtgacaaagtgaatacccactgggctaagtttcatatctaaagcttgtcactaagaattttcatttttaggggtcaaaaacctattttgaaaatagtgttgtgtgaatgctgtaagtgttgtacatgtctctggtttcagaattaaaagaattcagagttaaa

SEQ ID NO: 72959 - DNA, 560 bp, Homo Sapiens
  misc_feature (119)..(129): n is a, c, g, or t
tttaattcactaaggtagagataaggagaatgtattaaaataggatattttaattataaatgcatgactggggagggggtattgtttttgaataaaatatgaggttatttgccatgacnnnnnnnnnnngaagtaggaaaatcccatggaaatttatgttccttctaacttttaaaactacctaaaaaatataattgatttaaattatatctcaatattccccattcttttatatccccttaaataggtacccatgaagagattatgaactacttgaaggaggagactgtacggtggtgtgttggagctggcttgtaatgtcttatgagtgacaatcgttagtttgaggaattttgtgagacagttgtcaaattgttgctaccttgaaatctgcggcaattggagtatttacaccatagaaatgctataagtgaagacctacctttcccttaagagctacttgttaaacctttaccagcataccactggaccttgtctaaaatttctttgtgttcccagtgtcttgcccagtagatacaagataaatattgccagaatca

SEQ ID NO: 72960 - DNA, 633 bp, Homo Sapiens
  misc_feature (580)..(580): n is a, c, g, or t
taatgataaaattatatccagattcaagcgcctcttgtagcgcttcccacagtcctcacatttggatgagttttctccattgtggtctccttgttggtctttacagaaagaccggtgtacaagcctctttccacaatcctcacatttgaagggttttttcggcagtggagtttcttatgattcaaaatacttgaagcccggctaaagctcttcccacagtcatcacaattataagatctctctccagtatggaccctatggtgcaagtcaagacctgacttactaatgtagcccttcccacactcctcacatcttgtatggtttttctccactgtggattcgcttgatggatcaaaagatatgaggaccatctgaagctcttcccacattctttacaattatatggtttctgtcccatatgaatcatctgatgcttatgcaaatctagcctatcaatgaaacctcttccatacttttcagatttgtacagtttctctgctgtgtggaccatgcaatgcctattaagacttgacctaagacagaagctcttaccacatatttcacatttgaatggcttctncccagtatgaattctgtgatgtttctgaagctggaaattgtgcatgaaagcct

SEQ ID NO: 72961 - DNA, 925 bp, Homo Sapiens
ggtcgaggctgggtggtgaatcggcacgaggaagatggcggcgacggccaggcggggctggggagctgcggctgttgccgccgggctgcgcaggcggttctgtcatatgttgaagaatccatacaccattaagaaacagcctctgcatcagtttgtacaaagaccacttttcccactacctgcagccttttatcacccagtgagatacatgtttattcaaacacaagataccccaaatccaaacagcttaaagtttataccaggaaaaccagttcttgagacaaggaccatggattttcccaccccagctgcagcatttcgctcccctctggctaggcagttatttaggattgaaggagtaaaaagtgtcttctttggaccagatttcatcactgtcacaaaggaaaatgaagaattagactggaatttactgaaaccagatatttatgcaacaatcatggacttctttgcatctggcttacccctggttactgaggaaacaccttcaggagaagcaggatctgaagaagatgatgaagttgtggcaatgattaaggaattgttagatactagaatacggccaactgtgcaggaagatggaggggatgtaatctacaaaggctttgaagatggcattgtacagctgaaactccagggttcttgtaccagctgccctagttcaatcattactctgaaaaatggaattcagaacatgctgcagttttatattccggaggtagaaggcgtagaacaggttatggatgatgaatcagatgaaaaagaagcaaactcaccttaaaataatctggattttctttgggcataacagtcagacttgttgataatatatatcaagtttttattattaatatgctgaggaacttgaagattaataaaatatgctcttcagagaatgatataaaaa

SEQ ID NO: 72962 - DNA, 1677 bp, Homo Sapiens
gctccctgacccggacgctctctgggccaatatggcagcgcccagcaacaagacagagctggcctggagtccgcggctggccgcgtgagtaggtgattgtctgacaagcagaggcatgagctgggtccaggccaccctactggcccgaggcctctgtagggcctggggaggcacctgcggggccgccctcacaggaacctccatctctcaggtccctcgccggctccctcggggcctccactgcagcgcagctgcccatagctctgaacagtccctggttcccagcccaccggaaccccggcagaggcccaccaaggctctggtgccctttgaggacctgtttgggcaggcgcctggtggggaacgggacaaggcgagcttcctgcagacggtgcagaaatttgcggagcacagcgtgcgtaagcggggccacattgacttcatctacctggccctgcgcaagatgcgggagtatggtgtcgagcgggacctggctgtgtacaaccagctgctcaacatcttccccaaggaggtcttccggcctcgcaacatcatccagcgcatcttcgtccactaccctcggcagcaggagtgtgggattgctgtcctggagcagatggagaaccacggtgtgatgcccaacaaggagacggagttcctgctgattcagatctttggacgcaaaagctaccccatgctcaagttggtgcgcctgaagctgtggttccctcgattcatgaacgtcaaccccttcccagtgccccgggacctgccccaggaccctgtggagctggccatgtttggcctgcggcacatggagcctgaccttagtgccagggtcaccatctaccaggttcctttgcccaaagactcaacaggtgcagcagatcccccccagccccacatcgtaggaatccagagtcccgatcagcaggccgccctggcccgccacaatccagcccggcctgtctttgttgagggccccttctccctgtggctccgcaacaagtgtgtgtattaccacatcctcagagctgacttgctgcccccggaggagagggaagtggaagagacgccggaggagtggaacctctactacccgatgcagctggacctggagtatgtgaggagtggctgggacaactacgagtttgacatcaatgaagtggaggaaggccctgtcttcgccatgtgcatggcgggtgctcatgaccaggcgacgatggctaagtggatccagggcctgcaggagaccaacccaaccctggcccagatccccgtggtcttccgcctcgccgggtccacccgggagctccagacatcctctgcagggctggaggagccgcccctgcccgaggaccaccaggaagaagacgacaacctgcagcgacagcagcagggccagagctagtctgagccggcgcgagggcacgggctgtggcccgaggaggcggtggactgaaggcatgagatgccctttgagtgtacagcaaatcaatgttttcctgcttggggctctcttccctcatctctagcagtatggcatcccctccccaggatctcgggctgccagcgatgggcaggcgagacccctccagaatctgcaggcgcctctggttctccgaattcaaataaaaaggggcgggagcgctgttggttgtgcgcatgcgcagtttc

SEQ ID NO: 72963 - DNA, 1052 bp, Homo Sapiens
ggaagaatgaaccggaagtagaagcagagcagcccctctgcagttctcagagccagtgtaaagaagaaaaaaatgagccactttctctgcctgagttaaccaaaaggcttaccgaggcaaatcagagaatggcaaaatttcctgagagcattaaggcctggcccttcccagatgtgctggagtgctgcctcgtcctgcttctcatcaggtcccactttcctggctgtctggcccaggaaatgcagcagcaggcccaagagctccttcagaaatacggcaacacgaaaacttacagaagacactgccagaccttctgtatgtgaattttcacacaccttgaagaaactgccaaattgaaaatgtttgacatctttcacctctgcagttatgcctcaccagacattcactctggtccctagatgtttttgcagtaatccaaaagaatacaaacaaggattaagtttgaatcaaccctgcctacccatagacaacggtggatctgactttagactcaattgtggtctcctactggagggaagatcatgaaaagcccacagtagttattcagaactaacacctgcagagtgttggtcatctctacagccttaggcaggtttcacccaaagaggagaaacttctgtcgtcacccaaagtgttacatgcttaaaacacaagctacctttgtaaatacttcatctgatcagaagtgtgtcatgcttgtttgagatggagttgctgcattttaggactattgatacctttttttaattgtttttataatatttaatttgaaagaggagacccttctctctctactctttcatagactgaagtttgaatatgaaataggccttaaccatcatgttgactctcctgtcagaattttaggttggaaatttggttttattctttcatgtaattgcttatttgaacagatcacttactaaagctttagaagaagtgattcaaatgtgtgttttcccttcagttttataacaaatggattgatggcagtcaaatagctcaggaataaattactgtttcaatggtta

SEQ ID NO: 72964 - DNA, 1013 bp, Homo Sapiens
  misc_feature (78)..(78): n is a, c, g, or t
  misc_feature (88)..(88): n is a, c, g, or t
  misc_feature (177)..(177): n is a, c, g, or t
  misc_feature (251)..(251): n is a, c, g, or t
  misc_feature (254)..(254): n is a, c, g, or t
  misc_feature (268)..(268): n is a, c, g, or t
  misc_feature (297)..(297): n is a, c, g, or t
  misc_feature (307)..(307): n is a, c, g, or t
  misc_feature (321)..(322): n is a, c, g, or t
ggagtatgatcagcgcacaggcacgcacatgtttggtgtgcttaggatgacacatcagtatgccatgtcacatatcanggatgatccntcctcctgctatttgttttactttttacactgagttctattagacactacaacatatgggtgttgttcccattggatgcattctatcanaaactctatcaaatgtgatgctaggattctaacatattgccatgtgtggagtgtgctgaacacacaccagttancanggaaagatgcattntgtgtacagtaaacggtgtatataccttntgttaccacnagagttttgtaaanncaaatgagtattataggactttcttctaaatgagctaaataagtcaccattgacttcttggtgctgttgaaaataatccattttcactaaaagtgtgtgaaacctacagcatattcttcacgcagagattttcatctattatactttatcaaagattggccatgttccacttggaaatggcatgcaaaagccatcatagagaaacctgcgtaactccatctgacaaattcaaaagagagagagagatcttgggagagaaatgctgttcgttcaaaagtggagttgttttaacagatgccaattacggtgtacagtttaacagagttttctgttgcattaggataaacattaattggagtgcagctaacatgagtatcatcagactagtatcaagtgttctaaaatgaaatatgagaagatcctgtcacaattcttagatctggtgtccagcatggatgaaacctttgagtttggtccctaaatttgcatgaaagcacaaggtaaatattcatttgcttcaggagtttcatgttggatctgtcattatcaaaagtgatcagcaatgaagaactggtcggacaaaatttaacgttgatgtaatggaattccagatgtaggcattccccccaggtcttttcatgtgcagattgcagttctgattcatttgaataaaaaggaacttggaaaacaa

SEQ ID NO: 72965 - DNA, 512 bp, Homo Sapiens
  misc_feature (410)..(434): n is a, c, g, or t
tggggtgtttgttcccattggatgcatttctatcaaaactctatcaaatgtgatggctagattctaacatattgccatgtgtggagtgtgctgaacacacaccagttcacaggaaagatgcattttgtgtacagtaaacggtgtatataccttttgttaccacagagttttttaaacaaatgagtattataggactttcttctaaatgagctaaataagtcaccattgacttcttggtgctgttgaaaataatccattttcactaaaagtgtgtgaaacctacagcatattcttcacgcagagattttcatctattatactttatcaaagattggccatgttccacttggaaatggcatgcaaaagcaatcatagagaaacccgcgtaactccatctgacaaattcaaannnnnnnnnnnnnnnnnnnnnnnnnaatgctgttcgttcaaaagtggagttgttttaacagatgccaatacggtgtacagttaacagagtttctgtgcaggtg

SEQ ID NO: 72966 - DNA, 693 bp, Homo Sapiens
caaagaggttatgtgactgctcccccaggacattaaaactggaggagcccttggcagtcgttgctcgtgttcccatcagcttatagatcaggaagccaaaggccagagaagtgttaccacttgccaaggtcccttggtctaggcatccctaaattatatagaagatgaaatccaaaccagtggctctggctggttgagaagctgggtcaaggtctgaagaagagaagaggttgcaactagtcattaaaatgaaggtttgaggatcacgaccttcaattaaagtccagagaaacagctctgagggatgggcagagggacagcttcaatccttcctgcccagccctggggcctcctgaaagcttaacctcttggctccaaggtggagaggtgttcatctcctccactcctttaaatatggagctcattcctggaaggggcttcctcaatctggaaggactgatgctggggatggccatagaggaatttggccgcaccacgaaaccccgtcagtggcgtgagagtcacacacgatgggcttcctcaccaggcctgcaacatctgttgggggaagaaaggaattaaaacagggggaggcctggatttttgaaatctttccagtgtcattcgagcgcattctgtgggaagcccgggagtttggaaaggctgccgcggcctggatatatttcctgattg

SEQ ID NO: 72967 - DNA, 658 bp, Homo Sapiens
  misc_feature (611)..(611): n is a, c, g, or t
  misc_feature (630)..(630): n is a, c, g, or t
atgagccactctctacttctatgagatcttttttaccttccacataagtacagtacatggagtatttatctttctgtgcctggcttacttaacataatgtcttctaagatcatacatgttgctgagaataacagaattttgtttttttaatggccaaatagtattccacggggtatatataccacattttatctgttcatttgctgatagacacaggttgattccaatcttgggtactgtgaatagtgctggaacgagcatggcaggtgcagatgtctccatatatggattttcttttggatatatacccagtagtgggactgctgaatcatatggtagttctatttttagtttgttcaggaacctccatactcttctccataacggttgtacaagtctacattcccactaacagtgtttaaacgttcctttgcctctgcattctcgtcagcatttgttactgtcttttggtaactgtcattctaacgggggtaagacaatctctcattgtggttttgattctctttagaacgaatatttctcctcattcctctactcttaataatggatttttctgaaaacatctattattttatgcactattcattcanacactttttaaagttgcanatctgtcacaaatattaaacacaagaaa

SEQ ID NO: 72968 - DNA, 690 bp, Homo Sapiens
  misc_feature (38)..(38): n is a, c, g, or t
atgctccctgagctagaaccctctgttccttccctgtncctcctccctccctctccgactcacaccactagcctcaggggtctgagctccagctcctttcggcttcagctgccagtgtcctgagccccagagagagggggctggtgggtgcctaggcctgggcagtggatggccgtgaatgggtgcccacagtgtcaggcactgggcatgaggggttcctcccctccagctccctgtgcccccagggtcctgggaggagagacactggtggggataggccagccgcgcatcagactgtgaaccccacgaaggagcccattgtggcctaagaggctgccctcctgtgctcagccctgaggacagatgcctccttcctcttttccttcccaaagcaagcaagaggccgtggctgctgtgggaaatggtactgtacagctggctctacttccccatggccctgagcgagtggagtctgccacccaggatccccaaggcacttgagggggaaggattctgctggcctctgcgagtggtttcttgtgcactggcaccaagtgcgggtccggcagcttctgccccctgcagaaccggagagccagctaaggggtggggctgcgggggttccgtgtccacccccatacatttatttctgtaaataatgtgcactgaataaattgtacagccggcaaa

SEQ ID NO: 72969 - DNA, 2064 bp, Homo Sapiens
  misc_feature (78)..(108): n is a, c, g, or t
  misc_feature (1854)..(1879): n is a, c, g, or t
tgatatcactatagggcgctagctctgtgtagccgaacgacgagcgcagcgagtattgagcgaggaagcggcgcattnnnnnnnnnnnnnnnnnnnnnnnnnnnnnnncagtcgacggtaccggacatatgcccgggaattcggccattacggccggggcaagagctttaatcgaacttcagaccttattcaacatcagagaatccacactggggaaaagccctatgaatgtaatgagtgtgggaaggccttcagccagagctcacaccttattcagcatcagagaatccacactggggaaaaaccttatgaatgtagtgattgtgggaaaaccttcagctgtagctctgccctcattctgcatcggaggatccacacgggggagaaaccctatgaatgtaatgagtgtgggaagaccttcagctggagctccaccctcacccaccatcagagaatccacactggtgagaaaccctacgcctgcaatgaatgtgggaaggccttcagcaggagctcaacccttattcaccatcagagaatccacactggagaaaaaccctatgaatgtaatgaatgtgggaaagccttcagccagagctcacacctctatcagcaccagagaatccacactggagagaagccctaacgaatgtattggaatgtggaggaaagtttacctacagttcaggccttattcagcatcaaagaatcagcaccggggagaacccctatgaatgtagtgagtgtgggaaagccttcaggtacagctcggctcttgttcgccatcagagaattcacactggagagaagcctttgaatgggatcggcatgagcaaaagctccctcagagttacgaccgagttaaatatcagagagtccacgtgaaagagccacacacccattttcctcactttccctgagtctcaagagctcttgccttaccctataaatctcaacagcttaggatgtgtccctttcaactcagacttttcattttagagaatggggcagatggggcaaatccgttgaattttcccagaaatcacaccagccattagaaagcgtcaaggcaagtggatggcgtgctgggaatagaaagcagctctgggaccagttaccccatttaggaaaggagtttgcactaaactgtttttctcacagcagaggaacctttccaaggtggggatggaagcacagtcgggacagaattcgatggattcctttagttggagtccgcgtagtcagcacagacagcagtggaaaggacgctctgggtcctgttatttgctagggagggtaaagggagactatttcaaagctactgttcctagtccagctttaagtttcggtaagaaacatgctgttttgtttcatgatttcgttaattatggaaatttggcattgagggattattttattgagggtagaagagattccagaatcatcatctgtgatgatggtgtcctttagggctcttggagcagccagaccatgtttccaagagaaacctggtgatattgccagcagaccccctgccatcccccccagttgtcctggggctgaatgggcaaatctgtccaaacagctagtaaccggctgtgagggagagggtcagaagcacttagcgttggcctctgattgctgtcctctcttgtcctcttcccactccaatgatgaaaatgattttctctaaatgcctgggtaaggatgctttcaaggagctcacttggcctgcttgccctgccctctcacctctgacacccagccccaggagccagaccactcctgcctccacctctgactcttcagcagctgaagattaatgcagagaaagagcaaagcccaaaagggagnnnnnnnnnnnnnnnnnnnnnnnnnncgaagcccagagaaggcaggctgtgcctgagcctggtagcagagctcgttgctgggtgaggatggcactccccgagttttcccaaccgacgggatgaccttccattgtgttttcccaaccctgctcatcctgtagcataaatgaagtgcactattaaacagaatagtttttcagaagaaaaaaaa

SEQ ID NO: 72970 - DNA, 672 bp, Homo Sapiens
gcccagcttcctggcggcccccaatgctcccaggggccagccgctgccccatcaccaatgctccatccacctgaactgtgaagacaccctcctccttcatcaggcctttgaagatgccatggatggcctgccttcccacagtgtttgattgcatcgaggtctatgcccctggcttcaaggactctgtggttggcagagacatcctcacaccaccagatttggagagaatcttcgggcttcctggagggaacatattccactgcgccatgtccctggaccagctctacttcgcccgccccgtgcccctgcattctggctaccgctgccctctccagggcctgtatctctgtggaagtggggctcatcctggaggaggtgtgatgggagctgctgggcgaaatgcagcacatgtggcctttagggacctcaagagcatgtgaccctgaaccagctctgacccaggaagaagactccacccctgaattccaagtgctccattggatcagcttcccaggaagttcagcttcgggttagtacataaggccaccacaatgctcaagaaattattttagaaaaaacgtacgagttacatttagtgcaagttgaccttatgcccatgcctccatacatggactggttctgttttattaaaactaatatttcatacagatt

SEQ ID NO: 72971 - DNA, 467 bp, Homo Sapiens
atgtgtaggtgcatgtcttggggatttaaaaatttcaaggctggtttacttatgcaaagcatgcctacgtctggaatacttagggaaagaaagcgactccatgttgtccgaattcctcaagggacagaaaaaaaattggagactgttgaaatgcagatttgaagtaatttttttaaaatattattttgggttctgcgacattgtgaaaaattaaagttgttgtgcaatacttaattcagacatgtaccacaagttaatggtagactaacactggggggtggggtctaggcatcatgcttttgtcagcatactcttgagcttttaagtctactatgtctgaactgtggtttcttgtttatccttttttccttagttggactgtaatgtatggtctgtcaacctgtgaatctttaaagtatgattcaggtattgttgtattctttactgtgtaataaaaaagttgaaaa

SEQ ID NO: 72972 - DNA, 652 bp, Homo Sapiens
atcaaatactgtctcattatcatatgtttagcccccccaaaattacattttagactcttactttctctccctctcccctttctttagctcttgtttgtgtcttgccaaagaagtgtacctagtaagggaatgtttcttatttgtgccaagggactattgatgatgctgtataatggcaagatagcattttgtaatacctgcttttttatatttctaatacaaatgggcaaagctgtgaaaccaatttactaggtttttctgctttggacataattgtacgtgttaattctctctaaacagtgcctggcacatattacatgctataaaagtgttagctactactgctaccatttattattatcattattaaatatccattggttgaaaaaccaagtagtcagctaaatcatacctgctactgtacaaaatgtaggggaaaagctgagaaaaatcatttatcaataaacagttttcagaacaagaatttatactttggatatttttaaattgttaaatgttattgaaactttatgcaccaaaactgtatgaaataatttaattttgcagttgtgtttctatattctatgtaattaaagctacttttatactatattgatagttttaaataaaactggtttggaggtttgtttgc

SEQ ID NO: 72973 - DNA, 591 bp, Homo Sapiens
ctgagggagatgtcgatggactcacagctggtgtggaggctgctgacagactgaaagcccaggccatccttgctaactgcggaggagctgctggcgttggtgccccagggccaagacagccccggcctcttacaagttcctggggtcttcagtgcgcctgccggggctgaagccttcgtccttggcatggtgatgcccacctgagctgtcatgcctcgccgccatgagcctgtctgggagatgacaggattcttcttgcccgacgtgcttttgtcggactcgtcagacacatcagaaggattccgcctccacttggaacctggctccatttttatgccgctgtctgagcctccgtctgatttcttgacatcatcaccagaccacagggaattcctctccacctgtgagtgcttctcagcatcagtctgtggacagagactctctgaattagtccttccccagtcccaggctgggaagcccctcactccaaaggcaaaaatgccaaaacactggagtagttaagggaaaaataagcattactttaaagatgtttggacttttgtactctggttatcttgttagaaagactga

SEQ ID NO: 72974 - DNA, 1254 bp, Homo Sapiens
ggggggcgggtcctgagtcgcgaccctggtccggacctgacctgaattgcgaccccaacctggactgctcccctgaccgcaacccctacccccgcccaccagtatggcccggcacgtgttcctaacggggcccccaggagttggaaaaacaacattgatccataaagccagtgaggttttaaaatcctctggtgtgcctgttgatggattttataccgaagaagtcagacagggagggagaagaataggattcgatgtcgtcacgttgtccggcacccgggggcctttatcgagagttgggttagagcctccacctggaaaacgtgaatgccgagttgggcagtatgtggtcgacctgacttcttttgagcagttggcactacccgtcttgaggaatgccgactgcagcagtggcccagggcaaagagtgtgcgtcatcgatgagattgggaagatggagctcttcagtcagcttttcattcaagctgttcgtcagacgctgtctaccccagggactataatccttggcacaatcccagttcctaaaggaaagccactggctcttgtagaagaaatcagaaacagaaaggatgtgaaggtgtttaatgtcaccaaggaaaacagaaaccaccttctgccagatatcgtgacgtgcgtgcagagcagcaggaagtgaagacacgtgcattcctgccttccgtgaaggagtgcccagttcaagaggagcctgatggagccctgcctgtcgaggctgtatgcctatggggttatggaaccttgtgggcttttctagagaaaactcaacagctgtttcccataaaatgtttaaaagatcaaattagccttaatgctggattgtctgtacaagattaactatccattgtggcttatctatgcttaaagatttcttgtttatttcctcttgcagtcatgcacatgatttgggtaaactgtgagatgagaaatggttttcagagtattagatggaattcacccccgttgaagtttataaatgtgttcaggggaagcgggaggaaagagttcactgcctaatcagttttgcatgtcatgaaaattaaattcctctccaggtgcagcttcagcctcatgcaacttaaagtgataacagttatttgattttttaaaaaatattattccaaaagaaaaccattttaggtcatctcccccaactctgtttgcttactgcttaataaatataaaaataaatctgatggttacagacaggaaaaaaaa

SEQ ID NO: 72975 - DNA, 1276 bp, Homo Sapiens
cttaatccagctgatgagttacagcctgttagtaacatgaggggacattttggtgagaaatgggacttaactccttccagtgtccttagaacattttaattcatcccaactgtctttttttccctaccattcagtgattactgtcaaggctgcttagaatccaaacttggatttttgactctggcaaagcttttagaaatactgcaagaaaatgatgtgtacccaaacgtgagcataggaggcttctgttgacgtactccaacagaagaactgtgtttcaagttcaatcctacctgttttgtggtcagctgtagtcctcataaaaagcaaaacaaaaattaggtattttgtcctaaaacacctggtaggagtgtgtgattttttgcattcctgacaaaggagagcacacccaggtttggaggtcctaggtcattagccctcgtctcccgttccctttgtgcacatcttccctctccccattcggtgtggtgcagtgtgaaaagtccttgattgttcgggtgtgcaatgtctgagtgaacctgtataagtggaggcactttagggctgtaaaatgcatgattcttgtaacccagattttgctgtatatttgtgatagcactttctacaatgtgaactttattaaatacaaaacttccaggctaaacatccaatattttctttaatgcttttatatttttttaaaatgttaaaacccctatagccaccttttgggaatgttttaaattctccagttttttgttatatagggatcaaccagctaagaaaagattttaatcaagttgaattgaggggattaatatgaaaacttatgacctcttcctttaggagggagttatctaaaagaaatgtctattaaggtgatatatttaaaaatatttttgggtgttcctggcagtttaaaaaaattggttggagaatttaggtttttattagtaccatagtaccatttatacaaattagaaaatgttatttaacagctgaattatctatacatatctttattaatcactattgttccagcagttttcaagtcaaattaataatcttattagggagaaaattcaattgtaaattgaatcagtataaacaaagttactaggtaacttcatattgctgagagaaatatggaacttacattgttcaattagaatagtgttctgcaaaaatatttataaaacttctcaagatactgctactgtaattttatatgaagataagtgtatttttcaataaagcatttataaattaaaaaaaa

SEQ ID NO: 72976 - DNA, 1409 bp, Homo Sapiens
cgtggaccagccgcgccgagcggggcctctccgggccgcgtctgtggggtcgagactgcgcggccgttgggcgtgcagcggcgccagtcggcggacgaggggcccccgggagttgctggactgagacatgagcctccaactgtgtggttgggctcggtagcacatcgtgggacttgggtgtgcgcccacagatggtttggccctgcagtgaccagagcagcccaagccgccaccatggtgaaattgctagtggccaaaatcctgtgcatggtgggcgtgttcttcttcatgctgctcggctccctgctccccgtgaagatcatcgagacagattttgagaaggcccatcgctcgaaaaagatcctctctctctgcaacacctttggaggaggggtgtttctggccacgtgcttcaacgctctgctgcccgctgtgagggaaaagctccagaaggtcctgagcctcggccacatcagcaccgactacccgctggccgaaaccatcctcctgctgggcttcttcatgaccgtcttcctggagcagctgatcctgaccttccgcaaggagaagccgtccttcatcgacctggagaccttcaacgccggatcggacgtgggcagcgactcggagtatgagagccccttcatggggggcgcgcggggccacgcgctgtacgtggagccccacggccacggccccagcctgagcgtgcagggcctctcgcgcgccagccccgtgcgcctgctcagcctggccttcgcgctgtcggcccactcggtctttgagggcctggccctgggcctgcaggaggagggggagaaagtggtgagcctgttcgtgggggtggccgtccacgagacactggtggccgtggccctgggcatcagcatggcccggagtgccatgcccctgcgggacgcggccaagctggcggtcaccgtaagcgccatgatccccctgggcatcggcctgggcctgggcattgagagcgcccagggcgtgccgggcagcgtggcgtccgtgctgctgcagggcctggcgggcggcaccttcctcttcatcaccttcctggagatcctggccaaggagctggaggagaagagtgaccgtctgctcaaggtcctcttcctggtgctgggctacaccgtcctggccgggatggtcttcctcaagtggtgagcggcctcgccattgtccctgccgccggagcccgccgggagccccgggccggacacaggccgcgtcccccggccgcgcgtcccccaagagcgagcactgtggccctgggccaccacctgtgcacaaggggcctcccgggaccaggctgtgcccccgatcctacaccctgagcctcagagcactgctactttttaaaatacttctttctcttaaaagtctttaccaaaaaa

SEQ ID NO: 72977 - DNA, 927 bp, Homo Sapiens
  misc_feature (745)..(791): n is a, c, g, or t
  misc_feature (797)..(797): n is a, c, g, or t
tggaccggtccggaattcccgggatatcgtcgacccacgcgtccggtaagatggaagatgaggaggtcgctgagagctgggaagaggcggcagacagcggggaaatagacagacggttggaaaaaaaactgaagatcacacaaaaagagagcaggaaatccaaatctcctcccaaagtgcccattgtgattcaggacgatagccttcccgcggggccccctccacagatccgcatcctcaagaggcccaccagcaacggtgtggtcagcagccccaactccaccagcaggcccacccttccagtcaagtccctagcacagcgagaggccgagtacgccgaggcccggaagcggatcctgggcagcgccagccccgaggaggagcaggagaaacccatcctcgacaggccaaccaggatctcccaacccgaagacagcaggcagcccaataatgtgatcagacagcctttgggtcctgatgggtctcaaggcttcaaacagcgcagataaatgcaggcaagaaaagatgccgccgttgctgccgtcaccgcctcctgggtcgtccgccacgggttgcactgccgtggcagacagctggacttgagcagagggaacgacctgacttacttgcactgtgatcccccttgctccgcccactgtgaccttgaaccccatgcactgtgacctccccccttctcccccttcccactgtgattggcacatcgacaagggctgtcccaagtcannnnnnnnnnnnnnnnnnnnnnnnnnnnnnnnnnnnnnnnnnnnnnnccccanaaagggactccagagaggtcagacaggtgcccacttggggccactttgggggtaaaagcgccagtgcccagccaataaaacaggtttaatcaagggctccatttaaattttggggggaatttccaaaaac

SEQ ID NO: 72978 - DNA, 963 bp, Homo Sapiens
  misc_feature (728)..(738): n is a, c, g, or t
gtgagacatgtacattgcagcagtgttttcactatcgagttgctcagtatgtgaccagaattacagtatagtatgagtggccacaatgagatgagcatgagacctagagttcaagcatgctgagtgaagaccatccacttctgacatacgagcagaagctcagagtccggaggcagactctctcctggttttccttgtgctgatggcaaaatactaaacaagtcttctctccgtcacttctaagcccagggatgcaatctcactccctggcactctgctttcttctagaagtagtaagcctggctggtagggaaccaccctgaggggtatgggaaggggaagtcggttcactttccctatctcccaaaatactagaggtggggttggcaccctccccaggctctccgagcctacagagctagcccagtctccaggcaaggcccagatgccctgggacttagctcggggagggaggtataggcatggggtgctcgtctgtcctggcggctgcagagccctgccccttttctgggcggcagtaggaatacagaagctaagctcaccaaaatcctattggttaatgtttctagtgaatttcccagaaacatttttaagtagactaccaaactaccctttcttaattaaaaattcattaaaccactaaaacccctcccatgcactttttcttgcaaatcagatatttgtataaacaaacaaaaataggaagnnnnnnnnnnngaaaggatattttcaaatggaacttactttttaagtgatggagacatgcacttgggggtgggtgggtgtgagttttcatttgtgttttgaaatcccaaattaatgagcatgataaactgttattgctggcactggctttaccccaagtggccaagtggcactgtctgactctctgagtcctcctcgtgccgaattcggcgcgccgtcgacttcatactctctccc

SEQ ID NO: 72979 - DNA, 1963 bp, Homo Sapiens
  misc_feature (899)..(909): n is a, c, g, or t
  misc_feature (1759)..(1759): n is a, c, g, or t
  misc_feature (1861)..(1861): n is a, c, g, or t
gggggaggagggaaagcggcgagtaagatggaagatgaggaggtcgctgagagctgggaagaggcggcagacagcggggaaatccaaatctcctcccaaagtgcccattgtgattcaggacgatagccttcccgcggggccccctccacagatccgcatcctcaagaggcccaccagcaacggtgtggtcagcagccccaactccaccagcaggcccacccttccagtcaagtccctagcacagcgagaggccgagtacgccgaggcccggaagcggatcctgggcagcgccagccccgaggaggagcaggagaaacccatcctcgacaggccaaccaggatctcccaacccgaagacagcaggcagcccaataatgtgatcagacagcctttgggtcctgatgggtctcaaggcttcaaacagcgcagataaatgcaggcaagaaaagatgccgccgttgctgccgtcaccgcctcctgggtcgtccgccacgggttgcactgccgtggcagacagctggacttgagcagagggaacgacctgacttacttgcactgtgatcccccttgctccgcccactgtgaccttgaaccccatgcactgtgacctccccccttctcccccttcccactgtgattggcacatcgacaagggctgtcccaagtcaatggaaagggaaagggtgggggttaggggaaggttggggggacccagcaaggactcagagagtcagacagtgccacttggccacttggggtaaagccagtgccagcaataacagtttatcatgctcattaatttgggatttcaaaacacaaatgaaaactcacacccacccacccccaagtgcatgtctccatcacttaaaaagtaagttccatttgaaaatatcctttcnnnnnnnnnnncttcctatttttgtttgtttatacaaatatctgatttgcaagaaaaagtgcatgggaggggttttagtggtttaatgaatttttaattaagaaagggtagtttggtagtctacttaaaaatgtttctgggaaattcactagaaacattaaccaataggattttggtgagcttagcttctgtattcctactgccgcccagaaaaggggcagggctctgcagccgccaggacagacgagcaccccatgcctatacctccctccccgagctaagtcccagggcatctgggccttgcctggagactgggctagctctgtaggctcggagagcctggggagggtgccaaccccacctctagtattttgggagatagggaaagtgaaccgacttccccttcccatacccctcagggtggttccctaccagccaggcttactacttctagaagaaagcagagtgccagggagtgagattgcatccctgggcttagaagtgacggagagaagacttgtttagtattttgccatcagcacaaggaaaaccaggagagagtctgcctccaggactctgagccttctgcctcgtatgttcagaaggtggataggtcttcccactccagcatggcttgaactcttaggggtctgcagtgctccatctccattggtggccccagctcagtaactatacctggtacatttcctgtgtgcaatcagtaccttgaaggcagaacattctgaataaagttggaaaaagaacagctttgctttgcaaagattgatgacagactggttcctcagaggcctaggctacccgtcaccccctttttccagagcgaggggcctggaaatgaanggagtttatcctctgtcctggaagcctggggttttgctttggctctttgaaggggaaaaagactaagagggcagctgcccaaaacaactgtggggaacctgnctcctcctcaggcttcctgatccctttccgttgcactgcgccttatcccttcagccagccagacagccctccctggtctggacaaaaaataaccttccccaa

SEQ ID NO: 72980 - DNA, 820 bp, Homo Sapiens
gtcatgctaggtacgaggcctgggtggtgaattcggcacgagggcctcgggtcgcaactgcgtagaggcttcgcgcctttctcagatactgaggaggcttgaacctgtgggtgggaggtgaagcggaacggtcccggcgggactgaatgcagtcgggaaggggaggacgggaagtctagccggcttggacccgccccactctgttacctgccagatgacgctgaggaaactgcttttcttctcgaggcctccgttgcctcgtctgtgcccgggcggtggtgcttacccggcggggtcgcagggaggtctcgtggcggcgcgtgttgggtctgcgtttcccctctggggtgcttgggcagcatgagcccagggctgtggacagcctggtgctcacgggtttgtggctccacagacttcccaagaaggacaacccgaggcgaggcttgtggctggccaactgccagcggctggaccccagcggccagggcctgtgggacccggcatccgagtacatctacttctgctccaaacactttgaggaggactgctttgagctggtgggaatcagtggatatcacaggctaaaggagggggcagtccccaccatatttgagtctttctccaagttgcgccggacaaccaagaccaaaggacacagttacccacctggccccgctgaagtcagacggctcagacgattgcaggaagcgctgctccgagggcccgaggggccacaattccattttctccactccactgctgatgtcacctgtttcctgtggcaagaggcctcagaactggcactttgccggctccccag

SEQ ID NO: 72981 - DNA, 1202 bp, Homo Sapiens
ttacggctaggtagcgaggctgggtggtgaattcggcacgaggaacctgtgggtgggaggtgaagcggaacggtcccggcgggactgaatgcagtcgggaaggggaggacgggaagtctagccggcttggacccgccccactctgttacctgccagatgacgctgaggaaactgcttttcttctcgaggcctccgttgcctcgtctgtgcccgggcggtggtgcttacccggcggggtcgcagacttcccaagaaggacaacccgaggcgaggcttgtggctggccaactgccagcggctggaccccagcggccagggcctgtgggacccggcatccgagtacatctacttctgctccaaacactttgaggaggactgctttgagctggtgggaatcagtggatatcacaggctaaaggagggggcagtccccaccatatttgagtctttctccaagttgcgccggacaaccaagaccaaaggacacagttacccacctggccccgctgaagtcagccggctcagacgatgcaggaagcgctgctccgagggccgagggcccacaactccattttctccacctccacctgctgatgtcacctgctttcctgtggaagaggcctcagcacctgccactttgccggcctccccagctgggaggctggagcctggccttagcagccccttttcagacctactgggccccttgggtgcccaggcagatgaagcaggctgcagcgcccagccttcaccagagcggcagccctcccctctcgaaccacggccagtctccccctcagcgtatatgctgcgcctgcccccacccgccggagcctacatccagaatgaacacagctaccaggtgggcagcgccttactctggaagcggcgagccgaggcagcccttgatgcccttgacaaggcccagcgccagctgcaggcctgcaagcggcgggagcagcggctgcggttgagactgaccaagctgcagcaggagcgggcacgggagaagcgggcacaggcagatgcccgccagactctgaaggagcatgtgcaggactttgccatgcagctgagcagcagcatggcctgaggggctgctggactgaccgaggggctgcccagcaagactgcagcctcttcctccctcagatcccaccagacccaccaggtgccataataaagcggattctagacgaaaa

SEQ ID NO: 72982 - DNA, 961 bp, Homo Sapiens
ggccagagcatgccgcgtcactgctccgccgccggctgctgcacacgggacacgcgcgagacgcgcaaccgcggcatctccttccacaggtcagcgcgcgtgcgccgcgggctcacgtgcgcatgcgctagttgttgctcgcctcgggtcgcaactgcgtagaggcttcgcgcctttctcagatactgaggaggcttgaacctgtgggtgggaggtgaagcggaacggtcccggcgggactgaatgcagtcgggaaggggaggacgggaagtctagccggcttggacccgccccactctgttacctgccagatgacgctgaggaaactgcttttcttctcgaggcctccgttgcctcgtctgtgcccgggcggtggtgcttacccggcggggtcgcagggaggtctcgtggcggcgcgtgttgggtctgcgtttcccctctggggtgcttgggcagcatgagcccagggctgtggacagcctggtgctcacgggtttgtggctccacagacttcccaagaaggacaacccgaggcgaggcttgtggctggccaactgccagcggctggaccccagcggccagggcctgtgggacccggcatccgagtacatctacttctgctccaaacactttgaggaggactgctttgagctggtgggaatcaggtgggcctccctgccggccgacgctggggtaggatgtggggctcccggcggactgggacagctgcaggtcatggaagtcccttgagcagcctgcgtccaagggggctgtttcctgttcccagctctgcacagtgaaacccagccccaggatcactgtgcctgtgacacaaggggaaaacaggagcctttccagagagtatcttccagagccccagtcttgccagcaagtccacaaatcaacgaattctttctggctggtcagcccagctcggctatgcaggctttccacacacctg

SEQ ID NO: 72983 - DNA, 343 bp, Homo Sapiens
  misc_feature (240)..(240): n is a, c, g, or t
  misc_feature (246)..(246): n is a, c, g, or t
  misc_feature (265)..(265): n is a, c, g, or t
  misc_feature (301)..(301): n is a, c, g, or t
  misc_feature (321)..(321): n is a, c, g, or t
caatggccagagcatgccgcgtcactgctccgccgccggctgctgcacacgggacacgcgcgagacggaatccgcggcatctccttccacagacttcccaagaaggacaacccgaggcgaggcttgtggctggccaactgccagcggctggacccaagcggccagggcctgtgggacccggcatccgagtacatctacttctgctccaaacactttgaggaggactgctttgagctggtnggaatnagtggatatcacaggctanaggagggggcagtcccaccatatttgagtctttctncaagttgcgccggacaaccnaagtccaaaggacacagttacc

SEQ ID NO: 72984 - DNA, 1541 bp, Homo Sapiens
ggaacagcccagcgggccgtcccatcggcttttgggtctgttacccaaagaatgataaagttggttttatttcaagaagtcgatcaaaaagaaagccccagcgctctagagctcagctgacgggaaagggggtgcgcagcctcgagtttgagagctacccggagctccaagacaggggtgggttccagctgcccgcacgccccgaccttccatcgtaggtgcgtgcgacgacctgggacgctggaaacccggagctgcgcgctgggcggaaaggactcctagtgggcccggctgagaaggcggaggtggcgcgcgaggggcgggctcgtgccaacgctggcctgggccgaggccactggtgcatatgttcccgggagggataagccagacctgccaacctggaagaggaatttccgctctgccctcaaccgcaaagaagggttgcgtttagcagaggaccggagcaaggaccctcacgacccacataaaatctacgagtttgtgaactcaggagttggggacttttcccagccagacacctctccggacaccaatggtggaggcagtacttctgatacccaggaagacattctggatgagttactgggtaacatggtgttggccccactcccagatccgggacccccaagcctggctgtagcccctgagccctgccctcagcccctgcggagccccagcttggacaatcccactcccttcccaaacctggggccctctgagaacccactgaagcggctgttggtgccgggggaagagtgggagttcgaggtgacagccttctaccggggccgccaagtcttccagcagaccatctcctgcccggagggcctgcggctggtggggtccgaagtgggagacaggacgctgcctggatggccagtcacactgccagaccctggcatgtccctgacagacaggggagtgatgagctacgtgaggcatgtgctgagctgcctgggtgggggactggctctctggcgggccgggcagtggctctgggcccagcggctggggcactgccacacatactgggcagtgagcgaggagctgctccccaacagcgggcatgggcctgatggcgaggtccccaaggacaaggaaggaggcgtgtttgacctggggcccttcattgtagatctgattaccttcacggaaggaagcggacgctcaccacgctatgccctctggttctgtgtgggggagtcatggccccaggaccagccgtggaccaagaggctcgtgatggtcaaggttgtgcccacgtgcctcagggccttggtagaaatggcccgggtagggggtgcctcctccctggagaatactgtggacctgcacatttccaacagccacccactctccctcacctccgaccagtacaaggcctacctgcaggacttggtggagggcatggatttccagggccctggggagagctgagccctcgctcctcatggtgtgcctccaacccccctgttccccaccacctcaaccaataaactggttcctgctatgaaaaaaaa

SEQ ID NO: 72985 - DNA, 877 bp, Homo Sapiens
  misc_feature (784)..(784): n is a, c, g, or t
gcacaacaccgcttcagtggttctcagaggccccagtttgggaagggagtgggattgtccaagctggggctccgcaggggctgagggcagggctcaggggctacagccaggcttgggggtcccggatctgggagtggggcccaacaccatgttacccagtaactcatccagaatgtcttcctgggtatcagaagtactgcctcccaccattggtgtccggagaggtgtctggctgggaaaagtccccaactcctgagttcacaaactcgtagattttatgtgggtcgtgagggtccttgctccggtcctctgctaaacgcaacccttctttgcggttgagggcagagcggaaattcctcttccaggttggcaggtctggcttatccctcccgggaacatatgcaccagtggcctcggcccaggcctggaagattccgaaatcctcctgctgtgcatcctgccgtaggccgtgcttccaagggatgcggaagcgcgtgcggctcttgttcacccaggccacgccctccagttgccccaggtccagctgcgacaccagccagggcaggatccgtggctttggggttcccatggtccggcctacgatggaaggtcggggcgtgcgggcagctggaacccacccctgtcttggagctccgggtagctctcaaactcgaggctgcgcaccccctttcccgtcagctgagctctagagcgctggggctttcttttcgatcgacttcttgaaataaaaccaactttatcattctttgggtaacagacccanaagccgatgggacggcccgctgggctgttcccgcccctcgtgccgaattcgccacccaggcctcgctaccttagaaccgtagtagttactgcc

SEQ ID NO: 72986 - DNA, 1152 bp, Homo Sapiens
  misc_feature (912)..(912): n is a, c, g, or t
ctcctgctgtgcatcctgccgtaggccgtgcttccaagggatgcggaagcgcgtgcggctcttgttcacccgggccacgccctccagttgccccaggtccagctgcgacaccagccagggcaggatccgtggctttggggttcccatggtccggcctgcgcgtatagggcatttcctgggcgcgaccggcctcccccggacccacctggcctggagtttccgcacccagacctccttctcacgggccacggcacaggtccttcacccatattttcgggggtacaaacaggaaacctcctcttcccatcctcccatcctcccgagaggctctctaatcagctagggttccttcccatatccatggcacatccttccccagcgtcttcagtgcagaccctccactccctcaattccgccagtatagacctcctccctcccccacatcatcgaaagtaagtatccccactttcagggtagcatcctctttccctagttatttcagtgcagaatcgattcacgtgtaagcctctacctcctgcacttacccctatgtagacccccttccacagtccccctacagaagatctcccaaacatttccaacacagaacttccattcaattcccctccgactgcccgcctccctcctccaggacagagcacgccccaggtttcgagactgaactacccccatctacggagtccacccctccctctctagaaccccctcagtgtagacgcctcctcttttcctctttcctccctactttttctagtttttctgcagccgacctccagcgtcggccactgtagctccttccttgctccactttccccagagtacacagcctgcctttccactctccgtgcagacccatcctctttcccgctcctcgctctcggacgccaccancgctctcccgggctcttccgcgttacctacgatggaaggtcggggcgtgcgggcagctggaacccacccctgtcttggagctccgggtagctctcaaactcgaggctgcgcaccccctttcccgtcagctgagctctagagcgctggggctttctttttgatcgacttcttgaaataaaaccactgttatcattctttgggtaacagacccaaaagccgatgggacggcccgctgggctg

SEQ ID NO: 72987 - DNA, 779 bp, Homo Sapiens
ataaaaagaaagccccagcgctctagagctcagctgacgggaaagggggtgcgccagcctcggagtttgagagctacccggagctccaagacaggggccggaccatgggaaccccaaagccacggatcctgccctggctggtgtcgcagctggacctggggcaactggagggcgtggcctgggtgaacaagagccgcacgcgcttccgcatcccttggaagcacggcctacggcaggatgcacagcaggaggatttcggaatcttccaggcctgggccgaggccactggtgcatatgttcccgggagggataagccagacctgccaacctggaagaggaatttccgctctgccctcaaccgcaaagaagggttgcgtttagcagaggaccggagcaaggaccctcacgacccacataaaatctacgagtttgtgaactcaggagttggggacttttcccagccagacacctctccggacaccaatggtggaggcagtacttctgatacccaggaagacattctggatgagttactgggtaacatggtgttggccccactcccagatccgggacccccaagcctggctgtagcccctgagccctgccctcagcccctgcggagccccagcttggacaatcccactcccttcccaaacctggggcccctctgagaacccactgaagcggctgttggtgccgggggaagagtgggagttcgaggtgacagccttctaccggggcgccaagtcttccagcagaccatctcctgcccggagggc

SEQ ID NO: 72988 - DNA, 898 bp, Homo Sapiens
  misc_feature (26)..(26): n is a, c, g, or t
  misc_feature (35)..(35): n is a, c, g, or t
  misc_feature (37)..(37): n is a, c, g, or t
  misc_feature (63)..(63): n is a, c, g, or t
  misc_feature (66)..(66): n is a, c, g, or t
  misc_feature (776)..(838): n is a, c, g, or t
caacgctttgtcggggaagatggatngagtacacntntacgggcgccagttccagcagacatntcntgccggaggctgcgttgtggggtccgaagtgggagacaggacgctgcctggatgcccagtcacaatgccagaccctggcatgtccctgacagacaggggagtgatgagctacgtgaggcatgtgctgagctgcctgggtgggggactggctctctggcgggccgggcagtggctctgggcccagcggctggggcactgccacacatactgggcagtgagcgaggagctgctccccaaacagcgggcatgggcctgatggcgaggtccccaaggacaaggaaggaggcgtgtttgacctggggcccttcattgtaggctcctgggccccccagatctgattaccttcacggaaggaagcggacgctcaccacgctatgccctctggttctgtgtgggggagtcatggccccaggaccagccgtggaccaagaggctcgtgatggtcaaggttgtgcccacgtgcctcagggccttggtagaaatggcccgggtagggggtgcctcctccctggagaatactgtggacctgcacatttccaacagccacccactctccctcacctccgaccagtacaaggcctacctgcaggacttggtggagggcatggatttccagggccctggggagagctgagccctcgctcctcatggtgtgcctccaacccccctgttccccaccacctcaaccaataaactggttcctgctttgnnnnnnnnnnnnnnnnnnnnnnnnnnnnnnnnnnnnnnnnnnnnnnnnnnnnnnnnnnnnnnngaccgcgtatgcggccgcaagcttattccctttagttgagggttaattttagcttggcac

SEQ ID NO: 72989 - DNA, 994 bp, Homo Sapiens
  misc_feature (51)..(51): n is a, c, g, or t
ttcctgtcctgcagaattcaagaacctttatgcagttcctgtcctatgatntaaagaggtcagtgactccgctactctcactacatcttagagtagagtggtagagtagttgatctgagacagtaaggttccaggagatggtcttgccctactatatgtcaggaacagctagccttagaattcagtatacttggtggcccacccctaccccatgccccagtgccttatttggtctaaagcacctaacttttccattcttaatcagctgattatgctaaatgcgtaaaaaagaaaaacaccttacaaatccacagggaaatcaaagaacaattcaggtttaacagaaatagtctattaacaataaaaagttggatgaaaaagcacactaaaggttctaggggctaccataataaaggtagataggaagagttttcattttttttgtcttcactgtacaaaagaaatacattatatacatgtattaagtgcctcgtttgtatccagtttttcattttcccgatgtgttattttgctgttgctgctctgccaaggcttgctgaaggcgcatccgcttccgggaatagtgctgccaatgtagaatctgctgttcatcaataaatttcgcacactgagcattcaccagctcctttcggaagtgttcatattggagcagctctaacatgtgtaaacactgagggtactttagatacttggcatattctgggtctttccagtaaagcaagtatttaagataattaacaaaagctttgtctttgaagtaacctctttgggcaagaaaattaaggtaatttgggttggctaaacattgcacaaattccaactccaactgaaaccgaagtcgatttccagcatcatctgtctccatagcgacagcagcggccataacaaacgaagacaccaaaacgccaccagcctgacagagcaaaagcccagagacgcgggcgaagttccggaaaccacggctccctctccc

SEQ ID NO: 72990 - DNA, 533 bp, Homo Sapiens
gggaaaaaaccctatgctaccagagtgtactaagttactgttatagaaatggtaggctacaagatcgtttttaagagaataactgaattataccttggcattatttacctaaattatgttgttcattcacttacaaacttaaacccaggtaccctcagtgtttacacatgttagagctgctccaatatgaacacttccgaaaggagctggtgaatgctcagtgtgcgaaatttattgatgaacagcagattctacattggcagcactattcccggaagcggatgcgccttcagcaagccttggcagagcagcaacagcaaaataacacatcgggaaaatgaaaaactggatacaaacgaggcacttaatacatgtatataatgtatttcttttgtacagtgaagacaaaaaaaatgaaaactcttcctatctacctttattatggtagcccctagaacctttagtgtgctttttaatccaactttttattgttaatagactatttctgttaaacctgaattgttctttgaaaa

SEQ ID NO: 72991 - DNA, 755 bp, Homo Sapiens
atgggtggggaattcccagcccctaggtccctgggccaggattcttctctgggaaaacaggttatgggcccaggttgccctttaccttagtgggggccccgcggcgcccaaaacgaaatggggtttggaaaagtttttttcgaaggcccgaaggcggcccgcacatagggaattatggtgttggcgaattagttaggcaaaggttcgccagaaatagtcttattaacaataaaaaagttggatgaaaaagcacactaaaggttgtagggggctaccataataaaggtagataggaagagttttcattttttttgtcttcactgtacaaaagaacatacattatatacatgtactaagtgcctcgtttgtatccagtttttcattttcccgatgtgttattttgctgttgctgctctgccaaggcttgctgaaggcggcatccgcgtccgggaatagtgctgccaatgtagaatctgctgttcatcaataaatttcgcacactgagcattcaccagctcctttcggaagtgttcatattggagcagctctaacatgtgtaaacactgagggtacaattaaggtaatttgggttggctaaacattgcacaaattccaactccaactgaaaccgaagtcgatttccagcatcatctgtctccatagcgacagcagcggccataacaaacgaagacaccaaaacgccaccagcctgacagagcaaaagcccagagacgcgggcgaagttccggaaaccc

SEQ ID NO: 72992 - DNA, 1593 bp, Homo Sapiens
  misc_feature (39)..(39): n is a, c, g, or t
  misc_feature (582)..(615): n is a, c, g, or t
  misc_feature (1065)..(1156): n is a, c, g, or t
gacagccttgaggcgggcctgcccctccaggtccgaggntaccccgaggagaagaaagaggaggagggcagcgcaaaccgcagaccagaggaccaggagctggagagcctgtcggccattgaagcagagctggagaaagtggcccaccagctgcaggcactacggcggggctgagacaccggctggcagggctggccccagggcaccctgtggccctggctctgctgtccccttggcaggtcctggccagatggcccggatgctgcttccggtagggaggcagcctccagcctgcccaagcccaggccaccctatcgccccctacgcgccttgtctcctactcctgactcctacctgccctggaacatcctttgcagggcagccccacaactttaaacattgacgattccttctctgaacacaggcagctttctagaagtttcccttcctccatcctatccactgggcacaactgcaataacttctgaccttttggtgaaagctgagaactcctgactgtaacatattctgtatgaactttatctaaagaaaaataaatctgttctgggctctttaaacaannnnnnnnnnnnnnnnnnnnnnnnnnnnnnnnnncaggggggcccgccacagaatataacccccccgggagagcgcccccaacgtctaccgcgcggacccccacaccaatactcggccacacacgcggcgccccctacaaacagaccacacacacacaccagccacaggccctgcgccccgccacttcacaacacgccccgcgaacggcgcacacacacggcaaccatgaggcaccccccagggagaagagacccccctaactcccggagggggggcgcaccatattcgtgcgcccaacacatccccacaccaacacatttcacagcagcccaaaagggaacaaattaacactcccacacgggcataaagcggcggctcacctcaaccccagcatatagactgcgacagcttggaagaagcctggagaacaaccccgggagccccagcacaccgtcgcaacaccatctattccacccccgcggnnnnnnnnnnnnnnnnnnnnnnnnnnnnnnnnnnnnnnnnnnnnnnnnnnnnnnnnnnnnnnnnnnnnnnnnnnnnnnnnnnnnnnnnnnnnaacagcagccgcacgccggctcatccacacagggcgcagagggcagcaaccgcgcgacccggggcagtcggtgggcgggcaccgacagcgaggggaggtcgcagccacagcagcggcacaggccaggaagcccgcaggagcaggtcgggagtggacggaggagcggaccagggcgcgtgggcagggcacagggggacgaggacgggcgaagacgaggcacacggccaaggtacgaaacgcaggggagcacgcaggaggggagcgcacagggcgcagcgacacacgacacagcggacacgcgctgcacaagagacgcgcggggggcgcacagtcgcaaccaggagccaggggcgcgtgcgacgcggtggcacagacgaggggcgtgacagcacagccacgccccgtgaagaacggtggcccgcaccactgagacacga

SEQ ID NO: 72993 - DNA, 1717 bp, Homo Sapiens
atgtgcgttgtaattctacatcgccgccgcgcagaggccgcgcgatggcgttgtaaggggttgagaattttcgggatagccgggcgcctcttgcaatggagacggtcatttcttcagatagctccccagctgtggaaaatgagcatcctcaagagaccccagaatccaacaatagcgtgtatacttccttcatgaagtctcatcgctgctatgacctgattcccacaagctccaaattggttgtatttgatacgtccctgcaggtgaagaaagctttttttgctttggtgactaacggtgtacgagctgcccctttatgggatagtaagaagcaaagttttgtgggcatgctgaccatcactgatttcatcaatatcctgcaccgctactataaatcagccttggtacagatctatgagctagaagaacacaagatagaaacttggagagaggtgtatctccaggactcctttaaaccgcttgtctgcatttctcctaatgccagcttgtttgatgctgtctcttcattaattcggaacaagatccacaggctgccagttattgacccagaatcaggcaatactttgtacatcctcacccacaagcgcattctgaagttcctcaaattgtttatcactgagttccccaagccagagttcatgtccaagtctctggaagagctacagattggcacctatgccaatattgctatggttcgcactaccacccccgtctatgtggctctggggatttttgtacagcatcgagtctcagccctgccagtggtggatgagaaggggcgtgtggtggacatctactccaagtttgatgttatcaatctggcagcagaaaagacctacaacaacctagatgtatctgtgactaaagccttgcaacatcgatcacattactttgagggtgttctcaagtgctacctgcatgagactctggagaccatcatcaacaggctagtggaagcagaggttcaccgacttgtagtggtggatgaaaatgatgtggtcaagggaattgtatcactgtctgacatcctgcaggccctggtgctcacaggtggagagaagaagccctgagctgggggaaggggtcatgcagcaccaggggatatgcccaactcactgcctgctggaagctctgtgggaatcagatgaaacttgagggaattgtgactctgttccctgttcagggtcccctgcccttctatctgggagctagggaaggtatgggggaggaaagagaatggatttatagctacccttaccctcacacatacacttgaaaaaactttcagcctagccagttctagcccctgtcctcttagatatatccccctttctgggtgaactataggctctgtgcctctcagacaaattctgatctctaagagatccccagacctcacttgcctctgcctccatcttggccctgattcaaccctaagataatagcacaacaaaattcttcataaagatatttttattcacctgttccgtgctatatggaggaggccaagtccatttagtgacatttcttcccataatgtgagtggggaggattgtggggaggaggggctttgggttcctgtgtttgtgcatatgaagggagatgggggttaggtggaggaggagagcagcgtggttagctaaggttattgctttttgtggcaaatctaattaaatgacaggaatctcttcacgat

SEQ ID NO: 72994 - DNA, 1296 bp, Homo Sapiens
  misc_feature (366)..(421): n is a, c, g, or t
  misc_feature (623)..(633): n is a, c, g, or t
  misc_feature (801)..(809): n is a, c, g, or t
cagttcacttatcattagaatgtctgaacttttatgtaacatttttgtgtgcatctctcaatgctaacaccacatgtttgcctatgacaagtttatagagtgaaaggtatcttctgggttgaaataattcacaaattggtgaatgtcatcttgcaacacaccctgtacagtcttccttaaaggaacactacagtatatttttagtatctacatgctgaatgactgaatacagacctaagcacagcagtggtcctggtacagtatttaagtgtcggcatacacaggcgtaatccctgtataaagtagtgccaaactgatttcagttgtgtaactagtttaaaacccaataaatggattctttttacnnnnnnnnnnnnnnnnnnnnnnnnnnnnnnnnnnnnnnnnnnnnnnnnnnnnnnnntaataaatttaaaagagaacaccaaaccccaaaataatacccaatattttcttttttgcccccctcggccttgttaaaaattttctaaaccatttcgttgggggcggggccccccaatagtaaaggaaatgggggcatttacctcgttcccaaatgaaaatctgggcacataaaaatgaggtgctggagattcccacaatgnnnnnnnnnnngccccgcggggggacccgactggggtgtgttgaaaacgttccccaagatgggatgttttgaggagggcctttttctttgtgctgcttcccaacgtggggtgggcccatgtgggagtcttcttagtattttgaattttgacagcctgcggcactctggtgacacctccnnnnnnnnncacggtggtggaaaaatatctagatatgaacgctcttctctcctacattctgggaatgaacctgtgttcaccaaagcggagatagtgtttggtcgccctcttaataattcgcaaagataggaaggtatcagaatacgagtctcttacgataacaactattgatgagaaaataattttattctgcccccacgcgtggcatgcactacatcgtggggagtaccgagaagatgtgtgttcgacatatgtgtggaggagcggagcacgtctcgcaaaagggtacagacttgtggataaagactcgcctacagacatgtgtactgttgtgtccggtagtccagcacgacatatatgcattttctttcgcacgtaatgataacacccgcaggatatatatgaagtcgaagatgatgaacactgatgattatactgttcatcgaatgatcgagcgcactcggcgagctatgatattagcccggctaagagtgtc

SEQ ID NO: 72995 - DNA, 718 bp, Homo Sapiens
  misc_feature (50)..(50): n is a, c, g, or t
  misc_feature (238)..(238): n is a, c, g, or t
caggaccccattgccttccccaggtggcttcctcatccccgagggatgtntcctgagcggctgcccccatgcctccagcgctacgtggacaaagtgtcaaacctcagcctctttggaggcctcccagctaaccatgtcctcgtgaaccagtatctgcctggggagggcatcatgcaccatcagcctggggagggcatcatgcaccatcagcctgggcccccacaccgtgctggacttntacgagccgcggcggccagaggacgatgaccctacagaacagcctcggcctccgccccggcccaccacctcgctactgctggaaccgcgcagcctgctggtgctccgcggccccgcctacacgcgtcttctccacggcatcgccgccgcccgcgtagacgcgctggacgccgcctcctcgccgcccaatgcggcagcctgcccgtcggcgcggccgggagcctgcctggtgcgcggcacccgggtctcgctgaccatccgccgcgtgccccgcgtgctgcgcgccggcctcctgctgggcaagtgaccgccagggccgggacccctcggattcccaggttcctgcccctttggggctgctgtgactccgcgacctaggaaccgtgggcaaagggggctcccctgggttatttattttcccaataattttgtgtgagctacagaagaccccataccaaataaacaaaaaaatctttcaaac

SEQ ID NO: 72996 - DNA, 923 bp, Homo Sapiens
  misc_feature (131)..(168): n is a, c, g, or t
tggtggacggattgggtgcaaggagttggtgttgatggaggagcaggacgccagagtcccagccctggaaccgttcagagtggagcaggcaccacctgtaatctactatgtccctgacttcatctccaaannnnnnnnnnnnnnnnnnnnnnnnnnnnnnnnnnnnnncccaaagccaaagtggacccagctctctgggagaaagttacagaactggggtgggcttcctcatccccgagggatggttcctgagcggctgcccccatggctccagcgctacgtggacaaagtgtcaaacctcagcctctttggaggcctcccagctaaccatgtcctcgtgaaccagtatctgcctggggagggcatcatgccccacgaggacggaccactgtactacccgactgtcagcaccatcagcctgggctcccacaccgtgctggacttctacgagccgcggcggccagaggacgatgaccctacagaacagcctcggcctccgccccggcccaccacctcgctactgctggaaccgcgcagcctgctggtgctccgcggccccgcctacacgcgtcttctccacggcatcgccgccgcccgcgtagacgcgctggacgccgcctcctcgccgcccaatgcggcagcctgcccgtcggcgcggccgggagcctgcctggtgcgcggcacccgggtctcgctgaccatccgccgcgtgccccgcgtgctgcgcgccggcctcctgctgggcaagtgaccgccagggccgggacccctcggattcccaggttcctgcccctttggggctgctgtgactccgcgacctaggaaccgtgggcaaagggggctcccctgggttatttattttcccaataattttgtgtgagctacagaagaccccataccaaataaacaaaaaaatcttaaaa

SEQ ID NO: 72997 - DNA, 539 bp, Homo Sapiens
atgatcactcaggcaccactgccacccccagcaactccaggacccggaagaggcccacttccacgtcctcctcgcctgagacccccgaattcagcactttccgggcctgccagtgaggctgaggactgggggacccctctgtctccaggcattcgggggcctgaggtccctccagctacttctgggggggctctgtcagccactttctcagggaattggacagaggaaaggaaggggaaccctggccttgggattttcatcacagaggagtgggagaggggacacaggcatgggcctggcactatacagacaacaggaagttcccctctcgaccttcggctcctcaggaccaccagagaaggagatgtcaggaccccttcttgtcccccagctgggccataagacgtcccaggtctctgcacacccgtggaattcctcccttccccagtgggtttttgagcatagggtgcccttgggtgtgttgtgtgtctgcctgctggcttgcttaagttattaattataacacgggtcaaggtgtt

SEQ ID NO: 72998 - DNA, 948 bp, Homo Sapiens
  misc_feature (479)..(499): n is a, c, g, or t
actgcatgtgtgggttggaggactgttttcacttctgattcatctttactcgtatctcatcagagctcatacctcttgtagttgggggattgcagtttataattccaataaatggggcaaattcaataataacataatacaaatgagtttgaatgcaggacaggtcttcaaagcatacacaacatgggcctacatatgtacaacaataataatttataagttactgtttggatggaaagtaaaagtacagaaaatttgttaaaggaaattaaaatggagatcatgtctcaataatctctgagcagacaaaattagttaggtctcataagtgatctcaacctcgcttgatttgcaaatacaaacaaaacttaaattatttcttgtagctgcatattgaaaaaagagaaatgaagctcaaccagtcagaagtagccaacaaccttatataaatagaaactgtccaacaaggtaaacagacnnnnnnnnnnnnnnnnnnnnngttgtgctaccaccaaatgatttctttgtttctacatttttcaaataaatacttgcttcttacactgtcaatgaagcactcaatatctttccgtctgatattttataatttatcaattgctcttactcaaataaacactttgcaatttcattgtgtgtcaaattactttttagcagaataaactaggaataaatattacaaaaatatttacggaatttggaaaaaacatagaaagtttttgaaatatatgaatgtagacataagcaaatagacaatttgtatcatattcttaggcagaaaaactcaatattatcaacatcaattgtccttatagttatttataaattcaattttgttcctatactgataccattaaatattgcaagtacacgttactataaaatgttatatagatgaaaacacaaacaagaattgacaagaaaactttg

SEQ ID NO: 72999 - DNA, 678 bp, Homo Sapiens
taatatgtgggaaattaagattacagatgctttgggccccctcaaacagtacattgctacagttcactgtagcaacagatttggtggtgatggggggatagaggtagaagcagatagaaggtaattttaaagttaatttattatgaatcattttcccctaatctgcataaatgaattagaactgattttaataaaaatattctgtgtaaaaagtactcagaaaaacatctaaagctgttggagaagagggactcatataaatagttggattgcgttttgctttttatttctttataaaaatatgtcaaaaacagtttttaattttagaaatcttatacttgaaagaaacctcaattatcagtggctttatgaagtaaagttaaaaacaaacataggaaatgtgaaaatatttgtgtttgttttgtctgactaacttgctgctaaatgctatctttaggtgtgtgaaagttctttgatatgttattgtccttttacatcttgttaaatagccattgcttttgagaatcagatagtgtgttgtttaggggttaattgtgtctatatctttcaaaaacttttatattatgtattataagaagttacagtagtaccattttgattagtctgaatgttttcaggccttgaaataaattttgactaagtgatattttttcttaa

SEQ ID NO: 73000 - DNA, 610 bp, Homo Sapiens
  misc_feature (53)..(53): n is a, c, g, or t
gggggcgggggtgcctgttctgctccccagattttccaaaccccactcccctngaaaagtgcagcttggtgctgtccactccacgcagccctcccagccactccctcagcaaaaattcactgtgcacttacaggtcgccccactcccaatgtaggccaatggtggggattcagagatgaaaaaaggcaggaactcagaggctcttggaactgcagcgtggggactttgaataaatttcctgtgtctccttcctgggtcctgggcttctaatccccagtgagtccctgttccatgtcggtgtcctgcacaaactgaggctctggggacagacactcagactgggtctccaaagactgaaactggacccttggtgaccatgatgcttcctgggctggtatttcctccatcactgctctggaggacaatgaccatcacagctcgcaacagggcacggtcgccggctcctgacggcggggccctcggtccgcgaggtgaatgaaccagggctgaagagaaacaggccctcctcgcacccgggcctccgcgcactctcggggaagcgaactaccgtcggccgcggccggacgccgcctccttctactcccgtgaa

SEQ ID NO: 73001 - DNA, 650 bp, Homo Sapiens
ctgtctacagcggccctgtgagaggctgtggtggccccgagcgcgagtgtgtaggtgacaggacagcggccaggcccgcccctcccctcgtgatggtcattgtcctccagagcagtgatggaggaaataccagcccaggaagcagcagggtcaccaagggtccagtttcagtctttggagacccagtctgagtgtctgtccccagagcctcagtttgtgcaggacaccgacatggaacagggactcactggggctccacctgttcctcaggtgcctgctcttccccgtgagggaagcccaggagaccaggcagctgcgctcttgacagccaggtaccaggagtttgtgacattcgaggatgtggctgtgcaccttactcgagaggaatggggatacctggaccctgttcagagggacctctacagagaagtgatgttagagaattatgggaacgtggtctcactgggtaaggacttccttattattcggtttatctatttgaatttctttactctcttgtttcttcctaagtataaggtctctgagaaggtctgtagagtgtggcttagattccaggacttagaacctctgaatccttatctttcacatccgtactggcccgggggatgctctagagtctcacctgaaag

SEQ ID NO: 73002 - DNA, 1144 bp, Homo Sapiens
tttaactgttggaaactctgtaattattagataaaattaacagtactttacaattatatgtatgtcactttacagtttacaaagttattaagtagatattcaatttgatgccctgaaataaatttaacttctttgccctcccttctcccctccatcaaggacagagtaaggaacacttaatcaggaaaggcaatataattgcatcaatctgtacagaaccacaaagaataaagggtaggaaggtaggaccttgaagagggccacagggacttcaaggaaggaggaaaccagaatgttaaacatgagggaagcccagggttcacaggagagttaggcaccatacggggcaggttgtgttcgccacataaaaggaggggcacacagcataagtttcacattctaaaataatatgaaaagaccataactgaagagctgaatttggaatttctggtttttcacaatacaagtagatgatgaccaccaaccatggtttctgaatgaactgggttcaaaacatatctggttgcaacagagggcttccttggaccctaacatttgaaattaaacagaggtaatttgaggagctgcgattttacacagtggtggcatcctggggagcttctattccatcagtcaattttaatatctcacaatcgtggaaaaggagtttccgagcagggacgagcaatatcgatgggaagccgatacttgggccatctcttggagattcctgctgtaaggacggcaagtgtttctccagagaaagcacttgcctgggtatgactcagggccgggcaggaattcacactatgaatccgggtggtgggaaggcggagaagtatgcccccagtgagtccctgttccatgtcggtgtcctgcacaaactgaaggctctggggacagacactcagactgggtctccaaagactgaaactggacccttggtgaccctgctgcttcctgggctggtatttcctccatcactgttctggaggacaatgaccatcacgaggggaggggcgggcctggccgctgtcctgtcacctacacactcgcgctcggggccaccacagcctctcccgggccgctgtagacagccccgaggccggcgcttctcggtggcacttccggcgacggagtgcag

SEQ ID NO: 73003 - DNA, 1378 bp, Homo Sapiens
tcaatcttcacagcaaatgtattttttgtttcacggcctggaagaggtatttttttctcagaaagaagctaacattaatgtgtgctgggcaccgtctgacagcttggctctaactccaaagtaagttgcccttgtcttctaagtactctacagagtgcaaaggcttaccaaatccaaaccaccttgaattaaacaaatcttaatgaggagcatcatcgttctttgtatgaaagtctttgttatgttaccaaatgaagaaatgcagtacattacacctctattgatgtaaatgaggctcaaacatctcaatcccatcctcttcctaccccccagccatcaaacgttataactgcttagtgacactttattcaaattacaacccatagtttttgctccaaaaaatgcaacacctgagaaaggcctgttgctttaaaatcaagaatctataaaagcaatgccaccctaatcttaaggtgcttcttaggtatttcccaaagctctttgctcttttatactgcagcattttcaggaggagtcattagatactgtcaaggtccaagaaataactaaaaacaaaaaataacctgagactcttttctgcaccaccaccagctgcccagtacactaggtcaccttttacagcagtgagcacagcaatccatgccacaaaaatcttcacaaaacaagaaggaaagatacaaaaagaattatattaaaatggtaacatacacttgtatgagggagggatatttaaaattaaaatattatcatcacaagaaacaccagatattccttgctctgcccttgggcaaccaagaaacttaaagcctgttttatatcccagaaataaaagagagacgtgatagaagtaacagtgctcagtgcttgcaacccaagtcaatttatactcttgttaggtaagtccaaattctaaagtctacaaaaatcctgttaaatcaaggggaaaaaaattcattttaggacaaagttattcaagatgaaaggaaggcatgtgttcagtgagagaactgcctgctgtcagatgatttcttgctaatgtgtttaaagattttggatttctcaactttcttggttttctggtagccaaatccaccaccacctcctcgctttttctgcttgccttcattactgttgacgttcagatcaacgaagggaggcaccttgaaaccaaattgacagagcaacctgaggcaaatttaggttattaacattaaagatctgtttcagagaatgggaatcataggctcgtatgtatgacttatatgcttcctgggctgacttatgaagaaagtattcttttcaatcaatttctcaagctgagactgaatgtcagaaatttcctcgtgccgcctcgtgc

SEQ ID NO: 73004 - DNA, 1494 bp, Homo Sapiens
aacgttctccagatggagctaatatgcaacaaagttgaaaaccactgatcctgggggtgtcttgttaattttgaagtaaaagtgtacagaagacgtagtgtatgagaaagggccatttttaagacagttacctgttgtgctgctgttacaatatataatgaaaccaagtcaggggagtaaatttatcaatcttttgatgtaaagtaaaaacgtagttcacacttcaggagagaacttcatagcacaatgtctttctataagatatttttaatgatttagtattttacaacatttgtttaccatattttgatataccatttttttctatctgcccagttttattaaaaaaactatatattattttctaaagaaacaatcatatttttatacaaaattatgttttcaggtaacgaaatagatgtagggtacagtggaacataagcagtgttacccctggctgggagtcagtattatacaacaaatggtgagctggaacatgccctgtctgtgctgtccctcctgtgctgggtcgcggatgtgtaggcaacattgccttatcacgctaggttcacctgacactttaaaaagaaaaaaagttccatagagttctgtggtcacaaaattggttttgcttttatcaaatactttaatagaaccaaagttgcagatattggaatgtatggaagtatctcagtctctgcataagaggattaaagtatgaaaggatcatttaatgactgttttacttataagtcattaagtaatccaccatttcttatggatgatgcttaagcctggtgaggtttgtactctaaggagcccagatcataatgcagtgcatttccttagcccttagagtttcttgcaaacatttaaaaaaagacatatttacgacagcacagatcacgaaagagaccatttttaattactgtaaacaggtactgctttatgtttattttctctctacttcaaccaaaatcagatctttgaggttttgctgacattgttggtggttttgcacatgttctttctaattggatttatgaatagttctatgggttttcaaagatgaatcatgctaagaacacttctgctttttgatccactgtttgcagcagaattatatatatgtataggaaaaatccactttgaataatccatgttttgtatttggaaattgtttttaaaaataaaaaggaaaggaaatatataaagctgttatttattctgcatttcttacatatctatcgcttgtcagtatacccgttttggtatatattgcctctgcacatctacatttgtatatgcaacagtgagctttatatctacataaactgtaaataatcctttctgtgaaaggatcatcatatcaagatgataccaaaagtatgtaaaaagaaacctgcattattttgtaattatttcttatagatatttcatggtaagattagcagtcaataaagttacttttttgcctttaaaaaccaaaagacc

SEQ ID NO: 73005 - DNA, 973 bp, Homo Sapiens
ttctatgatacacacagccacgctgattaatatgcaaatgaacattttcctttatgtctctccagataatgtttattgtctgaggtaaattaaattcccaccagggtttgctgtcagtattttaacacccacattagtatatgcgtccagggtcataaccccctaaaatccatcatgcaaccttattaatctgtcttgggattccagtttagtgcttggatttatttcctgattacactacatacgaaaagtgagacatctgccattcccaactctgggaaaaccaactaatatacaaccatataaatgaaggccatcttgatggtctcaacactaatttttatgatgcaaatttatacactgatttttgtaaaggacaaagttttaaaagcgtatttaacttgatgttttctatcagcataaataaaatggtcatgaatagtcattaaaaacagttgccagtgataatctgcatgaaggaaaaagaaccctgcaaatggctattgagttggaagtattggtttttgatatgtaagagatattcagaatgctcacactgaaaatgcctcaactttttaaagtgtaagaaaccaccatgagtggtgtctagatttctaatgaagaatcatgatacagtttggattaagtatcttggactggttttaaacagtgctttgtaccggatctgctgaagcatctgtccagctggtatcctgtgaaagtttgttattttctgagtagacattcttatagagtattgtctttaaaatcagattgtctcttctatattgaaagcatttttatgttttctaatttaaaaattaatattttcttatagatattgtgcaataaagctgaagtagaatgtgtggtttttgcaaatgctttaacagctgataaaaattttacatttgtaaaattaatatattgtactggtacaaaatagttttaaattatattttaaaaagcttcc

SEQ ID NO: 73006 - DNA, 2368 bp, Homo Sapiens
  misc_feature (47)..(81): n is a, c, g, or t
  misc_feature (1537)..(1545): n is a, c, g, or t
  misc_feature (1707)..(1715): n is a, c, g, or t
  misc_feature (2020)..(2020): n is a, c, g, or t
  misc_feature (2049)..(2049): n is a, c, g, or t
  misc_feature (2117)..(2117): n is a, c, g, or t
  misc_feature (2144)..(2144): n is a, c, g, or t
  misc_feature (2211)..(2211): n is a, c, g, or t
  misc_feature (2227)..(2227): n is a, c, g, or t
gccgaacgacccgagcgcagcggagtagtgagcgaggaagcggccgnnnnnnnnnnnnnnnnnnnnnnnnnnnnnnnnnnncagtcgacggtaccggacatatgcccgggaattcggccattacggccggggggcgccggtggcgggactctggggaaaatggctgcgtcttcgagtggtgagaaggagaaggagcggctgggaggcggtttgggagtggcgggtggtaacagcacacgagagcggctgctgtctgcgcttgaggacttggaggtcctgtctagggaacttatagaaatgctggcaatttcaagaaaccaaaagttgttacaggctggagaggaaaaccaggtcctggagttgttaattcaccgagatggggaatttcaagaactaatgaaattggcacttaatcagggaaaaattcatcatgaaatgcaagttttagaaaaagaagtagagaagagagacagtgatattcagcagctacaaaaacagctaaaggaagcagaacaaatactggcaacagctgtttaccaagcgaaggagaaactcaagtcaatagaaaaagcaagaaaaggtgctatctcctctgaagaaataattaagtatgcacataggatcagtgcaagtaatgctgtatgtgctccactgacctgggttccaggggacccccggagaccctacccaactgatttagagatgagaagtgggttactgggtcagatgaacaatccttccactaatggcgtgaatggccatttaccaggagatgcacttgcagcaggaagattgccagatgtccttgctccacagtatccatggcagtcaaatgacatgtcgatgaatatgttaccaccaaatcatagtagtgactttttgttggaacctcctgggcataataaagaaaatgaagatgatgtagagattatgtcaacggactcctcaagcagtagtagtgagtctgattgaaaaaccttaaaagacaatatacagaattgaatactgtagaattctgtttctttaacagtagcagggaaatgtaaactacaggtgacaaaaaatacccaggtaaacactggctttggtagaattgtgcagtcattaaaagtcaaaattttttgactttctttttaaagccaaagaccatagttttagttttaagccactaggtagatatttaggggaatagtcaaaatttactgttgaaaaagcagttgctatgtgctttcttaccctgttctgttccagttttgctggatttgtacatagccattctagaaatagagttgagggaaattatccatatacatatcactaataggcttcttggaattatttagaaaagcatttttaaactggcagtggatgactgaataggcatcatatttctttttgtgtgtcatttaaaagtaacaaaaactgccatttgacagtaaaggctcttggcttctgttggaggcatgggaaattgtctcaatttgtacagtttgtaattgtaatttttgtaaataaatttgtttgtacattgtatgcnnnnnnnnnagtttaaatatactggcacgtgtacggtaggaaattattttctggtaaatccacgctgcattttataataacttgagttgactaacctgaattgaaacctcattaccaattaaataggggttcctcaacaggccctattccctatgtagaaagaaaataaannnnnnnnnaactaaattggacaaaaaattctaccaccagccccttggtctggattttaaagaaataagaattggtgctgaaagaattttaagaagtgggaaaagcaaacccatttttctttcccccttccaccttttcctcctttctttccaggttccccccgggaaggtccattttttttagacccaccttttttaaaatttcctgggttgggcaaaccactcctgggtggctttaagggataaatattggcgtttaaataccaaacttaatttctccctggaatgggcaatccacggttttttaaagaacnaaagggaactcccttcccggagatatacncaaagggggaaaataacaacaccatttttacattgggggagaaagacttttttcgctgggcactcccncgctacaacgcggaagaacaaacatanaaacatttgtgtttagaccaatttcccctaaccccgccggagagatttatttagtccgcgcccgcancgacgcacgagccacnccagcatccgaccctctcttcgataatcgtttgtgtctggagcaccgccgccctcgcgcgacgcgcccccgagacacaagaggattttatctcagaaaacacaatatttccccgttctgggggcgcccgcgccgggccgct

SEQ ID NO: 73007 - DNA, 1233 bp, Homo Sapiens
  misc_feature (30)..(30): n is a, c, g, or t
  misc_feature (814)..(814): n is a, c, g, or t
  misc_feature (1087)..(1095): n is a, c, g, or t
tgacttttatttttgggtaaggcattatgnccaggtgcatgcagttatgtctgggttacgtgtgaaacgtacatctggtgaactgtatacttggctcaaacttctcaaaatttagaggtgctggaaaggattgtcacttggagcctttagtagacaaaaggcagaaagtgagcatcatttcagaaatgctttagtatgcacacttttagctgatattttgatatatagaataataatatacacagtggagaatattcaaagagtggctgaagggagaatacagagccagtagggccaaaatgaaacttctaggatgtcttctgaattttcagcacatggggggaataagtgaacaaatttcccaacatcgtgcaatgctttatagcacaatgatctagatttcagactgtgttaaggttttttctttgttgatgttgttgttttaattctaatgggcacggtgtgactggcagagtgagtttaaaagctttacgagtgattaattgcttggcaggcacccacgctatctgcatttccagaactttactgatgcatccatgtacatttccactgaggaattttggtgggtggggggaggttgtgctgcctcacaatgtcacgtgtattaaagtctaagcagtcacttctgattcacttgcactgtttgggaaatgtcaggtttacaaaaacatacatgtttggaataaaaaatggctgcaaacaattcagaagttcaatctgtaatttacttgctaataagaactttttaaagtgttgaagctagggtttcaatgtaatacaacatgagcattanagagaactcaaggtccatctaattcacatgaacaacccacctgatgtggctgaactgtctgcagtccttggcctccacacaagaggtaccaccctcctctctgcatcaccctgactcccctggccccggggctacaccctagggttcttgattcttgagaataaattgtgccccaaaattaaaatgggaatgggaatttccctttatttattcaggtaagaaactttcctttttccccatggtggcccttggcccagtttaacctaaagccannnnnnnnncccagaaagccattttttgaataaacaattttctttaaccccattttttaacaaaaaaatatgggaatttcccccccttaaagggtttttttcaactcctccccttttcaattctgggggccaaattaaaaaaagatt

SEQ ID NO: 73008 - DNA, 500 bp, Homo Sapiens
  misc_feature (82)..(97): n is a, c, g, or t
tggtaacaatcgtgctatagtctcttaataccatgtttggtccttaaatcttacttgcctatgtataaaatctattatcttnnnnnnnnnnnnnnnncagatccagtgggagaaagaatgtttaataaatggtattgagacaaatagctatctgtttggaataaaaataaaattagatccttaaatcttgtaccatatagaaaaatacatattactgatggatccaagagttaaaaaataaaaatgtaaatatccaaaattctacatacaattttagggggtacacagattctctgaagcccacccatggatcccagattattatctataagaggaactgttaattataacctctattaaaatctcaatgccaaatactagctgtatttaagtcacatgcaacaaatgaaaatgaacacattaactcattgttataactttataaaatctccaaactggactagaaacagaggcatgtcaatacaaatggacagtgactt

SEQ ID NO: 73009 - DNA, 839 bp, Homo Sapiens
caccgctcccccatcagccatgaaggctccctgtcctcagctgccatgtcccccagcttctcaccctctctgtctcctctggctgctcgctcacccgttgtctcaccatttggggtggcccagggtccctcagcctcagcactcagcgcagagtctggcctggagccacctgatgacacggagctgcacatctagctgtggcccaggctgggccccgacctgggatgcgcacagtgtccccaacgcaggccccactctgagcctgccctgggcagcctcggactatgactggctacggggaggccaccaccaggccccagctctccaccctgaactccccagccccctcagagtactaggaccacagaagccctgttgctcactgacctgtgaccaggtccaatgtggggagaaatatgaaggaggtagcagccctgggttctcctcagtgagggatccctgccctgcaccagcaccctgagatggagctgagactttatttattgggggtagggggatggaggaggtccctcccaacatgtttggacccagctcctttgggttccactgacacccctgcccctgcccctgcccagaaccaagtgccatttctcactctggagccttaataaactgcaatttgtatccagtctccagctttgttctatagggatgactggaagacacctggcagagtattgtggatacctcaggaggcacagaggggtggtggggtggggatggcactgggagctcaggagcctagcctgaggctgatgatcacatctctctgcagctattcttttccctctaatatgggcaaagaggccagcagggcc

SEQ ID NO: 73010 - DNA, 1268 bp, Homo Sapiens
ggtaccggtccggaattcccgggatatcgtcgacccacgcgtccgcctgctcactcgcttgggccgccggatggcagagttccctctggagccaatgctatgcaaaatgctcatcatgtctgtgcatctgggctgcagtgaggaaatgctgaccattgtatccatgctgtctgtgcagaacgtcttctataggcccaaggataaacaagcccttgcagatcagaagaaggccaaattccaccagactgaaggggaccacctcaccctgctagctgtgtacaactcctggaagaacaacaagttctccaacccatggtgctatgagaactttatccaggctcgttccctgcgccgggcccaggacattcgcaagcagatgttaggcataatggacagacacaagctggatgttgtttcctgtggcaagtccacagtccgagtgcagaaggccatctgcagtgggttcttccgtaatgctgccaagaaagacccgcaggagggttaccggacactgatcgaccagcaggtggtctatatccatccttccagtgccctcttcaacagacagccagaatgggtggtgtaccatgagctggtgctcaccaccaaggaatacatgcgtgaagttaccaccatcgaccctcggtggcttgtggagtttgccccagccttcttcaaggtctcagacccaactaagctaagcaaacagaagaagcaacagcgtcttgaacccttgtacaaccgctatgaggaacccaatgcctggagaatatctcgagctttccgacggcgctgaaaggcaagattgttcctttgcctctccagcagcagtagccagggcttggacttatcgatgacaggctggtcctgaggatacagctgtcccgtgactgactgtcttaactgagcattttctcaactcgactctcatttcttccctgctggtaaaatagaaacagggatttaaacctggctttggcaagagcctgcagcctccatcaccccaagtccttgggcccagttgggagctcatatctaacacagagacacattgcatcaacttcaagaaagggacaatttgtgcagctccaggatgggaaggtggagtgggtgagcatcttgtgcagggacatggtgagtgccctgatgccccagctagcaggagctactgtgctcatctaaagtgtttgccccacttcccaccccgtctccagcccctgtactttggcttgacctcgtggaaatatttattttcttaaggaaacaaa

SEQ ID NO: 73011 - DNA, 987 bp, Homo Sapiens
  misc_feature (73)..(73): n is a, c, g, or t
  misc_feature (135)..(135): n is a, c, g, or t
  misc_feature (174)..(174): n is a, c, g, or t
  misc_feature (254)..(254): n is a, c, g, or t
gcccgccttaggggagagcaacacctccctagcgtggttgcccagtcttcgtctcccataagtcatcatttgntctggcccacccctgtatcccaggtcaaaagttcttccagaagattgggagcactcattctntgtgtctccttccccttgtctccagagttcctgtcctcnagagccagccagccagggagctggagcgagcagctgagccacgtccacaagagctttcatgccttgtgccgcatagcctnacctcttcctccagagtgctctctgcgccctgtgttcctgctacagagtgtcttttctggagtcaggatttctcggtcaccctcctggttctgccctgtcccattccaccccaccccagggggaacagtagcttcaccttgttattcccattgctctcctggctcactcttacggtcggtctccagtgactgaagcattccccacccttggaatttctcatcttctgcctcccttcctactccttttggttttgtggggagaggggaaggatcagggggccaggccagcagctcgggggccacaaggagatggataatgtgcctgttttttaacacaacaaaaaagcctacctccaaaatcccctttttgttcttcctggacctgggcattcagcctcctgctcttaactgaattgggagcctctgccacctgccccgtgtatcctggctctcagctcatggggaagccacatagacatccctttcttcccttgcacgctcgctagcagctggtaaggtcttcacaccctgattcctcaagttttctgcttagtggcactgacattaagtagtggggggacagtccatgccaggacaccctggagtagccttcccccttggccgtgggcaggccctaactcactgtcgctttggagttgaggtgtcttttctttttctttctttagttcctgtattctaaacattagtaaaaataaatgtttttacacagaaa

SEQ ID NO: 73012 - DNA, 1012 bp, Homo Sapiens
  misc_feature (47)..(47): n is a, c, g, or t
  misc_feature (108)..(108): n is a, c, g, or t
  misc_feature (119)..(119): n is a, c, g, or t
  misc_feature (121)..(122): n is a, c, g, or t
  misc_feature (207)..(207): n is a, c, g, or t
  misc_feature (220)..(220): n is a, c, g, or t
  misc_feature (231)..(231): n is a, c, g, or t
  misc_feature (262)..(262): n is a, c, g, or t
accttagtcagtaccgcagtcagccaactgctctgcaggtcattgtntgcatcagtgagtctgagtgcatcagtacgaggaatcctagtaggcatccgctatccagcntggtgatgtcntnncagcatggtggctcagcctgctctgcagctatgaactgcccagatgtcacccaagccatgtgtccaagactcatacctgagcagngccacacttcacnttgagctatcnaacgtgcacagacaagggagtggagagtgtntcgacatcatggagatggaggatgaagaacggaacgcgttgcttcagctgactgacagccagattgcagatgtggctcgcttttgtaaccgctaccctaatatcgaactatcttatgaggtggtagataaggacagcatccgcagtggcgggccagttgtggtgctggtgcagctggagcgagaggaggaagtcacaggccctgtcattgcgcctctcttcccgcagaaacgtgaagagggctggtgggtggtgattggagatgccaagtccaatagcctcatctccatcaagaggctgaccttgcagcagaaggccaaggtgaagttggactttgtggccccagccactggtgcccacaactacactctgtacttcatgagtgacgcttacatgggatgtgaccaggagtacaaattcagcgtggatgtgaaagaagctgagacagacagtgattcagattgagtcctgaggcatttacttttgggtaaaggagagttgagcctgaattaggaatgtgtacattgtaggaatcctggttgtggggaccaggtctgtgggcctcaggtctggccagccagggctggtgctgtccccgcctacctccacttcctttcccttgctcactctggatccagtgacagcaggtgtcatgggtcaagcataaatcatatatagcattttcaggcatgttcctggtagttcttttgagtctgacattctaataaaataatttgtagaaaaaaaccag

SEQ ID NO: 73013 - DNA, 200 bp, Homo Sapiens
agagatctgagcacagtgctgtctgccatgacagaggaggcagctgttgcaatcaaggccatggaaaaataactggcccgatccctacaatatacacattcctaattcaggctcaactctcctttacccaagagtaaatgcctcaggactcaatctgaatcactgtccgtctcggcttctttcacgtccgtactggcccg

SEQ ID NO: 73014 - DNA, 922 bp, Homo Sapiens
ctttcatgttagattgatgacttctgtgaatagaaatcatcctgatcctattttacctggcctccagggcctgttgatgggctttgcaggcagtccagcagcccacacctgcaggcaggatgctgtcgtcaatgagctgagggtagctgctttgctgaagacctcacacgatgtccaatctcatccaaataacattgttaccatcctccccacccaccacatcaaaacataacacatcacagcactcagtagaggtcctgcctccccatttctcaagggaagccagtaggcaacacagccagcacggtgctctccagggcagcccctctcagacgaggaggcagcgggtgcagccaggtgtctgcagagcagccacaaaggtggcctaggatgcgggtgtctccccaggtgagtccatccacacacgtttgaaaaacactattagtctttctaacacactgagggaaagattaaaatctgtggaataaaggaggagattttatttacagatttttttaaaagccacctgggttgacaccttcctacttatccactagatgtcatcagaggtgctgttccgtggttctgcattaacccctgcctcatgtctgtaacatgtgacagtaattccagctcggtccctccaggcaaaggagaaacgggacttacttcacaggacagaggattgacagaagtcagtttaagataagtgtttgaatcagatttcagaacatctcattcatttcttagatttgtgttcacaattgtgttctctaaaatgtgtctaaattttaaaaatatgtacatgcataatgtcattttaaaatctgaaggaaagaatttgaagtccacaaaaagtgtttgaggttctttggttttgttagtaaaagccagttctgtggtgatgaaaaacaaaacacag

SEQ ID NO: 73015 - DNA, 1026 bp, Homo Sapiens
  misc_feature (175)..(300): n is a, c, g, or t
ccaaatgggcggtaaggctgttccggttggagggtctattttaagccggagctcgtttaggtgaacccgtcagatcggcctggaggaacgccattccccccggtttttgacctccatagaagaaccacgggacccgattccagcctcccgactttagccttaggcccgcggacgnnnnnnnnnnnnnnnnnnnnnnnnnnnnnnnnnnnnnnnnnnnnnnnnnnnnnnnnnnnnnnnnnnnnnnnnnnnnnnnnnnnnnnnnnnnnnnnnnnnnnnnnnnnnnnnnnnnnnnnnnnnnnncccacgcgtccggggttttcttatatcctttcctttcccacctctaaggtggctggggagatgtcaggggaaagacagatagttgtaaaaactctaaagctttaatatattcggtttgtatgtaatggaagcacggggctagagtttccacataggccccaacataaaggccttccctcgctgttgaggccaccatgccttactgcatccagccaggctgcagagagtgaggcacacggtgaacatggccactgacttttctgccactctaactggacaactggaagacttggaaaggcctccacctgtatctacactctgagggccctggactgggcctgagcttgccacagaggctccgtctgactgtgggctgggaggagggaggcaggggagagccggtcacggtggctggtctttactgcagggcagcactgtggccagctgtctgtctttacactgcatgcagaagtttaaacactgaagtgccgaagtggcccgtgccgccgcacagagaccccgactttagtttgggctgttccacgcttggctcaccattgccgcctgggacttaacctgctcaggcgggccttcgcccagctgcaaatagggatgcgttagagactgttcccaaagcttgttgggctccttaaatggcatgtacaatttaagtgcaaagacagggagtgtcaataaagatggaaagccatttccagttaaaaaaaa

SEQ ID NO: 73016 - DNA, 804 bp, Homo Sapiens
  misc_feature (202)..(211): n is a, c, g, or t
gctgggtggcgaattcggcacgagggcagtcgtcactcgcgtctggctaccagctccccgctgccctgagctcggcgggctggcattcggcccggggaaaagcggagcaggtctgcgaggctaagtgtctccgcggcgcacctcgcggcgagaatccggaggagaaggagactgcaaggataggcccagaaaaacaaccagnnnnnnnnnntctcatcatggcaaatattcaccaggaaaacgaagagatggagcagcctatgcagaatggagaggaagaccgccctttgggaggaggtgaaggccaccagcctgcaggaaatcgacggggacaggctcgccgacttgcccctaattttcgatgggccatacccaataggcagatcaatgatgggatgggtggagatggagatgatatggaaatattcatggaggagatgagagaaatcagaagaaaacttagggagctgcagttgaggaattgtctgcgtatccttatgggggagctctctaatcaccatgaccatcatgatgaattttgccttatgccttgactcctgccatttatcatgagattaatactgtgattcccgctgttttctttttccttgcattttcctaatatgcctttactgatccgtttgctgtgaaccctatgttatttccatgtgtcaagtgggtcttgtgttgccagcttctatttgaagattgcctttgcactcagtgtaagtttctgtcagcagtagtttcacccatttgcatggaaaaatttaaagctaataaagcaatttaaaaagcaatcta

SEQ ID NO: 73017 - DNA, 807 bp, Homo Sapiens
gtggtaccggtccggaattcccgggatatcgtcgacccacgcgtccgagcgacgcagccttcggtgcagtcgtcactcgcgtctggctaccagctccccgctgccctgagctcggcgggctggcattcggcccggggaaaagcggagcaggtctgcgaggctaagtgtctccgcggcgcacctcgcggcgagaatccggaggagaaggagactgcaaggataggcccaggaaaacgaagagatggagcagcctatgcagaatggagaggaagaccgccctttgggaggaggtgaaggccaccagcctgcaggaaatcgacggggacaggctcgccgacttgcccctaattttcgatgggccatacccaataggcagatcaatgatgggatgggtggagatggagatgatatggaaatattcatggaggagatgagagaaatcagaagaaaacttagggagctgcagttgaggaattgtctgcgtatccttatgggggagctctctaatcaccatgaccatcatgatgaattttgccttatgccttgactcctgccatttatcatgagattaatactgtgattcccgctgttttctttttccttgcattttcctaatatgcctttactgatccgtttgctgtgaaccctatgttatttccatgtgtccaagtgggtcttgtgtttgccagctttctatttgaagattggcctttgcactcaggggaaagtttcctggccagcaagtaggttcaacccatttgccatggaaaaaatttaaaggctaattaaagccattttaaaaagcgc

SEQ ID NO: 73018 - DNA, 1087 bp, Homo Sapiens
  misc_feature (808)..(976): n is a, c, g, or t
  misc_feature (984)..(1001): n is a, c, g, or t
aaacttaaggctaggtacgaggccgggtgtcgaattcggcacgagggtgacccagagctgcagagcgacgcagccttcggtgcagtcgtcactcgcgtctggctaccagctccccgctgccctgagctcggcgggctggcattcggcccggggaaaagcggagcaggtctgcgaggctaagtgtctccgcggcgcacctcgcggcgagaatccggaggagaaggagactgcaaggataggcccaggaaaacgaagagatggagcagcctatgcagaatggagaggaagaccgccctttgggaggaggtgaaggccaccagcctgcaggaaatcgacggggacaggctcgccgacttgcccctaattttcgatgggccatacccaataggcagatcaatgatgggatgggtggagatggagatgatatggaaatattcatggaggagatgagagaaatcagaagaaaacttagggagctgcagttgaggaattgtctgcgtatccttatgggggagctctctaatcaccatgaccatcatgatgaattttgccttatgccttgactcctgccatttatcatgagattaatactgtgattcccgctgttttctttttccttgcattttcctaatatgcctttactgatccgtttgctgtgaaccctatgttatttccatgtgtcaagtgggtcttgtgttgccagcttctatttgaagattgcctttgcactcagtgtaagtttctgtcagcagtagtttcacccatttgcatggaaaaatttaaagctaataaagcaatttaaaaagcnnnnnnnnnnnnnnnnnnnnnnnnnnnnnnnnnnnnnnnnnnnnnnnnnnnnnnnnnnnnnnnnnnnnnnnnnnnnnnnnnnnnnnnnnnnnnnnnnnnnnnnnnnnnnnnnnnnnnnnnnnnnnnnnnnnnnnnnnnnnnnnnnnnnnnnnnnnnnnnnnnnnnnnnngttggcgnnnnnnnnnnnnnnnnnnaaaaaaatttttttaaacacatttggtggggggccgggcgccccccaaaagcgaaaggaaaaaggggcactatggtgtttttcccc

SEQ ID NO: 73019 - DNA, 807 bp, Homo Sapiens
ggtccccttaatgaagaagggtgatatgccttttccccactcccaggaaagtgccaagctcacagacttttgaactagagtttagctggaaaagtatgttagtgcaaatggtcacaggacagcccttctttccacagaagctccaggtagagggtgtgtaagtagatagcccatgggcactgtgggtagacacacatgaagtccaagcatttagatgtataggttgatggtggtatgttttcaggctagatgtatgtacttcatgctgtctacactaagagagaatgagagacacactgaagaagcaccaatcatgaattagttttatatgcttctgttttataattttgtgaagcaaaattttttctctaggaaatatttattttaataatgtttcaaacatatataacaatgctgtattttaaaagaatgattatgaattacatttgtataaaataatttttatatttgaaatattgactttttatggcactagtatttctatgaaatattatgttaaaactgggacaggggagaacctagggtgatattaaccaggggccatgaatcaccttttggtctggagggaagccttggggctgatgcagttgttgcccacagctgtatgattcccagccagcacagcctcttagatgcagttctgaagaagatggtaccaccagtctgactgtttccatcaagggtacactgccttctcaactccaaactgactcttaagaagactgcattatatttattactgtaagaaaatatcacttgtcaataaaatccatacatttgtgtgaa

SEQ ID NO: 73020 - DNA, 955 bp, Homo Sapiens
atgaatgctaactcctttgccagtaaaattctgggaaacagggactgaggccacacatcatttccagtcatctgtgtgtttttaaggccagccacttgtccctgttgaggcctggctatggaactaaatacagtgttggtcttgcctgtccttcaaaatcaacaacagattgtctctcggctccagggaggtgtcatttctatagaaattagaagctttctgatttctagatgaggttttacaattgtttcttacagtcatgtgcactaagtactctttttgtaagcagaggtggctggctctgcagccttaaggccattttttaagtcaccacgtctagaagtcacatgaactctgctcagcaataatctgttctcagaacagacttttcaacctgctgccggatttctccattcagctggatgatcctcaggactgaccagttagctggcaggttgtccagctttttattccagtcataataggtgacagtgttaaccgtgaaaacttgagaggcactctgccctcttccctataaaatcacacagcgtgattttacaaggtcccgtggcaccttgctcaggacctctgcccctagttagcaagactgcagcagttgctgttgcttattctgaaaggaatgtagaacttgacagcagccttctgagtctgggtcaggaagatgtcctttggaccaaagcagacttctttatacgcagctcagtttcccgggagtcgccacagatgtacccactagcccaggttgctgtgagtcagcggaagctcccgttatgccctttgctcctggtgggagagggaggagtgagctccctgggttccagtatttacttggtatacctgagtttgggggtacccttttttgtgacttttcaaaacagtgaattactgtcaccttgatggacaagtttcaataaaactttgtaaaaataattgg

SEQ ID NO: 73021 - DNA, 1003 bp, Homo Sapiens
tttgttactgtgaccacggcagaacaatgtcttctagactatatctatgtaaagttattagaatggtatctgttcattttagtgatatgaagatcacaactaacaactgacaaatcagagtttgccagttcaaattcagcatggctgcagctgattaagaaattgatatgattattctttgctagcctctcttactaatggaattatatactggccagtaaaatgggcctcccaattgctgtttcagcaggttttaaaccttcaggaacaccagttaggaaaatagctccagaaaatatagatatattttatttttattaaaatggcagtctacatcataattggcatttctcaagactgtctttaccagaatctgtgtgaaataaggcaatctagtctccttgaaaagaaaatctcttggatgtttaggaaggaagacttggccgtgatgtggtgtcctggctttgtggtgtagtgctgtgtgtatggagttagtgtaaaaacatggattacaccaagtggaagaaacgtcttcttgccaagctcattcttagaacttacacatctagaacagcttccactttggcagtgaggtcgtagccttttaggtggaagaagtgagggtgcagcgtgtcagacacaacattcatgttactcttacattggaatctgaaggtagttcagacttcgtgggttttgtttttaagcaaaacaatgtgaaaacatttaagtttgaaatgttgcatttgaagttatgatcatttaatatattcatattaccaagactattatactggaagtggtttttgtgttataaaggtttaattttacataaggcagttacttaatgtgatttttaacccttaaaaaagtggagatgtatacatttgttaacaatgccatgaaagcattttctttctcctaaggaaaagtgaatttcttatcagaatatctggctggccctgtaatttaaattaaaataaaattttggagaaacagcaaa

SEQ ID NO: 73022 - DNA, 1583 bp, Homo Sapiens
  misc_feature (726)..(739): n is a, c, g, or t
agaggagcattcaaatgaggggacgtttccacccagaacaactgttaagccattagagcgaggttatagaagagctctgacaagacaaaagaacccaagaacaaccacaatgaaagaaactcaaaagtaacaggatgggcagcaaaaggtacagcaaagaatgaaaacagatgcatggttacaaacagcattaaatgcgtacaacttctgggtctggtgaataattaagggacaagaaagccattactgcacctgatctgcactgaaggtccttcctaagacagtttgagaaaggaagatagaaagtcagcatgggactatttggctggaggcagggggctttctacaggtgaaaaccttcctttgatagatagaaaccgtcccagggcaaataggaacagtttcaatccatctatcaaagtgacttccagtgcccacacaaacttaagtcttcaggccagtttgggggactcaaaggttctagcttagaaaaactggtggattgctgctagggcatcttttaaataactttgtgggggctctctactctgagccattacgctaaagcagaaagttaggagaaactgtcagttccaaaagttcatagtgtcctttggcactcctgcctaaaaagtcactgccaatatttttaggcaaagttaacattttaatacatataggcttggggaccatttgtttttggcatgaacatgaattggttctaannnnnnnnnnnnnnaaagaaaaaaagcacccttgtggccctgctctgggtgcagttttgagggggcaacagagctagcaggtgtactacaatcagctgaggttggggtgaagactggagtacctgagttaaaatatcaaagtagttatggaaacaacatgctggctctgagaaatccagcttgccaaagcaaaaggaggctggcaccattaggtaaactgtcctttcagacaggcagggcaatgctaatctagttctgaaggaatttcctggtaagtggaaacaggcaaagcatactttgttactcttttcagggcatcttatatgcacttggttgcacagaatgaggctaagagggaacagcatttgtgaccaatactacaaataatatggaaagattaaccaagctctctagataaactctaaatgttcaagttccaccaggatgatggaactggttatgcgatgcgggaaggcagctcagttcatttttcaaaaccatctatagaagtccactgagcataattaggttaggttaacaagtccgtttacattataggaagctggcaacatttcacacccaaaacttgggtcctgctaacctgacatttccttcactgctctttaggagaatcacctttggttgattctcttaggcagacagaataaagctttgaaattaagaatgctggggccaaaatgaagacagaagactccacatcatcactttggttgtaattaggggtgttaacaaaataaattaaggaaacacaaggacttatttatgactcttatagtctcaacttttcctaaagacaaccccagcccaagatcactgggtgaacgttttcttggggca

SEQ ID NO: 73023 - DNA, 616 bp, Homo Sapiens
attcattaaagttatatgtactctgttaactccctgctatgaaagatgaagaaaaagagtttcattacttatttttaggtcttttatttttaagttaagataatgaatcaagcagatgtgagatacttggatataaaacaagatttaaaaatgatgtctctactttgtgcctccccctcaaattaaaaaatattattgaaaccgcccacagtttcaaatctggtgggtgaagtgcatcataagtatgctgttcccacttggcagtgttgctatccctggtccaggtgagatgggaagcagaagggcctgaaccatatgatgcaaggtgattgttgcctggcatcagaacttgggcaactatgaggtttgctgctcttacaatgtacagtcattattaaatcctaagacagaataatcagtagtgaagctagactagcctgaaagatggcccctgaatcagactctgaggagtagaagttagctgtaataaaacactgcgaagaagccctgttaaccaccatgctacactctgctgttaatttatgctaggctttctgagaattatctaagttaatgctgagaaaataaaacagaattaaaaataacaacacccaaa

SEQ ID NO: 73024 - DNA, 460 bp, Homo Sapiens
gtaagggccgctcctcctttgaagaggttttgcgtctctttccgccggtggcgtcggcgctcacgcaggggcgggtcccggtagcgccaggcggtgcagggcgggaaggggattcgtggcgacggcggcggcagggacagcaggagcagtggtgctgtcagcgcggccgtcggagacatgggagacccggggtcggagataatagaatctgtccctccagctggccctgaggcatctgagtcaacaacggatgaaaatgaagacgacattcagtttgtcagtgaaggaccattacgacctgttcttgaatacattgatctgtcagcagtgatgatgaagagcctagcacctcttatactgatgggtcggcgctttgcctgatgaccctacctctctgacagatctgagaagagtttactcttcagcttttaagtgaataaagatgataaatgtcctaaaa

SEQ ID NO: 73025 - DNA, 820 bp, Homo Sapiens
ggggcggcagtagggacagcaggagcagtggtgctgtcagcgcggccgtcggagacatgggagacccggggtcggagataatagaatctgtccctccagctggccctgaggcatctgagtcaacaacggatgaaaatgaagacgacattcagtttgtcagtgaaggaccatcgagacctgttcttgaatacatcgatctggtctgtggtgatgatgaaaaccctagcgcctattatagtgatattctgtttcctaaaatgccaaaacgacagggtgattttttgcattttttaaatatgaagaaggtgaaaacagacacagaaaataatgaagtgagcaaaaatcactgcagattgtctaaggcaaaggaaccacatttcgagtatattgaacaaccaatcattgaagaaaagccatcactttcatcaaagaaagaaatagataatcttgtgcttccagattgttggaatgaaaaacaagcatttatgtttacagaacaatacaaatggcttgaaataaaagaaggtaaattaggatgtaaggattgttcagcagttcggcatttgggaatcgaaagcagaaaagcatgtccatgtgtccaaggaatggattgcatatttagtaacccctaatgggcagtaataaaactactaggcaagcttctctacgaaaaaaaattagggaacatgatggtttctaaagcccatggtaaaatttcaggatttggtaaaggaatcaactaatggattcaattttgtaatttagtgcataaacaaaataatataaaatattgatgcctacctgtaaaaggtttttcatt

SEQ ID NO: 73026 - DNA, 565 bp, Homo Sapiens
ttagacttccttccctcactatatatctttatgcagtcagaatatttccaacagtgttttttgcaaattagagcaggacaaacttttatgtttacagggcacgtctgttgtaatgcaaagcatatttggcaagcagttcatcaccaggacactagctatgattctagaagtcaaaaggtgtctatagaactagtggggcttctgcatgtgaaaaacggttttccataggcattaaagtgctgaatgctcagtctgatcaacaagtgggcacctgcactaccactttttagaggaaattcactccctcgtaagcattggaaggtcaaattattttgaagtgatttttttaaaaaaaagtcttctgtttattaacaggaaaatttatttatttgacaggattttgagtaatgtaggaatacaaaaggtaaattagcagcacatataattttttttaatttatgatccattttgtatggtctcaaagttggatgacctcattactaatatttgttgtaaaagtgaaacttgtttgccaaccaataaacaactgattgagatttagaag

SEQ ID NO: 73027 - DNA, 1006 bp, Homo Sapiens
  misc_feature (56)..(56): n is a, c, g, or t
  misc_feature (85)..(85): n is a, c, g, or t
  misc_feature (140)..(140): n is a, c, g, or t
  misc_feature (164)..(165): n is a, c, g, or t
  misc_feature (186)..(186): n is a, c, g, or t
  misc_feature (191)..(191): n is a, c, g, or t
  misc_feature (249)..(249): n is a, c, g, or t
  misc_feature (286)..(286): n is a, c, g, or t
attgccctcagccaagatcggcagaggctgatgtccaaagatgggattcatcatgncatcctgggatatgagtcttactgggacntgctggagctgcagcagctgaggatcgctagagaccgagaccgggattggctacntacactgtgtgtggctttcacgtnnacgtgagcagggcgtgaaacntgctngaaggctgggacaaagtggagcccagttgggcttggaacgctggcgtgtgtcgtggtngagagtccagaaacctgagatccagcccaggagcccntcggaccgggaaggcttgcctggaacgcggcagtggtggccgcggctgccggagcgcctgaaatggtgtagctctgggccgtgggtggcggtgggtaggaggtcgggctgaggccggccgctgtgctaggcgtctggccggacggctccgatgggaccgacatcaactccctgtgccgctcccacaacgagcgcgtggtggcggtggccgacgacttctgcaaagtgcatctcttccagtacccgtgcgctcgtgccaaggcgccgagccgcatgtacgggggccacggcagccacgtgaccagcgtccgattcacgcacgacgactcgcacctcgtctcgctgggcggcaaggacgccagcatcttccagtggcgagtgctgggcgctgggggcgcggggccggcgcccgccacgccctctcgaaccccctccctgtcccccgcctcctccctcgacgtttgatcgctgcctggcgggaccgactggcccggcggcgtggccccgccccgccctgcccttccctgccccaatcccccacgactaggggccgactctttcctggactgacttcgagacattcccgatcgcgcattttcctggagggcgcgaacggcgcccctgcacacactgtttagacccgctggctgagccgggcagccccagcctaggccttgactcccgctgcctgctgaggggcaataaaccagaaccaaagtcg

SEQ ID NO: 73028 - DNA, 2156 bp, Homo Sapiens
ggcctgggtggcgaattcggcacgaggatcgcctgtgtggtggtgctgtaccggcctggaggaggcccagggggtcctggaggtggcggccagagacattaccgggggcacacagactgcgttcgatgccttgctgttcaccctgatggtgttcgggtagcctcgggacagacagctggagtggataaggatggaaagcccctgcagcctgtggttcacatctgggactcagagacgctgttgaaactgcaggagattggactgggggccttcgagcggggtgttggggccctggccttttcagctgcggatcagggtgcctttctttgtgtggtggatgattccaatgagcacatgctgtcggtgtgggactgcagccggggaatgaagctggctgagatcaagagtacaaatgactcagtcctggccgttggcttcaaccctcgtgacagcagctgcatcgtcaccagtgggaaatctcacgtccacttctggaattggagtggtggagtaggggttcctgggaatgggacccttacccggaaacagggtgtctttgggaaatacaagaaacccaagtttatcccttgctttgtgttccttccggatggagacattctcactggagactcagaggggaacattctcacctgggggcggagcccttcagattccaagaccccaggcaggggtggcgccaaagagacctatgggattgtggcccaggctcacgctcatgaaggttctatcttcgccttgtgtctccggagggacgggacagtgctgagtggtggcgggcgggaccgccggctggtacagtgggggccccgggttggtggccctccaggaggctgagattcccgagcacttcggggccgtgcgagccattgctgaagggcttggctctgagctgctggtgggaaccacgaagaatgcattgctgaggggagacctggcccagggcttctcccctgtaatccagggccacactgatgagctctgggggctctgcacacacccctcccagaaccgcttcctcacctgcggccacgaccggcagctctgcctgtgggatggggagagccatgcactggcctggagcatcgacctcaaggagactggtctctgtgctgacttccacccgagtggggcagttgtggccgtaggactgaacacggggaggtggttggttttggacacagagaccagagagatcgtgtctgatgtcattgatggcaatgagcagctctcagtggtccggtacagcccagatgggttgtacctggccattggttcccatgacaacgtgatctacatctatagtgtttccagtgatggtgccaaaatccagccgcttggcccgctgtatgggtcactccaggcttcatcacttcatcttgactgggtccaaggatgggaatttcatcatgtccaattctggggactatgagattctttactgggacgcggctggaggctgcaagcacctgaagaatcgctatgagagccgagaccgggaatgggctacctacacctgtgtgctgggctttcacgtctacggcgtctggccggacggctccgatgggaccgacatcaactccctgtgccgctcccacaacgagcgcgtggtggcggtggccgacgacttctgcaaagtgcatctcttccagtacccgtgcgctcgtgccaaggcgccgagccgcatgtacgggggccacggcagccacgtgaccagcgtccgattcacgcacgacgactcgcacctcgtctcgctgggcggcaaggacgccagcatcttccagtggcgagtgctgggcgctgggggcgcggggccggcgcccgccacgccctctcgaaccccctccctgtcccccgcctcctccctcgacgtttgatcgctgcctggcgggaccgactggcccggcggcgtggccccgccccgccctgcccttccctggcccaatcccccacgactaggggccgactctttcctggactgacttcgagacattcccgatcgcgcattttcctggagggcgcgaacggcgcccctgcacacactgtttagacccgctggctgagccgggcagccccagcctaggccttgactcccgctgcctgctgaggggcaataaaccagaaccaaagtcaaaaaa

SEQ ID NO: 73029 - DNA, 1027 bp, Homo Sapiens
  misc_feature (321)..(436): n is a, c, g, or t
gacatgccgctcagcggccatggacgcttgcagtgaccagaagtggacaccgactcggtgaccgcgttctaccgcgagacggtgcaggtggagcactcccacatgctgctggcgccgcggcccgtcgcggtcgcggtggctgtcagaccgcccctcgagccggccgatgagtccctcgacgacctagaggaggcgccggagcagctgcctagtgtcccggtcccggccacggcgtccactccgcccccagtcccggtcctggctccagccccggccccggctccggctccggtcgcggctccggtcgcggtcgcggtcctnnnnnnnnnnnnnnnnnnnnnnnnnnnnnnnnnnnnnnnnnnnnnnnnnnnnnnnnnnnnnnnnnnnnnnnnnnnnnnnnnnnnnnnnnnnnnnnnnnnnnnnnnnnnnnnnnnnnacgcggcgcctcaagagagcgccgagcagggcgcgaaccaggggcagcgcggccaggagcctctcgctgaccagctgcactcggggatttcgggacgtcccgcggccggcaccgcggccgccagcgccaacggcgcggcgatcaagaagctgtccgggcctctgatctccgatttcttcgccaagcgcaagagatcagcgcctgagaagtcgtcgggcgatgtccccgcgccgtgtccctctccaagcgccgcccctggcgtgggctcggtggagcagaccccgcgcaagaggctgcggtgagccaatttagagcccaaagagccccgagggaacctgccggggcagcggacgttggaagggcgctgggcctcggctgggaccgttcatgtagcagcaaccggcggcggctgccgcagagcagcgttcggttttgtttttaaattttgaaaactgtgcaatgtattaataacgtctttttatatctaaatgtattctgcacgagaaggtacactggtcccaaggtgtaaagctttaagagtcatttatataaaatgtttaatctctgctgaaactcagtgcaaaaaaaaga

SEQ ID NO: 73030 - DNA, 1079 bp, Homo Sapiens
  misc_feature (20)..(20): n is a, c, g, or t
  misc_feature (801)..(801): n is a, c, g, or t
  misc_feature (803)..(803): n is a, c, g, or t
  misc_feature (805)..(838): n is a, c, g, or t
agctccatgctgctgtgccntgagttcccaggatgccttctcgcctctcactccgcagcacttgggcggtagccagtggccatgtgctcccaaccccaatgcgcagggcagtctgtgttcgtgggcacttcggctggaccccatcacgatggacgatgttccctttggactctagggcttcgaaggtgtgcaccttggttctcccttctcctccccagagttccccggatgccataactggctggcgtcccagaacacagttgttcacccccccaccagctggctggccgtctgcctgagcccatggatgctttctcaatcctaggctggttactgtgtaagcgttttggagtacggggccttgagcgggtgggagctgtgtgttgaagtacagagggaggttggggtgggtcagagccgagttaagagattttctttgttgctggaccccttcttgaaggtagacgtcccccacccggagagacgtcgcgctgtggcctgaagtggcgcaagcttgctttgtaaatatctgtggtcccgatgtagtgcccagaacgtttgtgcgaggcagctctgcgcccgggttccagcccgagcctcgccgggtcgcgtcttcggagtgcttgtgacagtccttgcccagtatctagtccccgtcgccccgtgcaggagacgtaggtaggacgtcgtgtcagctgtgcactgacggccagtctccgagctgtgcgtttgtatcgccactgtatttgtgtactttaacaatcgtgtaaataataaattcataatgacttctaaaaaaananannnnnnnnnnnnnnnnnnnnnnnnnnnnnnnnnnaaaaagggcggcccgctctagagtatcccctcgaggggcccaagcttacccgtacccagctttcttgtaccaagtggtcccctatagtgaagtcggattataagcctagcactggccgtcgttttacaaccgtctggactgggaaaactggtaaccttgggatactttttgaaggaaccttactttctggggggggacataattgggacaaactacctaccggaaatttaagctcctaggg

SEQ ID NO: 73031 - DNA, 1328 bp, Homo Sapiens
  misc_feature (194)..(194): n is a, c, g, or t
  misc_feature (212)..(212): n is a, c, g, or t
  misc_feature (215)..(215): n is a, c, g, or t
  misc_feature (295)..(295): n is a, c, g, or t
aatattgatgtcatcatagcccccgctacattatctccgtctatgtgttgatgtgacgatacattcacacggaacgcttgactgatacgattatacgactcctataggaattgccctcgagccagatcggggacgagactggaacagatgcgtagagccagtggataaggtaaagcactcagtgctacaggctngtaatggagaacaaagtntantactgatagttggctgcactgtggaaaagcctgctggagtctccctgccgtggctctcattgccaatatggaacagagcncagggccaggcagactggggcagtgactggaaaaggaaaactaaaggtcagaatccgggatcaggaactgtttttatccagcagtgaagctcttgagctcttaggaaggttcccgtggttggaaagaacataatggttaacaaatatcacagcatccagggattgcccagctatagtgtgggtgccctactgaactctgattagggaacctgtataagggtattgagtgtgaggttgaggtgggacatttgctgagcaaggagaaccgatgtgaatggcaggcagataacatgcacacatgaagctggctgggtgtaaggcagtagcggggagcagcatgctgtctaacagctgttagctccagctggttgttgccatgtgggaatggattttctcatttcttcagagaagctggaaacctagatatttatgtgaaacctcccagtgtattgccaactaaatcaaatttttaaagatgcttaggcacctaagcaaataatacttagaggttgaatttggtctacaggctagcagtttgcagtctatgtttaatgaatggtatagaagtttggggaaaggtgccatcttgaaaattctggatcagtggttggcattttcgctgcgtgtagtatgtatcctttctaggcttggagatggctttggttggtccgtgaatgtagttatgagagtgctgccattaaaaaatcaaaaatctctgttgtggaagcgtatcttctgttcttaggtctcaggaaggagagggctatactgaacaccattagggatagatggaaatgaccttggcctccctgctcagctggtccatctagtttccaccttgtttcttgcaaacaaatacacctcacactactttttctttctgacagagttggagtgacagcacagttaggggggtacaccccgggacagtctttatatgttccctctgtatagatgatgccactttctagccctttccctgtctccatggtacccattactgtgcataataaatttaactttgaaagcacag

SEQ ID NO: 73032 - DNA, 669 bp, Homo Sapiens
gtggtccagcacgttgtgcgttcagtggaagcaaaggcttgcccgggattacctgccccagccccgaggtgggttgtgctccctgcagctgccatcggcccgctttgcttcgtcctggcagatgcccagtgattgtccccgagcaagtgccagggttgggctgagctgctatgacagggaggcccagggagttctgctcagggagccaaagggaacagccagatcctgaatgttctatgttcacctgccccagccccacccaccctggcccactccacaggcccctgaccatggtcactcacggagagggatggaggagaaggtggttgaactgagtactgagaacccagaggacagagcccacagcttccaagcaggaaaagggacctctctgaaaaatctggataaccagaattatcacagcaccttctcattcccagcgcgtccttctgagctcagaccttgagcatttactgggtttctttttgaggaagagggaaagtgacaaaggacaaaacaatgcaaatcttcatgactgaagacgatcaaagactccctggagcgagaaaacagttactgccagaagcagaatggaagagccaaaaagtacacaaaatggacgccataaattctgaaataaaagtgtatgaatgggtctgagtcactgta

SEQ ID NO: 73033 - DNA, 1229 bp, Homo Sapiens
  misc_feature (502)..(531): n is a, c, g, or t
ccagacaggctggtggtaattcggcacgaggcagcagtggcagtcagagtgccaaagatgcacggggatgtggtgtgtggctccgggccctcgacatctctgctttgggggatttttaccttgtctgcacacttgtcaggggagaggggacagcaaggtgggaggttgaagagctttgaggctcagcagcatgttcgtggcattcggtggacaccatggccttgggcggctggacaggtttttgtgatgtgaaggacacgcatggggcacatggtaagcttggcaagggctccaggaacgctgacgaagggttttaggacccccacccccatgcctgtaccagggctggcctccagagcgggtgaggacagagcagctgtgggcttttcattctgaggtcttggcccccctggccaccgcaagggactctttgcttgtcagggcttgcaaaaaccaaccttcgagaaagaaaagggaactcttcacgttgaatgttgacttnnnnnnnnnnnnnnnnnnnnnnnnnnnnnncacgcgcgtgtgcgtgttgacttcatggaattttgttttgtgaaattcccctccaatcgtgtcagaatttacctccatgccccagtcacactgttggttctgcgctctgaacctgggtgtagctcatttgaaggactctcttctgcgtttcctaacagttatttggtggtctcaagagttgaggttgtggagggttgggagaaactgaagttctatacatttccatagagtttacatcctgcagttaaaaggcagggagggctcagcccgggccccacagctccaggccatcccctacgggctgcccacagtgcccccttttctctagccgaatctttttcgaacagcccgggaaaggaaaacggattcacttgctgattttgttcacggcggaagcaccatgttccgttcctttttcaggttcagtttgttgtgtaaatggcggttttttctggtgtgagctttggtgatggtggcagggctcctttgaagagatggttccacctcgtggtctgaagaacaaaccagagaagagtctggtttggccagaggccccctccggtccacgtcaccctgagtacacccctctgattgctctgctgtcaagaagcacgtttccaccagctgtattcaacactacaatgcattttttaaactatatttgcatccaagacaataaagacaccttattttttttg

SEQ ID NO: 73034 - DNA, 1367 bp, Homo Sapiens
  misc_feature (1246)..(1292): n is a, c, g, or t
tgactctgggctgatgaggatgtacgttgtggattcttagagggcatggcacccccagtccctgcccagatatgagtgcacagtggctatgcagcacctctgtctgttgctgacgttgggcgggcttacacgcccacctcatctccgtgcgcagtcatgactggccgtgcgcggcacatggggtgcaggtaagggtctctctcatagaggggagctgcagctgagaactggcgaggccccttcctccaaggccctagctggacccccgggtgaacctgaggtggcaggttcaggttttcaagatggtgaggtctcgctgtctgctggacagtacgttagagctctcagaactcatgggtgtggagctgggcctgtcccgggccagtggacccctgtgtgtgggggatttggggtgctgtgggcctggttaatgcactggcagatggaccttgctttggtccagctcttttccttaccctggctctgacgtgggaaggcttggagggcccgtctcatcacccccgttcgccctcagcttgtccctttcccttgtcgcctggccgctgcctcgacctgactgaggcctcctagcaggcagcctgggtgtgagatgagactctctctttcccctctggtgggaaagtggcctttccctcaacacctgctccccggccccagaggaacccacctattttggagctcagcttggcccagcgtttccttggggaagggaaaggagggctggacagcactgatccgggcaggcagcgtgtgcagcagtggccagccagagtgccaaagatgcacggggatgtggtgtgtggctccgggccctcgacatctctgctttgggggatttttaccttgtctgcacacttgtcaggggagaggggacagcaaggtgggaggttgaagagctttgaggctcagcagcatgtttgtggcattcggtggacaccatggccttgggcggctggacaggtttttgtgatgtgaaggacatgcatggggcacatggtaagcttggcaagggctccaggaacgctgacgaagggttttaggacccccacccccatgcctgtaccagggctggcctccagagcgggtgaggacagagcagctgtgggcttttcattctgaggtcttggcccccctggccaccgcaagggactctttgcttgtcagggcttgcaaaaaccaaccttcgagaaagaaaagggaactcttcacgttgaatgttgacttnnnnnnnnnnnnnnnnnnnnnnnnnnnnnnnnnnnnnnnnnnnnnnnttacttcatggaattttgttttgtgaaattcccctccaatcgtgtcagaatttacctccatgccccagtcacact

SEQ ID NO: 73035 - DNA, 1088 bp, Homo Sapiens
  misc_feature (794)..(929): n is a, c, g, or t
  misc_feature (978)..(1022): n is a, c, g, or t
cagtcgacggtaccggacatatgcccgggaattcggccattacggccgggggaaacatccagaatacatttccaacaagagcactggccaagtcagcttcttctgagagagtctctagaagacatgatgctacactcagctttgggtctctgcctcttactcgtcacagtttcttccaaccttgccattgcaataaaaaaggaaaagaggcctcctcagacactctcaagaggatggggagatgacatcacttgggtacaaacttatgaagaaggtctcttttatgctcaaaaaagtaagaagccattaatggttattcatcacctggaggattgtcaatactctcaagcactaaagaaagtatttgcccaaaatgaagaaatacaagaaatggctcagaataagttcatcatgctaaaccttatgcatgaaaccactgataagaatttatcacctgatgggcaatatgtgcctagaatcatgtttgtagacccttctttaacagttagagctgacatagctggaagatactctaacagattgtacacatatgagcctcgggatttacccctattgatagaaaacatgaagaaagcattaagacttattcagtcagagctataagagatgatagaaaaaagccttcacttcaaagaagtcaaatttcatgaagaaaacctctggcacattgacaaatactaaatgtgcaagtatatagattttgtaatattactatttagtttttttaatgtgtttgcaatagtcttattaaaataaatgttttttaaatctgnnnnnnnnnnnnnnnnnnnnnnnnnnnnnnnnnnnnnnnnnnnnnnnnnnnnnnnnnnnnnnnnnnnnnnnnnnnnnnnnnnnnnnnnnnnnnnnnnnnnnnnnnnnnnnnnnnnnnnnnnnnnnnnnnnnnnnnnttttgtgggggccccccgggcccctcaaaaattttttataaaacccttnnnnnnnnnnnnnnnnnnnnnnnnnnnnnnnnnnnnnnnnnnnnntctatttgtgttcttcctaaagaaaaccccggggcaagaaaaaagggggtggggaaccccccccac

SEQ ID NO: 73036 - DNA, 870 bp, Homo Sapiens
ctggaaggcctccaggtggaggaagagccagtgtacaaagcagagcctgagcctgagcccgagcctgagcccgagcctaagaatgactatgaggacgttgaggagatggacaggcatgagcaggaggatgaaccagagggggactatgaggaggtgctcgagcctgaagattcttctttttcttctgctctggctggatcatcaggctgcccggctggggctggggctggggctgtggctctggggatctcagctgtggctctatatgattaccaaggagagggaagtgatgagctttcctttgatccggacgacgtaatcactgacattgagatggtggacgagggctggtggcggggacgttgccatggccactttggactcttccctgcaaattatgtcaagcttctggagtgactagagctcactgtctactgcaactgtgatttcccatgtccaaagtggctctgcctccaccccctccctattcctgctgcaaatgtctaaccagatgaggttctggacagacttccctctcctgcttcattaagggcttggggcagagacagcatggggaaggaggtccccttccccaagagtcctctctatcctggatgagctcatgaacatttctcttgtgttcctgactccttcccaatgaacacctctctgccaccccaagctctgctctcctcctctgtgagctctgggcttcccagtttgtttacccgggaaagtacgtctagattgtgtggtttgcctcattgtgctatttgcccactttccttccctgaagaaatatctgtgaaccttctttctgttcagtcctaaaattcgaaataaagtgagactatggttcacctgtaaaaa

SEQ ID NO: 73037 - DNA, 608 bp, Homo Sapiens
atgcatcagcaacccccacacccccctccagatcagccatggatgccaccaacaccaggcccaatggacattgttcctccttctgaagacagcaacagtcaggacagtggggaatttgcccctgacaacaggcatatatttaaccagaacaatcacaactttggtggaccacccgataattttgcagtggggccagtgaaccagtttgactatcaggtgaaagatattttgttgctttaatattgtagatgtgcacgtaatccattctttggaagtgtctcatcaagaatacctaagatacgtgtttcacttttcagacttgtataaataagcacattctgtctcagttatcaatttttgagtattaaaataattagaatttgttttctgatttttttatttcattaggaaaatggtataaaagatcattacggaaaacttttgaaaaaattaaaaatgtataagtgcaatagctatatgatgttttattttctaatttatatttcaaaatggtatatttaaatgttaaagactagagaatgcacagtaattgaatatagctcatggttaagacatgaataaaaaatatagatcattttcctaagtgt

SEQ ID NO: 73038 - DNA, 1605 bp, Homo Sapiens
  misc_feature (593)..(606): n is a, c, g, or t
  misc_feature (1298)..(1325): n is a, c, g, or t
tttcaattttttaaataacattatagagccagcctatttcaagtgacaaatacatatttatgccactttatatctggaaagttctaaattgttcagtatttaatggacaggagcatttgttaataaatctttactttttacattttaggaagattctaactttactccttttttaacttactagcaaatcacttaattttttcgagtctcagtttcctcacctgtggaaaaaagtggagtaatagtagtgatctctgagggcttttgtaaggattaaattagatgatggtttaacatgctttcattgtgtcctggcagattgtaagcactagagcagtggtccctgctgttactaaaagtgatggcattgaagaaaggcatgatatttaatgggatattttttaaatttactcacaagtttgtagaaatattttacttaactgacttgcgtatatttttcccacgtgaaacagacgcagtaaaacgcaggactcttcccgcttggattcgcgaaggtcttgaaaaaatggaacgtgaaaagcagaagaaattggagaaagaaagaatggaacaacaacgttcacaattgtccnnnnnnnnnnnnnnggccacagaagatgctgaaggaggggatggccctcgtttacctcagagaagtaaatttgatagtgatgaggaacaagaagacactgaaaatgttgaggctgcaagtagtgggaaagtcaccagaagtccatccccagttcctcaagaagagcacagtgaccctgagatgactgaagaggagaaagagtatcaaatgatgttgctgacaaaaatgcttctaacagaaattctgctggatgtcacagatgaagaaatttattacgtagccaaagatgcacaccgcaaagcaacgaaagatgtgatacaaagctcctgcaaaacagctggcacagtccagtgcactggcttccctcactggactcggtggactgggtggttatggatcaggagacagtgaagatgagaggagtgacagaggatctgagtcatctgacactgatgatgaagaattacggcatcgaatccggcaaaaacaggaagctttttggagaaaagaaaaagaacagcagctattacatgataaacagatggaagaagaaaagcagcaaacagaaagggttacaaaagagatgaatgaatttatccataaagagcaaaatagtttatcactactagaagcaagagaagcagacggtgatgtggttaatgaaaagaagagaactccaaatgaaaccacatcagttttagaaccnnnnnnnnnnnnnnnnnnnnnnnnnnnncaagcaaggagtaggtcgggaagttctagtagtggtagttccagtagcaatagcagaactagtagtactagtagtactgtctctagctcttcatacagttctagctcaggtagtagtcgtacttcttctcggtcttcttctcctaaaaggaaaaagagacacagtaggagtagatctccaacaatcaaagctagacgtagcaggagtagaagctattctcgcagaattaaaatagagagcaatagggctagggtaaagattagagatagaacgagatcta

SEQ ID NO: 73039 - DNA, 624 bp, Homo Sapiens
tctagttaaagagaaattagtatctatttgatgtcttagtgttggtaggattagcttgtaaatggattcagaatgaaaaatttcatatacttcttgaaagtagcttatcagctggcttttagaagccctctttgcatttacatagccggaaaatcttaagacaagtaagcctaggttcttgggaccatagaagtatcggtggatattagagccatggaattcttggatgtgctgcacacatggatttctactgtcccagttcataacacacgtgtgtcccagagagtatattgtattaatttgaagaaaaaataaactgcaatactctttcagcatggggctgcttttggtccaccgcaaggtggatttcatcctccttattggcaaccaggacctccaggacctccagcacctccccagaatcgaagagaaaggccatcatcattcagggatcgtcagcgttcacctattgcacttcctgtgaagcaggagcctccacaaattgacgcagtaaaacgcaggactcttcccgcttggattcgcgaaggtcttgaaaaaatggaacgtgaaaagcagaaaaaatcgcagaaagaaagaatggaacaacaacgttcacaattgtcc

SEQ ID NO: 73040 - DNA, 984 bp, Homo Sapiens
ggggaagaagtagaagcatcgaaagcgttggagaggtgttaccggaacggcggcgacaagggtgttcccgaactagagtggggcatacataatcttgctgctatgcttcgaagctgtagtctgaatcaacctaagttttaaacagaaggtgaacctctgagatagaaaatcaagtatattttaaaagaagggatgtgggatcaaggaggacagccttggcagcagtggcccttgaaccagcaacaatggatgcagtcattccagcaccaacaggatccaagccagattgattgggctgcattggcccaagcttggattgcccaaagagaagcttcaggacagcaaagcatggtagaacaaccaccaggaatgatgccaaatggacaagatatgtctacaatggaatctggtccaaacaatcatgggaatttccaaggggattcaaacttcaacagaatgtggcaaccagaatggggaatgcatcagcaacccccacacccccctccagatcagccatggatgccaccaacaccaggcccaatggacattgttcctccttctgaagacagcaacagtcaggacagtggggaatttgcccctgacaacaggcatatatttaaccagaacaatcacaactttggtggaccacccgataattttgcagtggggccagtgaaccagtttgactatcagcatggggctgcttttggtccaccgcaaggtggatttcatcctccttattggcaaccaggacctccaggacctccagcacctccccagaatcgaagagaaaggccatcatcattcagggatcgtcagcgttcacctattgcacttcctgtgaagcaggagcctccacaaattgacgcagtaaaacgcaggactcttcccgcttggattcgcgaaggtcttgaaaaaatggaacgtgaaaagcagaagaaattggagaaagaaagaatggaacaacaacgttcacaattgtcc

SEQ ID NO: 73041 - DNA, 677 bp, Homo Sapiens
  misc_feature (72)..(72): n is a, c, g, or t
cagccccactggttttactgcaaggaggtagaacaccaacactgtgcatgcctttaagtgtgttcgactctntgaatcttgaagaaatctataattcagttcagccagatccggagagcgtggttcttggcacggatggagggcgctacgatgtttacctctatgaccgaataaggaaggctgcctactgggaagaggagccagccgaagtgagacgctgtacttggttttacaagggggacacagatagtcgatttattccctatactgaggagttcagtgaaaaactagaggtacgggtgctttatttctttatgagtttctttaaaaaatgtaggtcctatatacattggtgagtaacatcattcacagtggagcggactttacttacaagacagcttgttttgatgctgttcacagagaagattactttttaagtggtgtcatcactcatgaggtgctaatcgtggcatctgtgtctaaagatagaatatgatttgcagagacacatcacagatctaataaggtgcttgtgtcaagccttcaatagaacctaggccgctgggatttgttgttgatagaagatgccaagcatatggacattttcaaattagtattcagtaaaaggcttgaaattaacctctgatttgtgaaaataaataaatagaattggaaga

SEQ ID NO: 73042 - DNA, 716 bp, Homo Sapiens
actcagttttcttgcagatcaaatttcacgtcgtcttctgtatactgtggaggtacactcttatagaaagttcaaaaagtctacgctctcctttctttctaactccagtgaagtaatggggtcctgctcaagttgaaagagtcctatttgcactgtagcctcgccgtctgtgaattggaccatcctatttaactggcttcagcctccccaccttcttcagccacctctctttttcagttggctgacttccacacctagcatctcatgagtgccaagcaaaaggagagaagagagaaatagcctgcgctgttttttagtttgggggttttgctgtttccttttatgagacccattcctatttcttatagtcaatgtttcttttatcacgatattattagtaagaaaacatcactgaaatgctagctgcaagtgacatctctttgatgtcatatggaagagttaaaacaggtggagaaattccttgattcacaatgaaatgctctcctttcccctgcccccagaccttttatccacttacctagattctacatattctttaaatttcatctcaggcctccctcaaccccaccacttcttttataactagtcctttactaatccaacccatgatgagctcctcttcctggcttcttactgaaaggttaccctgtaacatgcaattttgcatttgaataaagcctgctttttaagtgtta

SEQ ID NO: 73043 - DNA, 889 bp, Homo Sapiens
  misc_feature (707)..(707): n is a, c, g, or t
  misc_feature (741)..(741): n is a, c, g, or t
  misc_feature (781)..(781): n is a, c, g, or t
ggagccggcgagagagtggcagcgggggctgatggaagtgcagtgggggctggagagggcaccctactgtatccagcatgctccaaggccacagctctgtgttccaggccttgctggggaccttcttcacctgggggatgacagcagctggggcagctctcgtgttcgtattctctagtggacagaggcggatcttagatggaagtcttggctttgctgcaggggtcatgttggcagcttcctattggtctcttctggccccagcagttgagatggccacgtcctctgggggcttcggtgcctttgccttcttccctgtggctgttggcttcacccttggagcggcttttgtctacttggctgacctcctgatgcctcacttgggtgcagcagaagacccccagacggccctggcactgaacttcggctctacgttgatgaagaagaagtctgatcctgagggtcccgcgctgctcttccctgagagtgaactttccatccggataggtagagctgggcttctttcagacaagagtgagaatggtgaggcatatcagagaacagaaggcggcagccactggccttccagagggtcctgctgtccctgtgccttctcgagggaatctggcacagcccggcggcagcagcttggaggaggatcgcactgctcatcttcgccatcactatacacaacgttccaaagggtnctcgctgttgggagttgggatttgggggctatangaaacagacgggcatcctggctacctttgagagtgccagngaatttggcccattgggaatcggggatccagaaatttccccgagggcctggctgtcagccttccccttgcgaggggcaggctcatccactggagagctttctgggatg

SEQ ID NO: 73044 - DNA, 1219 bp, Homo Sapiens
  misc_feature (1063)..(1063): n is a, c, g, or t
cttttgtctacttggctgacctcctgatgcctcacttgggtgcagcagaagacccccagacggccccggcactgaacttcggctctacgttgatgaagaagaagtctgatcctgagggtcccgcgctgctcttccctgagagtgaactttccatccggatagacaagagtgagaatggtgaggcatatcagagaaagaaggcggcagctactggccttccagagggtcctgctgtccctgtgccttctcgagggaatctggcacagcccggcggcagcagctggaggaggatcgcactgctcatcttggccatcactatacacaacgttccagagggtctcgctgttggagttggatttggggctatagaaaagacggcatctgctacctttgagagtgccaggaatttggccattggaatcgggatccagaatttccccgagggcctggctgtcagccttcccttgcgaggggcaggcttctccacctggagagctttctggtatgggcagctgagcggcatggtggagcccctggccggggtctttggtgcctttgccgtggtgctggttgagcccatcctgccctacgctctggcctttgctgccggtgccatggtctacgtggtcatggacgacatcatccccgaagcccagatcagtggtaatgggaaactggcatcctgggcctccatcctgggatttgtagtgatgatgtcactggacgttggcctgggctagggctgagacgcttcggaccccgggaaaggccatacgaagaaacagcagtggttggcttcgagtgggacaacaagcttctttcttcacattaaaacttttttccttcctctcttcttcatctcattatcctgattgactctgattataatagaaccatttttactttgctttgagggagattgatttaatggggaattttaaggtgtcatggaaatacagattctttgttttggccactgaatggactctctcttcagtgggattatcaaggaacttcagatcagggaaatctccacttcgggaccttctatctgcctcccaanctcctcaaggtcacctatagaagcgagctaccaaaagacgtctcctaagcattttgggtggcctagtgactcagggcagagtgggcagcacaccttctcaatccggccctcctggctccatcactggctgaagcctctcccccattctagaatgtt

SEQ ID NO: 73045 - DNA, 1076 bp, Homo Sapiens
  misc_feature (37)..(37): n is a, c, g, or t
  misc_feature (109)..(109): n is a, c, g, or t
  misc_feature (120)..(120): n is a, c, g, or t
  misc_feature (757)..(791): n is a, c, g, or t
ccaggacagcttgacggatacgaattatcgctccctntaggaattgccctcgagccagaaatcgcacgaggcaggtgtgcatgctcaccatcatatccccaaacactgnaaagtgcgttnatcaccagactgtgagttctgcaaagtagctggggaagctgaataaactctagccccagggctactaaagacttcaggatagaattctccatcaatatacagcataagtaaaactgctctgcactgtttaatccatttccaaggggcttagaaaagctaacaagggtgtgtcccctgtcctgccccaccggtttgctggctttgtaataacataagaccattgtggttgttggtgtcagataccttcccatcctgagctctctcacctacctgctctctctcctagagcaggatactggggtacttttaagaagggtgctccttttaagatgcccagaaaagctgtatttaactcttgctatttgtaacttggggatggtctcccctgccccagggcacataagagcaaaggctccaatggtcagtggatgactctgcaaaagtgaccccctgtgccagaagctatagccctctccccaacaggtctctcttgttggccagagggcctgcttcccatgggcattgcaagtgccaccgtgcggggcctggctctgcacacccaggaaaagtctgcagacccccagccctccgcaataattcaccagaccagaagccactggtgtacagagaacacttnnnnnnnnnnnnnnnnnnnnnnnnnnnnnnnnnnntctgtatactgtatcagcagctttgtgtaaaaatggcaatcaagagagtctaatatatttaaaacttttttaaaaaaaatcttcgcagatctttgatatcgtactgaggtaacttccacgtagccccttgccacgcggcaccggtgggccttgggtccaaaactgtggctcagccacatcccaaagggggcacatgtccctggagttgcttccagctgccaaggcctgtgacagaattcgctgttaagagtttttaattaaaattattaaattccttttaataac

SEQ ID NO: 73046 - DNA, 3216 bp, Homo Sapiens
  misc_feature (354)..(376): n is a, c, g, or t
gggggggtgaaaggttgcgaagatggcgacggccttgagcgaggaggagctggacaatgaagactattactcgttgctgaacgtgcgcagggaggcctcttctgaagagctgaaagctgcctaccggaggctctgtatgctctaccatccagacaagcacagagacccagagctcaagtcacaggcggaacgactgtttaaccttgttcaccaggcttatgaagtgcttagtgacccccaaaccagggccatctatgatatatatgggaagagaggactggaaatggaaggatgggaggttgtggaaaggaggagaacccctgctgaaattcgagaggagtttgagcggctgcnnnnnnnnnnnnnnnnnnnnnnnttgcagcagcgaaccaatcccaagggaacgatcagcgttggagtagatgccaccgacctttttgatcgctatgatgaggagtatgaagatgtgtccggcagtagctttccgcagattgaaattaataaaatgcacatatcccagtccattgaggcacccttgacagcgacagacacagccatcctctctggaagcctctcaacccagaatggaaatggaggaggttccattaactttgcgctcagacgagtaacttcggcaaagggatggggagagttggaatttggagctggagacctacaggggcctttgttcggtctcaagctgttccgtaatctcacaccaagatgctttgtgacaacaaactgtgctctgcagttttcatcccgtggaatccgacccggcctgaccactgtcctagctcggaacctagacaagaacaccgtgggctacctgcagtggcgatggggtatccagtcagccatgaacactagcatcgtccgagacactaaaaccagccacttcactgtggccctgcagctgggaatccctcactcctttgcactgatcagctatcagcacaaattccaagatgacgatcagactcgtgtgaaaggatccctcaaagcaggcttctttgggacggtggtggagtacggagctgagaggaagatctccaggcacagcgttttgggtgcagctgtcagcgttggagttccacagggcgtttctctcaaagtcaagctcaacagggccagtcagacatacttcttccctattcacttgacggaccagcttctgcccagcgccatgttctatgccaccgtggggcctctagtggtctactttgccatgcaccgtctgatcatcaaaccatacctcagggctcagaaagagaaggaattggagaagcagagggaaagcgccgccaccgatgtgctgcagaagaagcaagaggcggagtccgctgtccggctgatgcaggaatctgtccgaagaataaattgaggcagaagagtccagaatgggcctcatcatcgtcaatgcctggtacgggaagtttgtcaatgacaagagcaggaagagcgagaaggtgaaggtgattgacgtgactgtgcccctgcagtgcctggtgaaggactcgaagctcatcctcacggaggcctccaaggctgggctgcctggcttttatgacccgtgtgtgggggaagagaagaacctgaaagtgctctatcagttccggggcgtcctgcatcaggtgatggtgctggacagtgaggccctccggataccaaagcagtcccacaggatcgatacagatggataaactgccaagaaccagatttttaaaaggccgcaaaaaatcttttcctgggagtctacaaatttggaaatgaaaaaacccagacatcagatgtttttattttatattattattatagaaggtggtaccattatcaattatgtgaagggacatgcagacaccccagcttttgagggtgctgggggtaggactgaggcagccccactgggaaccagactgcagcctggcccatggctgttttcccaaggatcagttcctggagggaagggctctggccctgactccgctgtgtcccgagcacacgtgctgaccgcagcccgccgccctgtagttcttggctgggtctggaggtgtctgtggagcaccctgccctcaccacaggagcgtgagccacttctgcagtccacgctgaacatgggaaacaacctgaaaagcaggcaggcctcccggtcagggagcctctgctgtgctggcttcccatgaccacctcctcctgctgaaatattactgcttgaatctggagcagattgcgggtttataaaactgctttttatctgagaacaaacgggtttggaaattagtcgtcttttttccccactcccagagctgctcaaatcattccaccggccccctcggcttgggacagggtagtgtaactcccgatcccagggcctagccctgacacaggtggcttcccgtatcccggtgggaaaacgccctgccaccagcgggcttgagctggcctgtgtccctccactgcctgcaccacccacctccagagtgcagtgctgggcaagggcagctcaagaggacaggaccaggcgcttggcaagacatcagacacacccaacccaaaggcgtggaccccaggcccggcccgtggtacccagcaggtggcactgcagctccccgctcctgcaggtccagcgtcctcacaggaacaccagggcctgtgctccggagccttccttcagacccttcctccacgtgcccacttgggatgcagaatgcagcggagctaggaccccctccacggcctggacctcggctgcagtaaagttacgtgaggcctgtctctcggggcctggaagtggcagccatcagttgctcttgctgacccctcggagcaagcgccgcacaggtggtggctgagacagctggcgcggggggccccaagctgcgccggcctccagcccacccacagctgttgctgaagtcaggccaacctccccagcactggtatctgagtaacggctaagaacctccttcctctggttttgaaaagcagttcgggttgtccaattctgtaacattcatctccattttttaaaaaggtttctctgacggccccacggcccgagccgcggtgagcgtcgtgttgcatgagcctgggccccgggcttcccgtgcgcctctgccgcaggtgcttctgggcacccatcctctgcgtttcatttgcagtcgactgtacagaaggcactcaccacaataaacctttcctgaaagcagaaaaaaa

SEQ ID NO: 73047 - DNA, 646 bp, Homo Sapiens
  misc_feature (419)..(441): n is a, c, g, or t
ggacggcaagtactctcacggtcttaaggtagcgaggctgggtggcgaattcggacgaggggttggcggggtgaaaggttgcgaagatggcgacggacttgagcgaggaggagctggacaatgaagactattactcgttgctgaacgtgcgcagggaggcctcttctgaagagctgaaagctgcctaccggaggctctgtatgctctaccatcccagacaagcacagagacccagagctcaagtcacaggcggaacgactgtttaaccttgttcaccaggcttatgaagtgcttagtgacccccaaaccagggccatctatgatatatatgggaagagaggactggaaatggaaggatgggaggttgtggaaaggaggagaacccctgctgaaattcgagaggagtttgagcggctgcnnnnnnnnnnnnnnnnnnnnnnnttgcagcagcgaaccaatcccaagacatgcggaccggctctcctggtcaaatgatgttttctagctctggacgtctgtggtgctctgcagtttggttcggactgtgacattcatgctttgtgggcttcctggtggagtgtcctacctaaactcagtgaaccctgaagtcaaatgacttgttcaattaaagcgagctggctgttgc

SEQ ID NO: 73048 - DNA, 772 bp, Homo Sapiens
  misc_feature (11)..(11): n is a, c, g, or t
  misc_feature (335)..(357): n is a, c, g, or t
catgtgttatnagagtatgaagtcgacggcgcgccgaattcggcacgaggctcgttgctgaacgtgcgcagggaggcctcttctgaagagctgaaagctgcctaccggaggctctgtatgctctaccatccagacaagcacagagacccagagctcaagtcacaggcggaacgactgtttaaccttgttcaccaggcttatgaagtgcttagtgacccccaaaccagggccatctatgatatatatgggaagagaggactggaaatggaaggatgggaggttgtggaaaggaggagaacccctgctgaaattcgagaggagtttgagcggctgcnnnnnnnnnnnnnnnnnnnnnnnttgcagcagcgaaccaatcccaagggaacgatcagcgttggagtagatgccaccgacctttttgatcgctatgatgaggagtatgaagatgtgtccggcagtagctttccgcagattgaaattaataaaatgcacatatcccagtccattgaggcacccttgacagcgacagacacagccatcctctctggaagcctctcaacccagaatggaaatggaggaggttccattaactttgcgctcagacaaagtatttcagcaaagggatggggagagttggaatttgtacttggaaccttcaggggccttttgtaggtttaaagctgtttcgaatcttaaaccaaaagttttgtgaaaacaaattgagtctatagtttcatccgtggaaatgactcgccagactttgttctaattg

SEQ ID NO: 73049 - DNA, 683 bp, Homo Sapiens
  misc_feature (110)..(118): n is a, c, g, or t
  misc_feature (267)..(300): n is a, c, g, or t
  misc_feature (379)..(391): n is a, c, g, or t
aatgtatcacaatgagcaggaaacatacttgatgaaatattttcaaaggagtatattcaattaccatctacaatcaacttaactatgacaacaaagtttttgtgacaaannnnnnnnncagtttgaaagttccatgtggttctgtttgttagtctccatgtattttggtacagttcgagatcagcattgttacagtaacaaaaaagctaacaagactacattatagaaaaacaccaagaacatcatttttggtttcacttgctctannnnnnnnnnnnnnnnnnnnnnnnnnnnnnnnnngtacattgcaaaggctgttcatatacctcttcacctcagggtcacgttcatttatgctttctttcctacccaaacttgnnnnnnnnnnnnntgaagaaagtaaacaaacaaaaaactagtcaaagctttgtttcacagtgggcagtatctcagcgccaacaaacaactcaatttatgcttctatttaaaatgttttaatttattatttaaaaaaaatatatgtccatgaacatcaagtgcactggcttgggtcactgcctctctctcctgcaacttcctgccatgcctgataaactcaggtttaaacacatgccgtctgttttactttattttcaattgtgtaaaactttggccacattcatctctttaaatagcttgtaatt

SEQ ID NO: 73050 - DNA, 440 bp, Homo Sapiens
  misc_feature (110)..(118): n is a, c, g, or t
  misc_feature (267)..(300): n is a, c, g, or t
  misc_feature (379)..(391): n is a, c, g, or t
aatgtatcacaatgagcaggaaacatacttgatgaaatattttcaaaggagtatattcaattaccatctacaatcaacttaactatgacaacaaagtttttgtgacaaannnnnnnnncagtttgaaagttccatgtggttctgtttgttagtctccatgtattttggtacagttcgagatcagcattgttacagtaacaaaaaagctaacaagactacattatagaaaaacaccaagaacatcatttttggtttcacttgctctannnnnnnnnnnnnnnnnnnnnnnnnnnnnnnnnngtacattgcaaaggctgttcatatacctcttcacctcagggtcacgttcatttatgctttctttcctacccaaacttgnnnnnnnnnnnnntgaagaaagtaaacaaacaaaaaactagtcaaagctttgtttcacagtg

SEQ ID NO: 73051 - DNA, 730 bp, Homo Sapiens
atcggcacgaggcgcgactacagcgccatcctttacctaaatgggacttcgatggcggaaacttttatttcactgaactggatgccaagaccgtgacggcagaggtgcagcctcagtgtggaagagccgtgggattctcttcaggcactgaaaacccacatggagtgaaggctgtcaccagggggcagcgctgtgccatcgccctgtggttcaccctggaccctcgacacagcgagcgggacagggtgcaggcagatgacctggtgaagatgctcttcagcccagaagagatggacctctcccaggagcagcccctggatgcccagcagggcccccccgaacctgcacaagagtctctctcaggcagtgaatcgaagcccaaggatgagctatgacagcgtccaggtcagacggatgggtgactagacccatggagaggaactcttctgcactctgagctggccagcccctcggggctgcagagcagtgagcctacatctgccactcagccgaggggaccctgctcacagccttctacatggtgctactgctcttggagtggacatgaccagacaccgcaccccctggatctggctgagggctcaggacacaggcccagccacccccaggggcctccacaggccgctgcataacagcgatacagtacttaagtgtctgtgtagacaaccaaagaataaatgattcatggttttttttacttggtttgttc

SEQ ID NO: 73052 - DNA, 655 bp, Homo Sapiens
caagaccgtgacggcagagggcagcctcagtgtggaagagccgtgggttctcttcaggcactgaaaacccacatgaagtgaaggctgtcacccagggggcagcgctgtcccatcgccatgtggttcaccctggacccctcgacacagcgagcgggtgagagcagctcgagcgggacagggtgcaggcagatgacctggtgaagatgctcttcagcccagaagagatggacctctcccaggagcagcccctggatgcccagcagggcccccccgaacctgcacaagagtctctctcaggcagtgaatcgaagcccaaggatgagctatgacagcgtccaggtcagacggatgggtgactagacccatggagaggaactcttctgcactctgagctggccagcccctcggggctgcagagcagtgagcctacatctgccactcagccgaggggaccctgctcacagccttctacatggtgctactgctcttggagtggacatgaccagacaccgcaccccctggatctggctgagggctcaggacacaggcccagccacccccaggggcctccacaggccgctgcatgacagcgatacagtacttaagtgtctgtgtagacaaccaaagaataaatgattcatggttttttttaaaa

SEQ ID NO: 73053 - DNA, 1760 bp, Homo Sapiens
caagttttgagaaagctgtggatgcagcacacaccttcttcgtgggcaatcctgagcacatggaaatgcagcagaacctagactattaccaaaccatgtctggagtgaaggaggccgacttcaaggatcttgagactcaaccccatatgcaagaatttcgactgggagtgcgactgtgctcagaggaacagccacaggaagctgtgccccacctagaggcggcgctgcaagaatactttgtggcctatgaggagtgccgtgccctctgcgaagggccctatgactacgatggctacaactaccttgagtacaacgctgacctcttccaggccatcacagatcattacatccaggtcctcaactgtaagcagaactgtgtcacggagcttgcttcccacccaagtcgagagaagccctttgaagacttcctcccatcgcattataattatctgcagtttgcctactataacattgggaattatacacaggctgttgaatgtgccaagacctatcttctcttcttccccaatgacgaggtgattgaaccaaaatttgggcctattatgcagctatgcttggagaagaacacaccagatccatcggcccccgtgagagtgccaaggagtaccgacagcgaagcctactggaaaaagaactgcttttcttcgcttatgatgtttttggaattccctttgtggatccggattcatggactccagaagaagtgattcccaagagattgcaagagaaacagaagtcagaacgggaaacagccgtacgcatctcccaggagattgggaaccttatgaaggaaatcgagacccttgtggaagagaagaccaaggagtcactggatgtgagcagactgacccgggaaggtggccccctgctgtatgaaggcatcagtctcaccatgaactccaaactcctgaatggttcccagcgggtggtgatggacggcgtaatctctgaccacgagtgtcaggagctgcagagactgaccaatgtggcagcaacctcaggagatggctaccggggtcagacctccccacatactcccaatgaaaagttctatggtgtcactgtcttcaaagccctcaagctggggcaagaaggcaaagttcctctgcagagtgcccacctgtactacaacgtgacggagaaggtgcggcgcatcatggagtcctacttccgcctggatacgcccctctacttttcctactctcatctggtgtgccgcactgccatcgaagaagtccaggcagagaggaaggatgatagtcatccagtccacgtggacaactgcatcctgaatgccgagaccctcgtgtgtgtcaaagagcccccagcctacaccttccgcgactacagcgccatcctttacctaaatggggacttcgatggcagtgaatcgaagcccaaggatgagctatgacagcgtccaggtcagacggatgggtgactagacccatggagaggaactcttctgcactctgagctggccagcccctcggggctgcagagcagtgagcctacatctgccactcagccgaggggaccctgctcacagccttctacatggtgctactgctcttggagtggacatgaccagacaccgcaccccctggatctggctgagggctcaggacacaggcccagccacccccaggggcctccacaggccgctgcatgacagcgatacagtacttaagtgtctgtgtagacaaccaaagaataaatgattcatggttttttttaaa

SEQ ID NO: 73054 - DNA, 549 bp, Homo Sapiens
aaacccaaacagtttgttttggtacctttaaatggtggtgttgtgagaagatggatgttgagttgcagggtgtggcaccaggtgatgcccttctgtaagtgcccaccgcgggatgccgggaaggggcattatttgtgcactgagaacaccgcgcagcgtgactgtgagttgctcataccgtgctgctatctgggcagcgctgcccatttatttatatgtagattttaaacactgctgttgacaagttggtttgagggagaaaactttaagtgttaaagccacctctataattgattggactttttaattttaatgtttttccccatgaaccacagtttttatatttctaccagaaaagtaaaaatcttttttaaaagtgttgtttttctaatttataactcctaggggttatttctgtgccagacacattccacctctccagtattgcaggacagaatatatgtgttaatgaaaatgaatggctgtacatatttttttctttcttcagagtactctgtacaataaatgcagtttataaaagtgttaaaa

SEQ ID NO: 73055 - DNA, 1534 bp, Homo Sapiens
  misc_feature (1252)..(1283): n is a, c, g, or t
tggtacgaggcctgggtgttaaattcggcacgaggcgtggtggtcctcagtgacgggcctgccctgcaccctgcgcacgccccacagataagctacaccgggccctcgtccagcgggcgcttcgcgggcagagagtggtactacgggaacgtgacgcggcaccaggccgagtgcgccctcaacgagcggggcgtggagggcgacttcctcattagggacagcgagtcctcgcccagcgacttctccgtgtcccttaaagcgtcagggaagaacaaacacttcaaggtgcagctcgtggacaatgtctactgcattgggcagcggcgcttccacaccatggacgagctggtggaacactacaaaaaggcgcccatcttcaccagcgagcacggggagaagctctacctcgtcagggccctgcagtgacggcgccccggccccacactcgcctcccgggccccacggttggagctgcccgcccggccttgtggcagaggctcctcccgcggggacggccccgacggcttctctgcgagtctctctttatgttcaggtcgcttggtcggttcgtctcccattatgccatccaggcctcacacccacactcgagcccacccggccggccagctttagaggaggggaggagcagggcgagttcacattattccttttccatcggaagtggcgctcgtgcattcaactcgttcccgcttcatggaacccctctttaaaaagacgcagggcacctgttgaggcgccaggagcgaaggccttaaggccacccagcgggcagcgcccgtgtcctgggcactccagcggtgcttgggcagagcaggtgcgatggccccagtcctagcagccctcgcccatgtcctgtgcccttacatggctcccggactgtgcagggagccgatacgtttgctgatagcaatactggaaccaccgggtgcgatggcagtgaggagactgcccagtgcctttggggctgtgcttgcaataaagaaagaatttcctggaaaggcagtctgcaaaagagggaaccggtgactcagaaagacagatgttttggtaatttaccccaaatgtgccatccacatagtgctttttcctcttgcccttcggcttgtttgaatctcacaattatgtatttaattctcaaagaaatatgtatctgtagccgtttgttgacactaatacagatgattaaggaaaacagctgatctttggggaagggagctaccaacactttatnnnnnnnnnnnnnnnnnnnnnnnnnnnnnnnntatatatatatattatttacagggaaatttttcagggtttacaaaagagtatgtgattggtagtaagagacacacagaatgtttatgaagaaattgcattttctttttcctttacatttgaacttctttatagtttaaatataacgtcttgagatggcacattcctacgattgaagaaggggtcttgagatcccctaaacttgcatacccagttttttggatattgtaataaaaaaaagtattatgacaaa

SEQ ID NO: 73056 - DNA, 1225 bp, Homo Sapiens
tatagtgactatagaaccagttgttcaaaaagcaggctggtccggtcggaattcccgggatatcgtcgaccacgcgtcgcaagaagaacgagcggctgtggttgctggacgactccaagacgtggtggcgggtgaggaacgcggccaacaggacgggctatgtaccgtccaactacgtggagcggaagaacagcctgaagaagggctccctcctgaagaacctgaaggacacactagggctcggcaagacagcgcaggaagaccagcgcgcgggatgcgtcccccacgcccagcacggacgccgagtaccccgccaatggcagcggcgcacgaggccgcatctacgacctcaacatcccggccttcgtcaagttcgcctatgtggccgagcgggaggatgagttgtccctggtgaaggggtcgcgcgtcaccgtcatggagaagtgcagcgacggttggtggcggggcagctacaacgggcagatcggctggttcccctccaactacgtcttggaggaggtggacgaggcggctgcggagcccccaagcttcctgagcctgcgcaagggcgcctcgctgagcaatggccagggctcccgcgtgctgcatgtggtccagacgctgtaccccttcagctcagtcaccgaggaggagctcaacttcgagaagggggagaccatggaggtgattgagaagccggagaacgaccccgagtggtggaaatgcaaaaatgcccggggccaggtgggcctcgtccccaaaaactacgtggtggtcctcagtgacgggcctgccctgcaccctgcgcacgccccacagataagctacaccgggccctcgtccagcgggcgcttcgcgggcagacagcggtactaccggaacgtgacgcggcaccaggtccgagtgcgccctcaacgagcggggcgtggagggcgacttcctcattagggacagcgagtcctcgcccagcgacttctccgtgtcccttaaagcgtcagggaagaacaaacacttcaaggtgcagctcgtggacaatgtctactgcattgggcagcggcgcttccacaccatggacgagctggtggaacactacaaaaaggcgcccatcttcaccagcgagcacgggggagaagctctacctcgtcagggccctgcagtgaccgcggccccggccccacactcgccctcccggggccccacggtggaagctgcccggccgggcctt

SEQ ID NO: 73057 - DNA, 473 bp, Homo Sapiens
  misc_feature (230)..(287): n is a, c, g, or t
  misc_feature (426)..(426): n is a, c, g, or t
ataatacttttttttattacaatatccaaaaaactgggtatgcaagtttaggggatctcaaaaccccttcttcaatcgtaggaatgtgccatctcaaaacgttatatttaaactataaagaagttcaaatgtaaaggaaaaagaaaatgcaatttcttcataaacattctgtgtgtctcttactaccaatcacatactcttttgtaaaccctgaaaaatttccctgtaannnnnnnnnnnnnnnnnnnnnnnnnnnnnnnnnnnnnnnnnnnnnnnnnnnnnnnnnnataaagtgttggtagctcccttccccaaagatcagctgttttccttaatcatctgtattagtgtcaacaaacggctacagatacatatttctttgagaattaaatacataattgtgagattcaaacaagccgaaggcanagaggaaaaagcactatgtggatggcacatttggggtaaattaccaa

SEQ ID NO: 73058 - DNA, 1061 bp, Homo Sapiens
  misc_feature (21)..(21): n is a, c, g, or t
  misc_feature (117)..(117): n is a, c, g, or t
ggatgtattaaccctgcttancgaagtcaccatattataataggaaaaacactgcctaggaggcaagagatctgaattccagttctgatgctgccactgtgtaaggaagtagtttantaacccatgggcaaatcatctgagctttctcatctgtaaagttagggagaggaattaattagttgatctgtaaaataatcagcttcaaaacgttatggctaaatctgtagaatgtatgcccaattgctaaacggatgttgtgcccagaattttatctagtgactacctcaacatacaggccaagcgttacctacaccaacacccaagccattaatttgaggtgccatgagaataggtgaaccacagcctaacaccatttaggtttttgtgtttttttcaggcttgcctctacttaaatatatttagatgagagagttctcttagacttctttctttgtaaggaagggttatttggggaagtgttggaaaaaagattagggcagggtacccttagtttatatagggtacaaaagaatgggaaacatcttccctttcttctttaatctctgaagtcatgtttggaattacatataatgtagcaggtactggagaggacctgaatttcaagcttctgatttagctgtttgtaaacttccaagttttgcttgactaaagaatgctgatcttttttgggagtctgatctccttctaatatcagaaagtgctttttatattccagattgcttgaattaaactgtttggattaaagaacatatatggagtttcctctctggttttaaataatctttctttattcagtagctattaataatttatctcatattcagcgaatatttattgagaatattgttgagaatctcttacatgccaggcactatactaagttaatatgcattcagtataccagttggtgtgacccagaccaaaggtaacacaaagatgaatgagaattccttcaaggcgccgataatcctagtaggagagctaagacacaaaactgttgcatgtttttaatcatcaaattaaattctttccacgtcctt

SEQ ID NO: 73059 - DNA, 1767 bp, Homo Sapiens
ggtcctaggtagcgaggcctgggtggcgaattcggcacgagggccaaggagagcagtctgcagcccgcggtgcgcgtgggccaaggccgcaccggagtgtcggtggggatgggcatcccgagcgtgcggcgcgaggtgcactcgtacctgactgacactctgcactcgctcatctccgagctgagcccgcaggagaaggaggactcggtcatcgtggtgctgatcgccgagactgactcacaggacacttccggcagtgacagagaacatcaaggccttgttccccacggagatccattctgggctcctggagagtcatctcaccctccccccacttctaccctgacttctcccgcctccgagagtcctttggggaccccaaggagagagtcaggtggaggaccaaacagaacctcgattactgcttcctcatgatgtacgcgcagtccaaaggcatctactacgtgcagctggaggatgacatcgtggccaagcccaactacctgagcaccatgaagaactttgcactgcagcagccttcagaggactggatgatcctggagtgctcccagctgggcttcattggcaagatgctcaagtcgctggacctgagcctgattgtagagttcattctcatgttctaccgggacaagcccatcgactggctcctggaccatattctgtgggtgaaagtctgcaaccccgagaaggatgcgaagcactgtgaccggcagaaagccaacctgcggatccgcttcaaaccgtccctcttccagcacgtgggcactcactcctcgctggctggcaagatccagaaactgaaggacaaagactttggaaagcaggcgctgcggaaggagcatgtgaacccgccagcagaggtgagcacgagcctgaagacataccagcacttcaccctggagaaagcctacctgcgcgaggacttcttctgggccttcacccctgccgcgggggacttcatccgcttccgcttcttccaacctctaagactggagcggttcttcttccgcagtgggaacatcgagcacccggaggacaagctcttcaacacgtctgtggaggtgctgcccttcgacaaccctcagtcagacaaggaggccctgcaggagggccgcaccgccaccctccggtaccctcggagccccgacggctacctccagatcggctccttctacaagggagtggcagagggagaggtggacccagccttcggccctctggaagcactgcgcctctcgatccagacggactcccctgtgtgggtgattctgagcgagatcttcctgaaaaaggccgactaagctgcgggcttctgagggtaccctgtggccagccctgaagcccacatttctgggggtgtcgtcactgccgtccccggagggccagatacggccccgcccaaagggttctgcctggcgtcgggcttgggccggcctggggtccgccgctggcccggaggccctaggagctggtgctgcccccgcccgccgggccgcggaggaggcaggcggcccccacactgtgcctgaggcccggaaccgttcgcacccggcctgccccagtcaggccgttttagaagagcttttacttgggcgcccgccgtctctggcgcgaacactggaatgcatatactactttatgtgctgtgttttttattcttggatacatttgattttttcacgtaagtccacatatacttctataagagcgtgacttgtaataaagggttaatgaagtgtgtgcctc

SEQ ID NO: 73060 - DNA, 1040 bp, Homo Sapiens
  misc_feature (98)..(213): n is a, c, g, or t
  misc_feature (909)..(928): n is a, c, g, or t
gcagtgagcctgatacctgcctctgcccttctgagcctgttcctcttccctgagtacagggcacaaagcttgcgccctgaggggcggccggcgcgctnnnnnnnnnnnnnnnnnnnnnnnnnnnnnnnnnnnnnnnnnnnnnnnnnnnnnnnnnnnnnnnnnnnnnnnnnnnnnnnnnnnnnnnnnnnnnnnnnnnnnnnnnnnnnnnnnnnnggccatgcagcctcggccccgcgggcgcccgccgcgcacccgaggagatgaggctccgcaatggcaccttcctgacgctgctgctcttctgcctgtgcgccttcctctcgctgtcctggtacgcggcactcagcggccagaaaggcgacgttgtggacgtttaccagcgggagttcctggcgctgcgcgatcggttgcacgcagctgagcaggagagcctcaagcgctccaaggagctcaacctggtgctggacgagatcaagagggccgtgtcagaaaggcaggcgctgcgagacggagacggcaatcgcacctggggccgcctaacagaggacccccgattgaagccgtggaacggctcacaccggcacgtgctgcacctgcccaccgtcttccatcacctgccacacctgctggccaaggagagcagtctgcagcccgcggtgcgcgtgggccaaggcccgcacgggagtgtccgtgggagatgggcatcccgagcgtgcggcgccaggtgcactcgtaacctgactgaaactctggactcgctcatctccgaactgaccccgcaggagaaaggaggactcgggccatccgggggggctgatccccccgagactggattcccgggtacccttttcggcggggccagaaaaaacatcccggggcctttgttccccccacggggaatcccttccnnnnnnnnnnnnnnnnnnnntattttacgccctctcccccacctttttgccccccggggctttctcccggcccttccaagagaacctttttgggggaccccccccgggatcacacttctcagtgggaaaact

SEQ ID NO: 73061 - DNA, 1792 bp, Homo Sapiens
  misc_feature (1718)..(1735): n is a, c, g, or t
caaggtagcgaggcctgggtggcgaattcggcacgaggctcaagcgctccaaggagctcaacctggtgctggacgagatcaagagggccgtgtcagaaaggcaggcgctgcgagacggagacggcaatcgcacctggggccgcctaacagaggacccccgattgaagccgtggaacggctcacaccggcacgtgctgcacctgcccaccgtcttccatcacctgccacacctgctggccaaggagagcagtctgcagcccgcggtgcgcgtgggccagggccgcaccggagtgtcggtggtgatgggcatcccgagcgtgcggcgcgaggtgcactcgtacctgactgacactctgcactcgctcatctccgagctgagcccgcaggagaaggaggactcggtcatcgtggtgctgatcgccgagactgactcacagtacacttcggcagtgacagagaacatcaaggccttgttccccacggagatccattctgggctcctggaggtcatctcaccctccccccacttctaccctgacttctcccgcctccgagagtcctttggggaccccaaggagagagtcaggtggaggaccaaacagaacctcgattactgcttcctcatgatgtacgcgcagtccaaaggcatctactacgtgcagctggaggatgacatcgtggccaagcccaactacctgagcaccatgaagaactttgcactgcagcagccttcagaggactggatgatcctggagttctcccagctgggcttcattggtaagatgttcaagtcgctggacctgagcctgattgtagagttcattctcatgttctaccgggacaagcccatcgactggctcctggaccatattctgtgggtgaaagtctgcaaccccgagaaggatgcgaagcactgtgaccggcagaaagccaacctgcggatccgcttcaaaccgtccctcttccagcacgtgggcactcactcctcgctggctggcaagatccagaaactgaaggacaaagactttggaaagcaggcgctgcggaaggagcatgtgaacccgccagcagaggtgagcacgagcctgaagacataccagcacttcaccctggagaaagcctacctgcgcgaggacttcttctgggccttcacccctgccgcgggggacttcatccgcttccgcttcttccaacctctaagactggagcggttcttcttccgcagtgggaacatcgagcacccggaggacaagctcttcaacacgtctgtggaggtgctgcccttcgacaaccctcagtcagacaaggaggccctgcaggagggccgcaccgccaccctccggtaccctcggagccccgacggctacctccagatcggctccttctacaagggagtggcaaagggagaggtggacccagccttcggccctctggaagcactgcgcctctcgatccagacggactcccctgtgtgggtgattctgagcgagatcttcctgaaaaaagccgactaagctgcggggcttctgaagggtaccctgtggccagccctgaagcccacatttctggggggtgtcgtcactgcccgtcccccggaggggccagatacggcccccgccccaaaggggttctgccctggcggtcgggcttggggacccggccctgggggcccccccgcctgggccccggaaggccccttagggagcctggggggcttnnnnnnnnnnnnnnnnnngggggtcccgccggaaaggaagagcaagggccgggacccccccacaaacttgtgcga

SEQ ID NO: 73062 - DNA, 1201 bp, Homo Sapiens
aaggtagcgaggcctgggtggcgaattccgcacgaggctgacttctcccgcctccgagagtcctttggggaccccaaggagagagtcaggtggaggaccaaacagaacctcgattactgcttcctcatgatgtacgcgcagtccaaaggcatctactacgtgcagctggaggatgacatcgtggccaagcccaactacctgagcaccatgaagaactttgcactgcagcagccttcagaggactggatgatcctggagttctcccagctgggcttcattggtaagatgttcaagtcgctggacctgagcctgattgtagagttcattctcatgttctaccgggacaagcccatcgactggctcctggaccatattctgtgggtgaaagtctgcaaccccgagaaggatgcgaagcactgtgaccggcagaaagccaacctgcggatccgcttcaaaccgtccctcttccagcacgtgggcactcactcctcgctggctggcaagatccagaaactgaaggacaaagactttggaaagcaggcgctgcggaaggagcatgtgaacccgccagcagaggtgagcacgagcctgaagacataccagcacttcaccctggagaaagcctacctgcgcgaggacttcttctgggccttcacccctgccgcgggggacttcatccgcttccgcttcttccaacctctaagactggagcggttcttcttccgcagtgggaacatcgagcacccggaggacaagctcttcaacacgtctgtggaggtgctgcccttcgacaaccctcagtcagacaaggaggccctgcaggagggccgcaccgccaccctccggtaccctcggagccccgacggctacctccagatcggctccttctacaagggagtggcagagggagaggtggacccagccttcggccctctggaagcactgcgcctctcgatccagacggactcccctgtgtgggtgattctgagcgagatcttcctgaaaaaggccgactaagcctgcgggccttctgagggtacccctgtggccaagcccctgaaaacccacattttccgggggggtgtccgtcaactggcccgatcccccggaaggggcccagaataccggccccccgccccaaaaagggcttcttggccctgaggaggatccgaggcgcttggggcacagcggagacactggt

SEQ ID NO: 73063 - DNA, 975 bp, Homo Sapiens
aaggtagcgaggcctgggtggcgaattcggcacgaggcagaaaggcaggcgctgcgagacggagacggcaatcgcacctggggccgcctaacagaggacccccgattgaagccgtggaacggctcacaccggcacgtgctgcacctgcccaccgtcttccatcacctgccacacctgctggccaaggagagcagtctgcagcccgcggtgcgcgtgggccagggccgcaccggagtgtcggtggtgatgggcatcccgagcgtgcggcgcgaggtgcactcgtacctgactgacactctgcactcgctcatctccgagctgagcccgcaggagaaggaggactcggtcatcgtggtgctgatcgccgagactgactcacagtacacttcggcagtgacagagaacatcaaggccttgttccccacggagatccattctgggctcctggaggtcatctcaccctccccccacttctaccctgacttctcccgcctccgagagtcctttggggaccccaaggagagagtcaggtggaggaccaaacagaacctcgattactgcttcctcatgatgtacgcgcagtccaaaggcatctactacgtgcagctggaggatgacatcgtggccaagcccaactacctgagcaccatgaagaactttgcactgcagcagccttcagaggactggatgatcctggagttctcccagctgggcttcattggtaagatgttcaagtcgctggacctgagcctgattgtagagttcattctcatgttctaccggggacaagcccatcgactgggctcctggaccataattctgtggggtgaaagtctgcaacccccaagaaggatgcgaagcactggtgaccggcagaaagccaaccctgcggaatccgcttcaaaaccgtccccttttccagcacgtgggcacctcacttccttccctgggctgggcaagatccagaaaactgga

SEQ ID NO: 73064 - DNA, 979 bp, Homo Sapiens
  misc_feature (775)..(775): n is a, c, g, or t
ggcctgggtggcaattcggacgaggctcagcgctccaggagctaacctggtgctggacgagatcaagagggccgtgtcagaaaggcaggcgctgcgagacggagacggcaatcgcacctggggccgcctaacagaggacccccgattgaagccgtggaacggctcacaccggcacgtgctgcacctgcccaccgtcttccatcacctgccacacctgctggccaaggagagcagtctgcagcccgcggtgcgcgtgggccagggccgcaccggagtgtcggtggtgatgggcatcccgagcgtgcggcgcgaggtgcactcgtacctgactgacactctgcactcgctcatctccgagctgagcccgcaggagaaggaggactcggtcatcgtggtgctgatcgccgagactgactcacagtacacttcggcagtgacagagaacatcaaggccttgttccccacggagatccattctgggctcctggaggtcatctcaccctccccccacttctaccctgacttctcccgcctccgagagtcctttggggaccccaaggagagagtcaggtggaggaccaaacagaacctcgattactgcttcctcatgatgtacgcgcagtccaaaggcatctactacgtgcagctggaggatgacatcgtggccaagcccaactacctgagcaccatgaagaactttgcactgcagcagccttcagaggactggatggatccctggagttctcccagctggggcttcattgggtaagatgtntcaagtcccctggaactggagcctgaatggaagaagttcatttctcatggttccaaccggggacaaagccccatcgaactggggctcctgggacccatatttctggtggggggaaaagtctgccaaccccgaaaaaggatggccaaacccctggggccccggcaaaaaaagccaaccctggggaatcccgctttcaaaccgctc

SEQ ID NO: 73065 - DNA, 1332 bp, Homo Sapiens
  misc_feature (106)..(221): n is a, c, g, or t
tgatctctgcagtgagcctgatacctgcctctgcccttctgagcctgttcctcttccctgagtacagggcacaaagcttgcgccctgaggggcggccggcgcgctnnnnnnnnnnnnnnnnnnnnnnnnnnnnnnnnnnnnnnnnnnnnnnnnnnnnnnnnnnnnnnnnnnnnnnnnnnnnnnnnnnnnnnnnnnnnnnnnnnnnnnnnnnnnnnnnnnnnggccatgcagcctcggccccgcgggcgcccgccgcgcacccgaggagatgaggctccgcaatggcaccttcctgacgctgctgctcttctgcctgtgcgccttcctctcgctgtcctggtacgcggcactcagcggccagaaaggcgacgttgtggacgtttaccagcgggagttcctggcgctgcgcgatcggttgcacgcagctgagcaggagagcctcaagcgctccaaggagctcaacctggtgctggacgagatcaagagggccgtgtcagaaaggcaggcgctgcgagacggagacggcaatcgcacctggggccgcctaacagaggacccccgattgaagccgtggaacggctcacaccggcacgtgctgcacctgcccaccgtcttccatcacctgccacacctgctggccaaggagagcagtctgcagcccgcggtgcgcgtgggccagggccgcaccggagtgtcggtggtgatgggcatcccgagcgtgcggcgcgaggtgcactcgtacctgactgacactctgcactcgctcatctccgagctgagcccgcaggagaaggaggactcggtcatcgtggtgctgatcgccgagactgactcacagtacacttcggcagtgacagagaacatcaaggccttgttccccacggagatccattctgggctcctggaggtcatctcaccctccccccacttctaccctgacttctcccgcctccgagagtcctttggggaccccaaggagagagtcaggtggaggacccaaaagaacctcgattactgcttcctcatgatgtacgcgcagtcccaaggcatctactacgtgcaactggaggatgacatcgtgggccaagcccaactacctggagcaccatgaaaaaacttttgcacggcagcaacccttcagaaggaccgggatggatcctcgggggtcctcccagacttgggcttcattgggtaaaaaaaggctcaaagtcgcctggacccggacgcccggattggaaaaagttcctttcccccggggcttacccgggtaacaaagcccgttccaaggggggtacccgacacacaaaattgtgggggggagcaaaaagatat

SEQ ID NO: 73066 - DNA, 718 bp, Homo Sapiens
gccgctgagtgccgcgtaccaggacagcgagaggaaggcgcacaggcagaagagcagcagcgtcaggaaggtgccattgcggagcctcatctcctcggtgtctgcgagattaatctctcatggccgctgcacaagaacctggcttttagctgaactaaggagaaagtcctacaacagtttggcgtgcaacatggggcttgagaaagggttttcagcagcttccggaggccgcctggactgcagaaggcgccctgggcgtgtgtacttccacctccgcaggcgctggcatctccaggctgcttcaggccgctttggacctcaccatcggtagcatctgcgtcttcttgaggtgactggagcccgtctatggtttcagccattgacttctggacatggaagtgtcgaggccatttttggcccctctcatatccgggaagggctccgtgcccagtagaggtgcagtgcagcagccagctcgcagcagtgctcccgtagagctgatggcattggcaggagtggcggctcagcacagggaagttctccagtgcccaggcccaggcttgctctcggtttaggtcccatggcacgtggggctctggacctgcctgcctccaagacagctcttccaaggttgagggttggaactccacagcctcagcctcccaaagcttgaccaggcccagccatagctagtctaggaaaagagcaaatggccgtg

SEQ ID NO: 73067 - DNA, 985 bp, Homo Sapiens
  misc_feature (451)..(485): n is a, c, g, or t
  misc_feature (865)..(899): n is a, c, g, or t
taaatacccagatatattcagttccccattcatatcttatgttggtaaaattgttaattggatttccaatgattttttagatgattaagtgataataaggaatggtaaatccaatagcaccatttcaaagacttgttgtcactgatttctcatttagatgtgtgacgaagatactccacctgtaagggcaagtatgccaatgccacaagcccgtgtttttgcaagggcctccaatttgggcattttgtcccgtgtgcgcgtaaagcttcacacaaggttcgggcagcggctgtttctgttggatgcactgggtcacccaccagaaaagggcttttggacatttggggtttctacccacactttggttttctaaatgaggtggactgggagggaggtatcttctttcagatgaaagggaaggggcgagatggagttatcttatttctgggtnnnnnnnnnnnnnnnnnnnnnnnnnnnnnnnnnnntactgagctggattatactgttaggatgtaaagttccttagctacttctttaaggctcaacacgaggctgatggtcaacataaaaagcaaacaatactatgtacatatatgtaaaaagtgttataaataggttttataaaccggagatattatatacatcttcaatcaacagcaacccccacctccactgctttctgtttggtttggtttgagtttgggattttgggctagctcttttttctttgtctgctttctggtttcccttcctcccttccctatgtacgctcagagcctcagacagaccgtctgggcgcctcattcgcgtttcccccggccgtaatggccgaattcccgggcatatgtccggtaccgtcgactgnnnnnnnnnnnnnnnnnnnnnnnnnnnnnnnnnnncgccgcttcctcgctcactacttccgctgcgctcgttcgttctgctgctaccagcgcttgacccctatatgagtctatacagcttt

SEQ ID NO: 73068 - DNA, 1485 bp, Homo Sapiens
gcttcgcgcgcgcgcagccccgcagcgcagctttggcggcgccagcagcggagccaacgcacccgagtttgtgtttgaggccaccctgaggatcgggacagctgttcctttgggctgcagaaactccgctgagcagaacttgccgccagaatgctcctcctgttgctgagtatcatcgtcctccacgtcgcggtgctggtgctgctgttcgtctccacgatcgtcagccaatggatcgtgggcaatggacacgcaactgatctctggcagaactgtagcacctcttcctcaggaaatgtccaccactgtttctcatcatcaccaaacgaatggctgcagtctgtccaggccaccatgatcctgtcgatcatcttcagcattctgtctctgttcctgttcttctgccaactcttcaccctcaccaaggggggcaggttttacatcactggaatcttccaaattcttgctggtctgtgcgtgatgagtgctgcggccatctacacggtgaggcacccggagtggcatctcaactcggattactcctacggtttcgcctacatcctggcctgggtggccttccccctggcccttctcagcggtgtcatctatgtgatcttgcggaaacgcgaatgaggcgcccagacggtctgtctgaggctctgagcgtacatagggaagggaggaagggaaaccagaaagcagacaaagaaaaaagagctagcccaaaatcccaaactcaaaccaaaccaaacagaaagcagtggaggtgggggttgctgttgattgaagatgtatataatatctccggtttataaaacctatttataacactttttacatatatgtacatagtattgtttgctttttatgttgaccatcagcctcgtgttgagccttaaagaagtagctaagggaactttacatcctaacagtataatccagctcagtattttggttgtttgtggttgttgttttacccagaaataagataactccatctcgccccttccctttcatctgaaagaagatacctccctcccagtccacctcatttagaaaaccaaagtgtgggtagaaaccccaaatgtccaaaagcccttttctggtgggtgacccagtgcatccaacagaaacagcgtgccgaacctctgtgtgaagctttacgcgcacacggacaaatgcccaaattggagccctcgcaaaaaacaacgggtttggtggcattgggcatacttggcccttacagggtgggaggtatcttccgtcacacatgctatatgagaaatcagtgacaaccagtcttcgacatggtggttatggatttaccattcctttattatcactaatcatcttaaacaacgtccctggaatccccattcacactcttcacttaattgatggggaccgaatactgggatacaaagggaaaccgcctggcacgaggggataatagggaataggctcccccttttcggggcacagaac

SEQ ID NO: 73069 - DNA, 906 bp, Homo Sapiens
  misc_feature (77)..(111): n is a, c, g, or t
gaccatcagcctcgtgttgagccttaaagaagtagctaaggaactttacatcctaacagtataatccagctcagtannnnnnnnnnnnnnnnnnnnnnnnnnnnnnnnnnnacccagaaataagataactccatctcgccccttccctttcatctgaaagaagatacctccctcccagtccacctcatttagaaaaccaaagtgtgggtagaaaccccaaatgtccaaaagcccttttctggtgggtgacccagtgcatccaacagaaacagccgctgcccgaacctctgtgtgaagctttacgcgcacacggacaaaatgcccaaactggagcccttgcaaaaacacggcttgtggcattggcatacttgcccttacaggtggagtatcttcgtcacacatctaaatgagaaatcagtgacaacaagtctttgaaatggtgctatggatttaccattccttattatcactaatcatctaaacaactcactggaaatccaattaacaattttacaacataagatagaatggagacctgaataattctgtgtaatataaatggtttataactgcttttgtacctagctaggctgctattattactataatgagtaaatcataaagccttcatcactcccacatttttcttacggtcggagcatcagaacaagcgtctagactccttgggaccgtgagttcctagagcttggctgggtctaggctgttctgtgcctccaaggactgtctggcaatgacttgtattggccaccaactgtagatgtatatatggtgcccttctgatgctaagactccagaccttttgtttttgctttgcattttctgattttataccaactgtgtggactaagatgcattaaaataaacatccagaacctcaaaaaaaac

SEQ ID NO: 73070 - DNA, 509 bp, Homo Sapiens
cagtaccctattcacgctctgtgcttgtgccaagggggcaatggcggcttcctgtgttctactgcacactgggcagaagatgcctctgattggtctgggtacctggaagagtgagcctgtcctgctggaggaaccagtagtcctggcattggctgaaaagtatggccgatctccagctcagatcttgctcaggtggcaggtccagcggaaagtgatctgcatccccaaaagtatcactccttctcgaatccttcagaacatcaaggtgtttgacttcacctttagcccagaagagatgaagcagctaaatgccctgaacaaaaattggagatatattgtgcctatgcttacggtggatgggaagagagtcccaagggatgcagggcatcctctgtacccctttaatgacccgtactgagaccacagcttcttggcctcccttccagctctgcagctaatgaggtcctgccacaacggaaagagggagttaataaagccattggagcatc

SEQ ID NO: 73071 - DNA, 1101 bp, Homo Sapiens
  misc_feature (716)..(759): n is a, c, g, or t
agcagttacctccaggccacgtgcttggcagtgggcaattagctcattttgagccaagtatgggtggcattccacctgcaagacagctggacgcacggaggccacactgagtatgtcatcaatctgccgactgttgaagttggacaggcccagcgcctgcaccagccccttagccaccagtgcctccagagccttccaagtctccttgtagtggggtggagtcgtagccatatagtcccatcagcattcttggggaaggggttgtctccccgctcaaaggcataaggccagtgcatcaggtacaggtccagatactccagctggaggtcagccagagtcttccggagggcaggctccacatcctcggggtggtgcttggtgttccacagcttggatgtcacaaacagctcctcccgaggcaccgccttgcctggtcccacgtcctccttcagggcctccccaatctcaggctcattgccgtagatagcagcacaatcaatgtggcggtagcctacgctaagggcatacttaacagctgcttttacctgaccaggctcactcttccaggtacccagaccaatcagaggcatcttctgcccagtgtgcagtagaacacaggaagccgccattgccccctttgcctggctagctgctgctcatccttcagctagcacttcacatttctggctcctttccaggtgcagtggctcatacannnnnnnnnnnnnnnnnnnnnnnnnnnnnnnnnnnnnnnnnnnnaaaccttggcacaagcacagagcgtgaatagggtactgtggcctgggctcagttctgcaccccgccagagatccaacgatcctcagcttaagtctggcggtgagggggaagttccacccggagggaggggcaggggccgggcataaaggatcacgcgcagggtggaccgccttcgccgcctcccgaggaaggacctgaaggggatggaaaacagagctgggaggtagtaccgtctccacctctggatcctcgaggtcgaactggccggaacttggtcactcactccgcagcgcgggttggagaactcctgggcacaatgaggcatcccgggaattccggacc

SEQ ID NO: 73072 - DNA, 1729 bp, Homo Sapiens
  misc_feature (34)..(34): n is a, c, g, or t
  misc_feature (1535)..(1547): n is a, c, g, or t
  misc_feature (1549)..(1550): n is a, c, g, or t
  misc_feature (1552)..(1552): n is a, c, g, or t
  misc_feature (1556)..(1557): n is a, c, g, or t
  misc_feature (1559)..(1561): n is a, c, g, or t
  misc_feature (1564)..(1564): n is a, c, g, or t
  misc_feature (1569)..(1570): n is a, c, g, or t
  misc_feature (1574)..(1574): n is a, c, g, or t
  misc_feature (1578)..(1578): n is a, c, g, or t
  misc_feature (1580)..(1580): n is a, c, g, or t
  misc_feature (1582)..(1582): n is a, c, g, or t
gcgacagacaaaattagatgacacataaatagancccccacgctgggtgtttataaaacaaaaaagccaggctgtacggtcggattcccgggatacgtcgaccacgcgtccgcacgtggcagcgccactgcctcattgtgcccaggagttctccaaacccgcgctgcggagtgagtgaccaagttccggccagttcgacctcgaggatccagaggtggagacggtactacctcccagctctgttttccatccccttcaggtccttcctcgggaggcggcgaaggcggtccaccctgcgcgtgatcctttatgcccggcccctgcccctccctccgggtggaacttccccctcaccgccagacttaagctgaggatcgttggatctctggcggggtgcagaactgagcccaggccacagtaccctattcacgctctgtgcttgtgccaagggggcaatggcggcttcctgtgttctactgcacactgggcagaagatgcctctgattggtctgggtacctggaagagtgagcctggtcaggtaaaagcagctgttaagtatgcccttagcgtaggctaccgccacattgattgtgctgctatctacggcaatgagcctgagattggggaggccctgaaggaggacgtgggaccaggcaaggcggtgcctcgggaggagctgtttgtgacatccaagctgtggaacaccaagcaccaccccgaggatgtggagcctgccctccggaagactctggctgacctccagctggagtatctggacctgtacctgatgcactggccttatgcctttgagcggggagacaaccccttccccaagaatgctgatgggactatatgctacgactccacccactacaaggagacttggaaggctctggaggcactggtggctaaggggctggtgcaggcgctgggcctgtccaacttcaacagtcggcagattgatgacatactcagtgtggcctccgtgcgtccagctgtcttgcaggtggaatgccacccatacttggctcaaaatgagctaattgcccactgccaagcacgtggcctggaggtaactgcttatagccctttgggctcctctgatcgtgcatggcgtgatcctgatgagcctgtcctgctggaggaaccagtagtcctggcattggctgaaaagtatggccgatctccagctcagatcttgctcaggtggcaggtccagcggaaagtgatctgcatccccaaaagtatcactccttctcgaatccttcagaacatcaaggtgtttgacttcacctttagcccagaagagatgaagcagctaaatgccctgaacaaaaattggagatatattgtgcctatgcttacggtggatgggaagagagtcccaagggatgcagggcatcctctgtacccctttaatgacccgtactgagaccacagcttcttggcctcccttccagctctgcagctaatgaggtcctgccacaacggaaagagggagttaataaagccattggagcatccaaaaaaaaannnnnnnnnnnnnanngntttnnannnaanaaaannaagnaaanananacatggtcggccgcctcgggccctccgagaaagttttctaaaaccattcgttttggcccgcgggccccccttaaggtaaagggaaacctggggccataaccgggttttcccaaagggaaatccctgggccactgaacctaaagggct

SEQ ID NO: 73073 - DNA, 1568 bp, Homo Sapiens
gcggcaccatggccccgcgggggcggcggcggcccggcctcacaggtctgagagcgcaagacgttcaaagaacactttagaaagaacacattccatgaaagataaagctggtcaaaagtgcaagcctattgacgtgttcgactttcctgataattctgatgtctcaagcattggcaggctgggtgaaaatgagaaagatgaagaaacttatgagacctttgatcctcctttacatagcacagctatatatgctgatgaagaagaattctccaaacattgtggactgtctctctcttcaactcctccaggaaaagaagcaaaaagaagttcagacacttctggaaatgaagcaagtgaaatcgaatctgtaaaaattagtgcaaaaaagccaggaagaaagctcaggcccattagtgatgactctgaaagcattgaagaaagtgatacaaggagaaaagttaaatcagcagagaaaataagtacacaacgtcatgaggttattcgaaccacagcgtcttcagaactttcagagaaaccagctgagtctgtcacttctaaaaagacaggaccccttagtggcccagccctctgttgaaaaagagaacttggcaatagaaagtcaatcgaaaactcagaaacaaagggaagatatctcatgacaaaaggaagaaatcaagaagtaaagccataggctcagatacttctgacattgtgcacatttggtgtccagaaggaatgaaaaccagtgacatcaaggagttgaatattgttttgcctgaatttgagaaaacccacctagagcatcaacaaagaatagaatctaaagtttgtaaggcagccatcgccacattttatgttaatgttaaagaacaattcatcaaaatgcttaaagaaagccagatgttgacaaatctgaaaaggaagaatgctaagatgatttcagatatcgaaaagaaaaggcagcgtatgattgaagtccaggatgaactgcttcggttagagccacagctgaaacaactacaaacaaaatatgatgaacttaaagagagaaagtcttcccttaggaatgcagcatatttcttatctaatttaaaacagctttatcaagattattcagatgttcaagctcaagaaccaaacgtaaaggaaacgtatgattcatccagccttccagctctgttatttaaagcaagaacacttctgggagccgaaagccatctgcgaaatatcaaccatcagttagagaagctccttgaccagggatgagaagagcagtctactaaaatgtgcctataggaagactagtctcatgctgttaccttctgaaactgtacctttataaatcaattgttttgcaaagaagttatggcctacttagaatctaaaatttgttattcaaattaaatggctgtgaacaatgttaaatagcatcagtttgtccaatagttttaaaggccataatcatcttttctggttaatatcttgagtaattttaaaatgttgacaccttaatcggtcccaggtatgagctataataaacttgtaaaattaagttgatgtgaaaaaaa

SEQ ID NO: 73074 - DNA, 1515 bp, Homo Sapiens
  misc_feature (83)..(83): n is a, c, g, or t
  misc_feature (85)..(85): n is a, c, g, or t
  misc_feature (107)..(107): n is a, c, g, or t
  misc_feature (132)..(132): n is a, c, g, or t
  misc_feature (185)..(186): n is a, c, g, or t
  misc_feature (244)..(245): n is a, c, g, or t
  misc_feature (259)..(260): n is a, c, g, or t
  misc_feature (269)..(270): n is a, c, g, or t
  misc_feature (273)..(273): n is a, c, g, or t
  misc_feature (349)..(349): n is a, c, g, or t
tgggacccccgccaccctgggagagctccacctggtcagttgctgtgattgcttgcttcatgggcctgtcctggagacgcctntntgttctcctgtagtatatcccnttgaaccacccttcctgtctgattntacttgcctccttctcttcttcctcttgcatggttgtgtgatagacagtgacnntgaggatggaactgctcagcctatctccggggcaatgctgagcttcaggatggctatnnatgtggggatagcnncagtgcaannggngaggagggcagctggggaacagagcggagaatgcccatggccctttattccctctgtccctcggtccacgaacagnggaagaggctgaggccatgctgggcagggtctggatgcccactttccatgcagcagcatttcattgctcaaaaccatccttcctttcctttcgcccttgtttcccacattcccttcgtcctgcccaagggcgggactgaagagctggaagaaagcagtcagtaccctcccaacggcccccctcgaaggtctccactctcctctgggctcctccttgcctaatgcagggggtcaccgctggagaagaaccaccactgtcctcgatgtgtcccaagcctggagcgaatccgtcctcttggctctcccagccctatcacaggaatcattcctgggtttctgtccctctgaggctcaccaggtgtagttggccttgttctttgggggtattagcccttctactttctttctcacccaccctgtaccctcttctgtgtgtctctgctatccccctttcctcccaccacccatgtgcatgagcaaatgtgcaacaaaaccctgggactttgcagtcaaatgaagctgagcttcccacatcccgttcttcggtttgccatgagacgatgtggggtttccactgtgtgtctgtcatcacctctttgtctttttttcctaaccctgatctcatacttgtatagagtaataacaacagttgtacttccaccaaaggcatgtggcatatttaccaatgtcatgtattctgaacaaaggcaaaaaatacaaattcctaccattaaactggcttggttgttgtttgggttggagtagctgtgggggcttggggaagggtgtcgtttctttctagtagtctcatgtcgctttaggtcagctgggctggcttacacgcgctgtgcggtcttcatggagatgggagctctgtgtgtcagcacaggaagtggtctcccagcgttcagcctgaagcagcccaagtcctgtaggtgctggctctttggtcttatcctccatctggacattctgccttcttcttgtcccctcacttcttcctgttctctgccttggtgcatgagcccaaggtgcacagtgaaggaaggcagaggcctctgcagagccaggcccagtgccccatgagctggtgccaccttcatgtatttttagctctgtgacttgacttagagtccttctgggagcacgtgactactctttctttct

SEQ ID NO: 73075 - DNA, 987 bp, Homo Sapiens
  misc_feature (33)..(33): n is a, c, g, or t
  misc_feature (74)..(75): n is a, c, g, or t
  misc_feature (107)..(107): n is a, c, g, or t
  misc_feature (164)..(164): n is a, c, g, or t
  misc_feature (253)..(253): n is a, c, g, or t
aactgcatgacccagggattgcgatcagtgatncagtgtgaacgaccatcctgagctctgtggggtctcactcnntgatgtgctctccatgcaccggcttgaacctnatcagttggagtgcgatgcagcacaaggcagggtcagttgtgtacagctgaccgcanggcaggggcagctgtgcggaaggcgctaccctggagcttgcacaactgggcatgcccagggatgcctccctcaccctgcccgccctcantatacaggacgaggggacctacatttgccagatcaccacctctctgtaccgagctcagcagatcatccagctcaacatccaagcttcccctaaagtacgactgagcttggcaaacgaagctctgctgcccaccctcatttgcgacattgctggctattaccctctggatgtggtggtgacgtggacccgagaggagctgggtggatccccagcccaagtctctggtgcctccttctccagcctcaggcaaagcgtggcaggcacctacagcatctcctcctctctcaccgcagaacctggctctgcaggtgccacttacacctgccaggtcacacacatctctctggaggagccccttggggccagcacccaggttgtcccaccagagcggagaacagccttgggagtcatctttgccagcagtctcttccttcttgcactgatgttcctggggcttcagagacggcaagcacctacaggacttgggctgcttcaggctgaacgctgggagaccacttcctgtgctgacacacagagctcccatctccatgaagaccgcacagcgcgtgtaagccagcccagctgacctaaagcgacatgagactactagaaagaaacgacacccttccccaagcccccacagctactccaacccaaacaacaaccaagccagtttaatggtaggaatttgtattttttgcctttgttcagaatacatgacattggtaaatatg

SEQ ID NO: 73076 - DNA, 1125 bp, Homo Sapiens
  misc_feature (980)..(980): n is a, c, g, or t
aaagaaatgtcggcagcagagggaacagggaagaaacctaaaggctgcaggctgccaggtgtgcttggagagcccccttcttccgccgggcctcgcaagcagcgtaggactgtggagaagggcggtgggcaaggagggaactcgagagcagcctccatgggcacacaggagggctggtgcctgctgctctgcctggctctatctggagcagcagaaaccaagccccacccagcagaggggcagtggcgggcagtggacgtggtcctagactgcttcctggcgaaggacggtgcgcaccgtggagctctcgccagcagtgaggacagggcaagggcctcccttgtgctgaagcaggtgccagtgctggacgatggctccctggaggacttcaccgatttccaagggggcacactggcccaagatgacccacctattatctttgaggcctcagtggacctggtccagattccccaggccgaggccttgctccatgctgactgcagtgggaaggaggtgacctgtgagatctcccgctactttctccagatgacagagaccactgttaagacagcagcttggttcatggccaacgtgcaggtctctggacgggggacctagcatctccttggtgatgaagactcccagggtcgccaagaatgaggcgctctggcacccgacgctgaacttgccactgagcccccaggggactgtgcgaactgcagtggagttccaggtgatgacacagacccaatccctgagcttcctgctggggtcctcagcctccttggactgtggcttctccatggcaccgggcttggacctcatcagtgtggagttggcgactgcaggcacaagggcaggggtcaagtgggtgtacagctggaccgcagggcaggggcaggctgtgccggaagggcgctaccctggaagcctgcacaactgggcatggcaagggaatgcctccctacaccctgcccggnctcactataacaggacgaggggacctacatttggcagatcaccacctctctggtacgaactccacagatcatccaggtcaacatccaaggttccccctaaaaaacaaactgaaactttggcaaaacaaaactctggttggccacc

SEQ ID NO: 73077 - DNA, 937 bp, Homo Sapiens
gcagctagaccgcggggtagtcggcgcgaggcggagcttggcagttccgtccacttcagccgcagcgtccctcgccgggtgtctcgccgcagcctccggagaggaacagaccctcactctctctgtcagaaaaatgtctgctccagctcagccacctgctgaagggacagaagggactgccccaggtgggggtccccctggccctcctcctaacatgaccagtaacagacgactacagcaaacccaggcacaagtggaggaggtggtggacatcatacgtgtgaacgtggacaaggtcctggagagggaccagaagctgtcagagctggatgaccgagctgatgccttgcaggcaggagcatcacaatttgagagcagtgctgcaaagctaaagaggaagtattggtggaaaaactgcaagatgatgatcatgctgggagccatctgtgccatcatcgtggtagttattgtaaggcgggactgaagagctggaagaaagcagtcagtaccctcccaacggcccccctcgaaggtctccactctcctctgggctcctccttgcctaatgcagggggtcaccgctggagaagaaccaccactgtcctcgatgtgtcccaagcctggagcgaatccgtcctcttggctctcccagccctatcacaggaatcattccctgggtttctgtccctctgaggctcaccaaggtgtagttggccttgttctttgggggtattagcccttctactttctttctcacccaccctgttaccctcttctgtgtgtctttgctatccccctttctcccaccacccatgtgcatgagcaaatgtgcaaaaaaacctgggactttgcagtcaaatgaagctgaggcttccacatcgcgttcttcggtttgcatgagacgatgtggggttccactgtgtgtcttgtcatcact

SEQ ID NO: 73078 - DNA, 1076 bp, Homo Sapiens
  misc_feature (731)..(731): n is a, c, g, or t
tcggctaggtacgaggcctgggtgttgaattcggcacgagggggaacgaaagatggcggcggaaacgctgctgtccagtttgttaggactgctgcttctgggactcctgttacccgcaagtctgaccggcggtgtcgggagcctgaacctggaggagctgagtgagatgcgttatgggatcgagatcctgccgttgcctgtcatgggagggcagagccaatcttcggacgtggtgattgtctcctctaagtacaaacagcgctatgagtgtcgcctgccagctggagctattcacttccagcgtgaaagggaggaggaaacacctgcttaccaagggcctgggatccctgagttgttgagcccaatgagagatgctccctgcttgctgaagacaaaggactggtggacatatgaattctgttatggacgccacatccagcaataccacatggaagattcagagatcaaaggtgaagtcctctatctcggctactaccaatcagccttcgactgggatgatgaaacagccaaggcctccaagcagcatcgtcttaaacgctaccacagccagacctatggcaatgggtccaagtgcgaccttaatgggaggccccgggaggccgaggttcggttcctctgtgacgagggtgcaggtatctctggggactacatcgatcgcgtggacgagcccttgtcctgctcttatgtgctgaccattcgcactcctcggntctggcccccagacggtccgtccggcccgaccaagtgctggacagaggcatctctgtgacccttccctaaaggctgagagtacatggccacggttcagagggaagcgagcaaagggatgggcataaatcaaacaagagtgaggacaaggcccagtggggggaacaagtctgggggccccaaatattgcgggggagacgacaagagagaaggacatgtgggagagaagcaagggctgcccacgggagcagcggccgaacacaccgcggagacagcgtcccacggagacagggtacagcggtatcaaggagaggaggaagaagcgggcgaccagagcgaagagaagg

SEQ ID NO: 73079 - DNA, 1152 bp, Homo Sapiens
  misc_feature (203)..(256): n is a, c, g, or t
gcacaatagagctaggtgcgaggccgggtgtgttaatcggcacgaggattcgaagccctgcgtgatttgattcgattcatagaggagctgaaaggtggaacaaaaaaggggaagccaaatataggccaagagcagcctgtggatgatgctgcagaagtccctcagagggaaccagagaaggaaaggggtgatccagaacggcnnnnnnnnnnnnnnnnnnnnnnnnnnnnnnnnnnnnnnnnnnnnnnnnnnnnnnatgaacggcagttactgggagaatttgagaaggaactggaagggatcctgcttccgtcagaccgagaccggctccgttcggaggtgaaggctggcatggagcgggaactggaaaacatcatccaggagacagagaaagagctggacccagatgggctgaagaaggagtcagagcgggatcgggcaatgctggctctcacatccactctcaacaaactcatcaaaagactggaggaaaaacagagtccagagctggtgaagaagcacaagaaaaagagggttgtccccaaaaagcctcccccatcaccccaacctacagaggaggatcctgagcacagagtccgggtccgggtcaccaagctccgtctcggaggccctaatcaggatctgactgtcctcgagatgaaacgggaaaacccacagctgaaacaaatcgaggggctggtgaaggagctgctggagagggagggactcacagctgcagggaaaattgagatcaaaattgtccgcccatgggctgaagggactgaagagggtgcacgttggctgactgatgaggacacgagaaacctcaaggagatcttcttcaatatcttggtgccgggagctgaagaggcccagaaggaacgccagcggcagaaagagctggagagcaattaccgccgggtgtggggctctccaggtggggagggcacaggggacctggacgatttgacttctgagaccacactaacttgaccctcacggaatcagaactctctggactggcttgctctcccactcccacctggaacctgagggcaacagcaagtgactgactgtgactctggcactcgtggtgtgggctggtgagctgtgcctgtgcacactgactacggctgtattgtccgaccctca

SEQ ID NO: 73080 - DNA, 1910 bp, Homo Sapiens
  misc_feature (1290)..(1352): n is a, c, g, or t
cggcagtaactctacggtgtttaggtagcgaggcctgggtggcgaattcggcacgaggaagatggcggcggaaacgctgctgtccagtttgttaggactgctgcttctgggactcctgttacccgcaagtctgaccggcggtgtcgggagcctgaacctggaggagctgagtgagatgcgttatgggatcgagatcctgccgttgcctgtcatgggagggcagagccaatcttcggacgtggtgattgtctcctctaagtacaaacagcgctatgagtgtcgcctgccagctggagctattcacttccagcgtgaaagggaggaggaaacacctgcttaccaagggcctgggatccctgagttgttgagcccaatgagagatgctccctgcttgctgaagacaaaggactggtggacatatgaattctgttatggacgccacatccagcaataccacatggaagattcagagatcaaaggtgaagtcctctatctcggctactaccaatcagccttcgactgggatgatgaaacagccaaggcctccaagcagcatcgtcttaaacgctaccacagccagacctatggcaatgggtccaagtgcgaccttaatgggaggccccgggaggccgaggttcggttcctctgtgacgagggtgcaggtatctctggggactacatcgatcgcgtggacgagcccttgtcctgctcttatgtgctgaccattcgcactcctcggctctgcccccaccctctcctccggcccccacccagtgctgcaccgcaggccatcctctgtcacccttccctacagcctgaggagtacatggcctacgttcagaggcaagccgactcaaagcagtatggagataaaatcatagaggagctgcaagatctaggcccccaagtgtggagtgagaccaagtctggggtggcaccccaaaagatggcaggtgcgagcccgaccaaggatgacagtaaggactcagatttctggaagatgcttaatgagccagaggaccaggccccaggaggggaggaggtgccggctgaggagcaggacccaagccctgaggcagcagattcagcttctggtgctcccaatgattttcagaacaacgtgcaggtcaaagtcattcgaagccctgcggatttgattcgattcatagaggagctgaaaggtggaacaaaaaaggggaagccaaatataggccaagagcagcctgtggatgatgctgcagaagtccctcagagggaaccagagaaggaaaggggtgatccagaacggannnnnnnnnnnnnnnnnnnnnnnnnnnnnnnnnnnnnnnnnnnnnnnnnnnnnnnnnnnnnnnttacgtgtgagaatttgagaaggaactggaagggatcctgcttccgtcagaccgagaccggctccgttcggagacagagaaagagctggacccagatgggctgaagaaggagtcacgagcgggatcgggcaatgctggctctcacatccactctcaacaaactcatcaaaagactggaggaaaaacagagtccagagctggtgaagaagccgagaacaagagggttgtcccaaaaagctccccatcagcgcaactacagggcagaattgagatcaaaattgttcgccatgggctgaagggactgaagagggtgcaccgttggcgtgactgatgaggacacgagaaacctcaagcagatcttcttcagaatctgcggccggagctgatagcccaaggaacgccgcggcgaaaagctgcgacaattacgccggttttggcctcaggtggaggccgggactgacgaatgactctggacaattcatgcgttaggaacagacctcgatggtgcccccactcacctgaactgagcagacgggatggcccccctggtgtgcatta

SEQ ID NO: 73081 - DNA, 1307 bp, Homo Sapiens
  misc_feature (1161)..(1165): n is a, c, g, or t
  misc_feature (1168)..(1168): n is a, c, g, or t
  misc_feature (1170)..(1172): n is a, c, g, or t
  misc_feature (1209)..(1217): n is a, c, g, or t
gcttccgtcagaccgagaccggctccgttcggaggtgaaggctggcatggagcgggaactggaaaacatctatccagtgagacagagaaagagctggacccagataggctgaagaaggagtcagagcgggatcgggcaatgctggctctcacatccactctcaacaaactcatcaaaagactggaggaaaaacagagtccagagctggtgaagaagcacaagaaaaagagggttgtccccaaaaagcctcccccatcaccccaacctacagggaaaattgagatcaaaattgtccgcccatgggctgaagggactgaagagggtgcacgttggctgactgatgaggacacgagaaacctcaaggagatcttcttcaatatcttggtgccgggagctgaagaggcccagaaggaacgccagcggcagaaagagctggagagcaattaccgccgggtgtggggctctccaggtggggagggcacaggggacctggacgaatttgacttctgagaccaacactacacttgacccttcacggaatccagactcttcctggactggcttgcctcctccccacctccccaccctggaacccctgagggccaaacagcagagtggagctgagctgtggacctctcgggcaactctgtgggtgtgggggccctgggtgaatgctgctgcccctgctggcagccaccttgagacctcaccgggcctgtgatatttgctctcctgaactctcactcaatcctcttcctctcctctgtggcttttcctgttattgtcccctaatgataggatattccctgctgcctacctggagattcagtaggatcttttgagtggaggtgggtagagagagcaaggagggcaggacacttagcaggcactgagcaagcaggcccccacctgcccttagtgatgtttggagtcgttttaccctcttctattgaattgccttgggatttccttctccctttccctgcccaccctgtcccctacaatttgtgcttctgagttgaggagccttcacctctgttgctgaggaaatggtagaatgctgcctatcacctccagcacaatcccagcgaaaaaggtgtgaagcacccaccatgttcttgaacaatcaggtttctaaataaacaactggaccatccaaannnnnaancnnnaccaacaatgtaaggacccggtacccccatagtgagnnnnnnnnnagtgagtccccctcacgaactccgcgcaccccccttgtgggaaccgccacagcccccgggagagagtttttaggcgcccccctcttgggc

SEQ ID NO: 73082 - DNA, 748 bp, Homo Sapiens
  misc_feature (646)..(663): n is a, c, g, or t
  misc_feature (694)..(694): n is a, c, g, or t
agatagaggacttcacctttgatctctgaatcttccatgtggtattgctggatgtggcgtccataccccacagagagagcaattccacatgggagtgaatgaaaagactcaaactgctgctacacaggcatctcgggggagaccctgactgcctcactgacgcttccactgtgagaaacacttttataacttctgtgtctccttttgaaattttaagacgatattaatatattttcagtcctaactacataagcaattcatgtttgttctaacaggctggttaacaccccaatcctactggcagagaaaaaaagtgacgccacagtggcacctggagtctcgcagccgcgcacttacgtatctcagcagggcttcctccccgagcgctctcaccaagcctttggtgtccatctgccccagcatgagcacgtagaggggccgcccatctgcagaggaggggaaggaatgagttgtcagcaccatcccagttgaaactgaggatacaactctaagacccctaacaggaatatgtgttcgcctgtgttctaggggcgcttaaaagtctttctgattcttagaagtggcaactgatttgtgtgatagggggtgtgtgtccaatatttaccccaaaaagctgtaagcgagnnnnnnnnnnnnnnnnnngaccgcgtatgcggccgcaagcttattcctnttagtgagggttaattttagcttggcactggcgtcgtttacaactgacgcgcct

SEQ ID NO: 73083 - DNA, 1120 bp, Homo Sapiens
  misc_feature (170)..(170): n is a, c, g, or t
  misc_feature (257)..(257): n is a, c, g, or t
  misc_feature (312)..(314): n is a, c, g, or t
  misc_feature (318)..(318): n is a, c, g, or t
  misc_feature (1027)..(1045): n is a, c, g, or t
gataatttgtttcagacccctgtaatcataaaaaatccttgctttatcttatttggggatcttcatctccttctccctatgttgttcttctcatttggtgaacaggcagacccaattggatttcgcaggttgagaccccgtcttactctaagaaggaccacaaagcatcngttttttcgttagattggcgggccaggggggagcatcacccttgttagaggttcccgctgtcttttgagcagtgctttgttcaagangtgtagaggggtcagattgtccattaattggtataaaaggagaaaacacgccacnnnttcntttctcccttgctgccattgttcattgagttttactgagggcagcctttgtggaagtcagggaggttgccaaaggcctgtagatgcctcctgacaaggtcttgattcctggttttctagcacccatttgcattttggtcttcagcacaaagccttgttccctgtggccggacttctgggcaataagactggggagtgactgttgagcagtctgctgtcaggagagatggctgaaaaggtgatcatcttggtgctaaacaagtaagaggcaactgccctgtttttgtttgttttgaggcacaatgaaactttagccaaactctgcaagagggtcccatctcctgccatggccaggtgtgagagaccaaaccgagaaaacagcatactctatcacttaagccttgggtagaatgggaattctttaccctgggtaaacgttttaacaaaaaaatggaacttaacttcggtttggactgtggtcgtgctgaggcaggagtggggttgccctcttggggctgaatctccaggcctcacgaggtcccctgtggggatgctgctatttctaagatgcaaattgcacatttcctagattttgtatctgtggatttggataagggaggggaacacggacaaattgcttgtacaatttgaaatgggcctcaatggtacttcaaaccttttgattattcctaaataaaaacataaatatnnnnnnnnnnnnnnnnnnncctgagcaggcggccgcaagctttgtccctttagagagggttaattttagcttggcactggccgtctttaaaacc

SEQ ID NO: 73084 - DNA, 836 bp, Homo Sapiens
  misc_feature (203)..(203): n is a, c, g, or t
  misc_feature (231)..(308): n is a, c, g, or t
caattctctggatcctgacttgaacgatacgcttgatatgtacgtccgcacgacgacgaccaggatcatgacgagagcgagacgccatacgcaacgctctcccggcgtgccgatcatatgcactgcagacagttcccgactggagcggcatgagcgcacgcaatattgagtagtcatcatagcaccccagcttacacttatgntccgctcgtatgtgtgtgaatgtgagcnnnnnnnnnnnnnnnnnnnnnnnnnnnnnnnnnnnnnnnnnnnnnnnnnnnnnnnnnnnnnnnnnnnnnnnnnnnnnnaagaattcggaacgaggcgaaaacaaaaaagaaacagatgaagtttccaacactaaatcatcttcccaaatacctgcccaaccatcagtagcaaaagttccctatgggaaaggaccttcatttaatcaggaacgtggaacatcttcacatctgccaccacctccaaagttgcttgcacagcagcatccacctccagatcgacaggcagtacctggaagaccaggcccctttccctccaagcagcaagtagctgatgaagatgaaatatggaagcaaagacgaagacaacaatcagaaatttctgcagcagtagaacgtgctcgtaaacggcgtgaagaggaagagcgaagaatggaagaacaaaggaaggcagcttgtgcggagaaactgaaacgattggatgagaagcttggcatcctggaaaaacaaccatctccagaggaaattagggaaagggagcgagaaaaagaacgggagcgtgagaaagaacttgaaaaagaacaagaacaggagcgagagaaggagagg

SEQ ID NO: 73085 - DNA, 312 bp, Homo Sapiens
gcggccgcctactactactactatacggctgcgagaagacgacagaaggggaagagcgaagaatggaagaacaaaggaaggcagcttgtgcggagaaactgaaacgattggatgagaagcttggcatcctggaaaaacaaccatctccagaggaaattagggaaagggagcgagaaaaagaacgggagcgtgagaaagaacttgaaaaagaacaagaacaggagcgagagaaggagagggaaaaagacagagagagacagcaggaaaaggagaaagagctggagaaggagcaggaaaaacaaagagaaatgg

SEQ ID NO: 73086 - DNA, 582 bp, Homo Sapiens
gtaaaggcaaaaccttgacacgtgttggtagctgagacctcatcttcctgagggctctgtcttgcctgcagggtcatagctcagactcttcccccaccccctctcttttccattgaacaaacatttattgaacatcctctgagcacctggccgtgggaatgccgtggtgaatgagagactagacgtgatgcctctgggggttgtgcgttggggatgcatgcgacagcccatgacccgaggcattctcagggtatctgtgctgtgtgcccgtgagaacatcttcccatgaccactcctgccctcctgccccgtgctggatcttccctccccagctgggatctgctcccaggcaactgtgtgaattttacattatttggagcctcatctgtgtcaggctataacattctatcctcatctgtaaaacttccccgtccattattccttgcactataacaactgtcaacacaccaactattaggaagttagtattttgctattgatcactgaataaacatcagagtattttaaaaaacagttctctagaaagaactgttataattaaaatgagtctgaaagatgaaa

SEQ ID NO: 73087 - DNA, 1320 bp, Homo Sapiens
  misc_feature (1224)..(1224): n is a, c, g, or t
cagtcgacggtaccggacatatgcccgggaattcggccattacggccggggggggctctgcgctcgtccggccggccccggcctcgccgccccgcgcagtacccagcccggccccgctcgacccgctctctactgccggctccgcgcccttccccgagggctggatgatgggctgtttcgccctgcaaacggtggacaccgagctgaccgcggactcggtggagtggtgcccgctgcaaggctgcaggcacctgctggcgtgcgggacctaccagctgcggcggccggaggaccggcctgccggcccccagaacaaggtgtcacatcccggtggctggacatgccctcttgggcttggcagatgccagtggatccatacaactgctccgcctggtggaatctgagaagagccacgtgctggagccattgtccagccttgccctggaggagcagtgtctggctttgtccctagattggtccactgggaaaactggaagggccggggaccagcccttgaagatcatcagcagtgactccacagggcagctccacctcctgatggtgaatgagacgaggcccaggctgcagaaagtggcctcatggcaggcacatcaattcgaggcctggattgctgctttcaattactggcatccagaaattgtgtattcagggggcgacgatggccttctgaggggctgggacaccaaggtacccggcaaatttctcttcaccagaaaaagacacaccatgggtgtgtgcagcatccagagaagccctcatcgggagcacatcctggccacggggaagctatgatgaacacatcctactgtgggacacacgaaacatgaagcagccgttggcagatacgcctgtgcagggtggggtatggagaatcaagcgggccccctcgtggtcctttcctagcaacctaggaaccaagacggcagacctgaagggggcaagcgagttgcccaaccccctgtcatgaatgcagaaaggataacgatggggagggccatgccagaccccagagcggaatgaagccactcacagagggcatgaggaacaatggcacctggctgcaggctacaccagccaccacacgtgactgtggcgtgaacccagaagaaaccgactcgcccttcaacctcctgggcccccggctccttctaatgacatgcgcctccacctcctggggactgggcaagggtacctcagccttgnaaatcaaggaagcctcctttcctccccagggaacaccacaggaagggaaaacctcgccaagtgtaacgcgccccgcggaaaccaccctccaattaa

SEQ ID NO: 73088 - DNA, 1094 bp, Homo Sapiens
  misc_feature (1019)..(1022): n is a, c, g, or t
  misc_feature (1024)..(1025): n is a, c, g, or t
  misc_feature (1027)..(1029): n is a, c, g, or t
  misc_feature (1034)..(1035): n is a, c, g, or t
  misc_feature (1038)..(1038): n is a, c, g, or t
tatcagctcggtacccttccaccagcaagacacaccatgggtgtgtgcagcatccagagcagccctcatcgggagcacatcctggccacgggaagctatgatgaacacatcctactgtgggacacacgaaacatgaagcagccgttggcagatacgcctgtgcagggtggggtatggagaatcaagtggcaccctttccaccaccacctgctcctggccgcctgcatgcacagtggctttaagatcctcaactgccaaaaggcaatggaggagaggcaggaggcgacggtcctgacatctcacacattgcccgactcgctggtgtatggagccgactggtcctggctgctcttccgttctctgcagcgggccccctcgtggtcctttcctagcaacctaggaaccaagacggcagacctgaagggtgcaagcgagttgccaacaccctgtcatgaatgcagagaggataacgatggggagggccatgccagaccccagagtggaatgaagccactcacagagggcatgaggaagaatggcacctggctgcaggctacagcagccaccacacgtgactgtggcgtgaacccagaagaagcagactcagccttcagcctcctggccacctgctccttctatgaccatgcgctccacctctgggagtgggaggggaactgagcttgaaatcatgaagccccttcccacaaggaaaccaggagggagactgcgagtgagtgcccgggaccacctcatcagagatgcttactgcagccctgcaggtgcctgtgcactgatggaatccacagtgtagtcagaaaagctgttgacttctcttaaatcagcttccctgctgggcccctgaaagtggactgggtgattctgtctggcagagagtggggaaaagacgcggtttccagcttgcagatttgttaagtttctcaggcagattttgactttcagcctttcatacttgtttaagcaactatttgtattaaatgaaagttttttggcaaaaaaannnnannannnaaaannaanaaaaacatgttcgggccgccctcgggcccttccaagaagacttttctaagaccatt

SEQ ID NO: 73089 - DNA, 258 bp, Homo Sapiens
cctgtagcatgtgatgcctgattaaactcattttcatttgcttttatttctaatatgggaacaatgagagtgaactctaaatataggttgtagtaataaaacatcattagcctaattattagaaaatgctaattaagtaccagcacatagaaacatgaaattgcttagtcattgtacctttgtcagcaattttgacagtcattaatgtttgtcataattttaaataaagtgtctgggtttcagaaaaaaatataaaaa

SEQ ID NO: 73090 - DNA, 739 bp, Homo Sapiens
agaagctgtttaacttatcccccctgatcagcaggatatctgtgtgttcagtgacatcatacattctgtatctagaagtctaaaatttctgcctttctcctaaagaatgtgttcttgcattttggttgaaataacctacacagtgttaaaaatcagatacctcctttagtgaccagttcaaattttaatagcgataggtagcccctgagaaatttatcactataactccacaggaaatatgacttggaagtgctctgtgtactaaacaaaataaagcccctctttgcatttaaaaccaaagtcaaaacaaaactcttgtaatgcaattaattaactttatgtcttcccatgactcaagttttgttaaatatgcccaaaaactttgattggcagtttcttcggttaattattcctatagaatgtattttaagaaatctatacaaattggatatatgcttggtaattctccagtttctaggaggtacctatttctaccgtttcaagtgatgaagtgaaaataatttacattcgatagtgttactgataacaaacctacttaagagatatgttgctttttacttaagggatagtgttgatagataaattagaatgtatagataggtttgtgaaagtctaaataatggttgtatagatatgtatatatggttcacatatctggatctgtgtatttgattttgtactttaaatgtgacaaataaaccttttgggagaaaaaaaa

SEQ ID NO: 73091 - DNA, 775 bp, Homo Sapiens
  misc_feature (29)..(29): n is a, c, g, or t
  misc_feature (80)..(114): n is a, c, g, or t
gaaaactttgatctctatggcgctgccgncttcgcctgaacgacgagcgcagcgagtagtgattgcgaggaagcggccgnnnnnnnnnnnnnnnnnnnnnnnnnnnnnnnnnnncagtcgacggtaccggacatatgcccgggaattcggccattacggccggggtcttgtgttctcgcgagaggcgggaaagggcgcagggtttgaaacatggcggacgacgtagaccagcaacaaactaccaacactgtagaggagcccctggatcttatcaggctcagcctagatgagcgaatttatgtgaaaatgagaaatgaccgagagcttcgaggcagattacatgcttatgatcaacatttaaatatgatcttgggagatgtggaagaaactgtgactactatagaaattgatgaagaaacatatgaagagatatataaatcaacgaaacggaatattccaatgctctttgtccggggagatggcgttgtcctggttgcccctccactgagagttggctgaaacaaagaatttgtcctgtatggaaaacgggagactttgtacagtggcctctctaaaagtacaaaacattcataagagaaacctgcatacattttgatattaagaaataattccggggattcttccactcctgaaatgagttgatttgcagataactcacaacttcttaagctaaatggtattttcatttttctcaagctctccaataaatatgaccattcagttgcaaattcaagggggatcctcatagagtcag

SEQ ID NO: 73092 - DNA, 1315 bp, Homo Sapiens
gggctaggtgcgaggccgggtgtcgaatcggcacgagggccggtcggtcttgtgggctgaggggcagcggcttaggctccggcgtctgcaggggtcgccgagctaacccgtggctaggcgagtggggcggggcggccggcaccatgtcgaggcaggcgaaccgtggcaccgagagcaagaaaatgagctctgagctcttcaccctgacctatggtgccctggtcacccagctatgtaaggactatgaaaatgatgaagatgtgaataaacagctggacaaaatgggctttaacattggagtccggctgattgaagatttcttggctcggtcaaatgttgggaggtgccatgactttcgggaaactgcggatgtcattgccaaggtggcgttcaagatgtacttgggcatcactccaagcattactaattggagcccagctggtgatgaattctccctcattttggaaaataaccccttggtggactttgtggaacttcctgataaccactcatcccttatttattccaatctcttgtgtggggtgttgcggggagctttggagatggtccagatggctgtggaggccaagtttgtccaggacaccctgaaaggagacggtgtgacagaaatccggatgagattcatcaggcggattgaggacaatcttccagctggagaggaataaccatccctacaactcgaggatagccatcaggagcactgttggaatcagcaggcctctgtgctccctctgccctccagaactcagtgactcttgaacatggatgttatatattcttataacctgtttccattctccattcaaataaagagcagactgcgatatagtccatttaccccatgtgtgcacattcaggagcgacagtctctgcccccattcccttgagaggggctggatgtaatcacctttggttggactagaaagagctcaaaccattttacattcctgtttgaatttttccaaagcaaaactcactttgaccccattaagaggcaagcctggcacatctatccctgggcctttagaaagccatttgcctcaaatggctatagggttgtggggtggagggaggaagggctgggagggagtggggaggaattgctagctgtagtgtgacacattgtagtgtttgccaggaaaggagccagtcatgccggaaacactgacttctgggaagccacccaggtctcattcctccctgctgttggaggcaacatctcctctttttacagagggtacatccttttttcttacaaattcttcaataaagacacattcttgagtgaaatccc

SEQ ID NO: 73093 - DNA, 910 bp, Homo Sapiens
  misc_feature (178)..(194): n is a, c, g, or t
ttttcagacaaggtaccattttattccttataaaatatatttcatattgttgctgtaaaaacattacatttcacatttttaaaaaattttttaacagtaaaaataatacttggaagacagctgaggaaaaaggcgccaataagacaaactcacagatgggatttatctccctcttgcnnnnnnnnnnnnnnnnngcccctggtaaaagtcagaacctgggatgaccagaaagtaacaggacagatttctcccagcaaatcagtctccacaaccaaatgaatattgttctccaaggagtcaagctatagactcacaatgacaacgtggccatggctcaaaacactctctgaaattacaaaattgctttctgagccaatttaaaagtcacatgattgaatccaagctattttactttaaatggtccttttgctttgcacctgagacctcgcttggccacagacgtcattcgctggactccctgggcactaaatgagtgtctagcatccttaaggctgctcaacacacagccccagactctgaatatgattccaagaaatattctgaaaaaagtcacatcgctggaataaacagtttcccaagataactgctttgaaaaccagtcccgttagtttctaaaagcccacctacggcaccttccttccatcagagtctgctgcccgggtgggctgggaaggagggagatacaaagaagaaagtaggcatgatcactgggtcggttcccaagccaccctcaccctccaagaaggcatgaatggaacaaccccgagaacagagcacgtgtgaagaaccaacacgacaggcacgggatggcagcacgggtggaagggaggcaaggaggccgccagtgccaaggaggagagggggcacaagcgcaggcagggaaggtggc

SEQ ID NO: 73094 - DNA, 1031 bp, Homo Sapiens
  misc_feature (138)..(139): n is a, c, g, or t
  misc_feature (153)..(153): n is a, c, g, or t
  misc_feature (167)..(167): n is a, c, g, or t
tcgcagagggaacctaagcagcacagctcagagtccagcacttcagcgtgcagaagagacgtaactgctgagactgggagagcaggacgagtcacagtcatcaaagctggagagaaagatcttcctcatatcagtgtnnagaaatgaaaaagnagatccaagtcatnaaagacgcagatgagagaaagcttccttgcagaaatccatcagtataactagtgcttactcacagaaaaggatgccgagctggagaaactgagaaatgaggtcacagtgctcaggggagaaaacgcctctgccaagtccttgcattcagttgttcagactctagagtctgataaggtgaagctcgagctcaaggtaaagaacttggagcttcaactcaaagaaaacaagaggcagctcagcagctcctcaggtaatacagacactcaggcagacgaggatgaaagagcccaggagagtcagattgatttcctaaattcagtaatagtggaccttcaaaggaagaatcaagacctcaagatgaaggtggagatgatgtcagaagcagccctgaatgggaacggggatgacctaaacaattatgacagtgatgatcaggagaaacagtccaagaagaaacctcgcctcttctgtgacatttgtgactgctttgatctccacgacacagaggattgtcctacccaggcacagatgtcagaggaccctccccattccacacaccatggcagtcggggtgaggaacgcccatactgtgaaatctgtgagatgtttggacactgggccaccaactgcaatgacgacgaaaccttctgatgaagcctccagtggagaactgggcttgctcagacgcactcgcattgacacaacgtaacaccagcattgtgtgtgcagacttcaggagaactcatgttattttttaaccccgtcaacaaatctaggaaaatattttgatcttcaacaaattgccctttagtctccccgtatgagttagaataataaatatttagtaggtgagtttcccctcg

SEQ ID NO: 73095 - DNA, 447 bp, Homo Sapiens
aattactctgtaccccatccgaatcagggcttctaccactgctgatgcaaaaccacaaagggacctacctgagccaccgtcctagccaagcgagcaaacctgcagggggtttggaagtggacttggtcaccgcagaagcgtgtgcgccgttgggggaagagctgcgtcacagccagagggacaaagtgtgggtgatcctggagacgccagtttccgagattgttctgcatattcatttgcacattgttgtctgggttggacatgcgtgtgggcttcagtgtgaggcttttaatatgtatatcctgttatcaataaaacaattatccaagtggttgaatcctgtgagacttggcaagtgtgtgcaaatcaagtatacttgacttttcaacctcttctttcaatgtaacttttatatgaaataaagtaatcaattaacagttctcaaaa

SEQ ID NO: 73096 - DNA, 1028 bp, Homo Sapiens
aactcatgaaaaacccagactggagactggagggttacactgtgtgatttattagtcagccccttcaaagatgatatgtggaggaattaaatataaaggaattggaggtttttgctaaagaaattaataggaccaaacaatttggacatgtcattctgtagactagaatttcttaaaagggtgttactgagttataagctcactaggctgtaaaaacaaaacaatgtagagttttatttattgaacaatgtagtcacttgaaggttttgtgtatatcttatgtggattaccaatttaaaaatatatgtagttctgtgtcaaaaaacttcttcactgaagttatactgaacaaaattttacctgtttttggtcatttataaagtacttcaagatgttgcagtatttcacagttattattatttaaaattacttcaactttgtgtttttaaatgttttgacgatttcaatacaagataaaaaggatagtgaatcattctttacatgcaaacattttccagttacttaactgatcagtttattattgatacatcactccattaatgtaaagtcataggtcattattgcatatcagtaatctcttggactttgttaaatattttactgtggtaatatagagaagaattaaagcaagaaaatctgaagtattgtcttgtttttaaaaaatacagttcctagtgtttttagaagtcacttaatttgtctcatttttccacctggaaattaggaataatgtagaatgcaaggcagtaatttccttttggaaaggactctgaaggcagaaaagaagggagagaacctcatgggcagaatattataaaaagagtgtcatattccagcatttgaattggaaagagaagagtgaagatccaagttgcattattaatctgccctgtgttttttccttttaacaatcagtttgagctgctgctgttatgagtttctcatcaagatgaaagccctaatatgtaaagtcaaatccgatttaaattttgtgcttttatagaaag

SEQ ID NO: 73097 - DNA, 815 bp, Homo Sapiens
gctgaattataagtttattttttatcaataaatatttttatacttacattgagtgatgtgtttaacaacaaattgtgacagagctgagtgctcctatcttacagggtcaatgaactacttattaagccttactggtagcactgaatttagcagttctgagaacatgtgaaactatgttaaaactgaaggcactatatatttttacataaaagcttgaacatacagatgaattataacctatgtgaagaaatcttagatataaaactaacttttcaaagatacaaaagaaattaaacaggtttcctgaaattttagttcttggtctgttcacctctgtggggaaaattcttagttccagtgataactgttctagttactacttttaagtatgtaaatactagaaaggtagtactagtgacatcatcacgtgtattgttatctatggggcaaatgtgtggtgcccagaataaaatatacctcatgcctagggtagggacatcctttccagctcaaacgtgggtagggatgtgggagaataagaatgtgggagaaccaagagaaaaagtggggctgggagagtggagttcccgtagggcataggcctgtgaagtaacactggggcagatatgtatgttatatacaactatttttttaaaaaacttatatccatgttgggagtagatgggtatataacagtttggaaatactatctttggagaatgtatttttgtatttataaatcaacttttaaaaactgtctcattcaaaagggaataattcatatgtacccttaggaaataaagacctgtgttatc

SEQ ID NO: 73098 - DNA, 647 bp, Homo Sapiens
aaaccttacggctaggtacgaggctgggtgtcgaattcggcacgaggaggagtgtgaaaagaatcgaagaagggagtgctgacctgagaaaacgaatgtcccggttagaagaagaactggaccaggaaaagaaaaaatacatcatgctggaaataaagctgcggaactctgaacgggcgcgggaggatgcggagaggaggaaccagctgttgcagagggaaatggaggagtttttttcgaccctaggaagcttgactgttggggcaaaaggtgccagggccccaaagtaaaaggaatggcagagctcacttctgtaccacatctgctggtctccagccttgtatggagttagaagcgtctgtatctctggagcagccaggcactctggagccagctggagagagagagatcctgatacctctgtggggactgtggggacttttgggaccccacacactccaggtgggatcagatgctgctccaaccatgcagttcctggtgagggtcagaaggggacggtaccaagagtagcgcttagcccttacccaggaaatatccttcatggccacagaaatggagggcgcccaggatccaggcagccaccgggaacagtcagctttctttattaaatgtgctcacaaagcagg

SEQ ID NO: 73099 - DNA, 1821 bp, Homo Sapiens
cggcagtaactctaacggtgttaaggtagcgaggcctgggtggcgaattcggcacgagggaggacatgaacagagaagtggtgaagactgactctgctgccacaaggattcctgagctagattttgaaattcctgcctttagccagaaaggagctctgaccactgttgaaggattgatcacccgtgctatctctggcctggagcaggaccagcctgcacgaagggcaaacaaagatgctacagctgaaagaattgatgagttcattgtcaaactgaaggagctaaagcaagtagcctcccctttcactctgatcattgatgatccctcagggaacagttttgtggaaaacccacatgctcctcagaaagatgatgccctggtgatcacacactacaaccggacccgacagcaggaagagatgctggggcttcaagaagaagcaccagcagagaagccagaagaggaagatctcagaaatgaagtgctccagttcagcacaaactgcccagaatgcaatgcccccgctcagaccaacatgaagctagtacaaatccctcactttaaggaggttatcatcatggctaccaactgcgagaactgtgggcatcggaccaatgaggtgaaatctggaggagcagtagaacccttgggcaccaggatcaccctccacatcacagatgcctcagatatgaccagagacctcctcaagtctgagacttgcagtgtggaaatcccagagctagaatttgaactgggaatggcagtcctcgggggcaagttcaccacactggaagggctgctgaaagacatccgggaactggtgaccaaaaatcctttcacactgggcgacagttccaatcctggacagacggagagactacaggagtttagccagaagatggaccagatcatcgaaggtaacatgaaggcccactttattatggatgatccagcaggaaacagttacttgcagaatgtgtatgcgcctgaagatgatcctgagatgaaggtggagcgttacaagcgcacctttgaccaaaatgaggagctagggctcaatgacatgaagacagagggctatgaggcaggcctggctccgcaacggtagcagtgggtggctcaagggccagcctccagcgctgctctttctgtaggttatttattagtattggatgaaggcgaaggctgggagtgtctttcccaccagcccttgcccatggtggggaggacatctggtctgagtcagagatctgtgcacactttctaaacagcttgtgatgcaagtgtgagcctattgtgttacttgaccttattttggaagttttgaattggcctaggaggaaacccagaaatgaaccaggggtatgtcatcacttttttcatatcaagtcctcaccctccttccacataatgctctatcctctaaggttggaactctgaagttggagaaggtggaataaagttacacctggagtttgttgttggttttgagtatataaaatactgactttgaacaggaaaggagtctcctgaggggagaccgagtccagcacaagtgaaggagttaccattgaaatgatgactttcaaacagcactggcctctgtattgaccctatccttgtttgatatcatgctgttagaattcagcctcctaaagaaaattttcccgtgtatctactgtaatttggggattgcagctggcatttaattcattccttcagcagatgcttgcttatctactttatgccaagcacaccacagaacagaggacaaaataaatctctttcatggaacttgaagtctagtggggaaaaatgac

SEQ ID NO: 73100 - DNA, 1344 bp, Homo Sapiens
gcatgtgactatagaacagttgtaaaaaaagcaggctggtacggtcggaatcccgggatatcgtcgacccacgcgttcggtctgaattgcgcgtggtggccatggcggcagcggggctgtggaaccaggcccccgggggctgccgtcgccccgtcgcccgccccggccccgccgctgcccctgatcacctgttccggcccatcagcgccgaggacgaggagcagcagcccaccgagatcgagtcgctatgcatgaactgttactgcaatggcatgacgcgcctcctgctcaccaagattcccttcttcagagaaataatagtgagctccttttcctgcgagcactgtggctggaacaacacggagatccagtcggcaggcaggatccaggaccagggagtgcgctacactttgtctgtcagggctctggaggacatgaacagagaagtggtgaagactgactctgctgccacaaggattcctgagctagattttgaaattcctgcctttagccagaaaggagctctgaccactgttgaaggattgatcacccgtgctatctctggcctggagcaggaccagcctgcacgaagggcaaacaaagatgctacagctgaaagaattgatgagttcattgtcaaactgaaggagctaaagcaagtagcctcccctttcactctgatcattgatgatccctcagggaacaggtttgtggaaaaaccacatgctcctcagaaagatgatgccctggtgatcacacactacaaccggacccgaacacgcggaagagatgctgggggcttccacgaagaagccaccagcacgagaagcccgcacgacggaagatctcagacattgaagtgtacagttacagacaatactgcccagaatggcacttggcccccggtcaagaacacctgtaagtagtgtcaaatccctcaacttttaaggagggtacaccatcacattggctacgaactgtagtaatactgttgggaatgagacacagtggcacggtgaaataactggtagagataacatgtaggacaccacttgtgggtacacgggtatacccacctcatacgatatagaagttcccaccacgatattaacccaaacacacataacgatgacaaactgcaggtgcagaacccccagtccaacttactcactgtactgtacaccctcggaatcacacacaacggacggtagcaaaatacatgcagagatcaaaatcaactcgagtgcaaccactagtcgagcccatatagatatcccaacacgaccaacgaccaagcgtaatcttacgaacaaataacctgtgattacaaccaccgtcagagtt

SEQ ID NO: 73101 - DNA, 1513 bp, Homo Sapiens
  misc_feature (53)..(53): n is a, c, g, or t
aggcactgcttcggatgaaccgcaggatggttggtcctgatgttattcccctnccacacatctacggagctcgaatcaaaggtgtggaagtgttctgtcctctggatctcccgccgccatatgaagctgtgggatcttcattccaaatgtcagaaggatcagaagctgctgtgatcccattggatctgggctgcacacaagtgactcaagatggggacattcctaacatacctgccgaagaaaatgcatccacctcaactcccagttcaaccctggtgcgtcctatcagaagccggagagccctcccacccttgaggaccaggtcgaagagtgaccctgtgctccatccttctgaggagagagctgccccagtgctcagctgtgaagctgcaacacagactgaaaggagactggatctggctgcagtgactctgaggagaggcttgagatctagagcttcgcgatgcagaccgcggtctttgatagattacaaatcctacatggacaccaagctgctggtggcgaggttcctggagcagtcctcttgtaccatgaccccagacatccatgaacttgtagaaaacattaaatctgttttgaaatctgatgaggagcacatggaggaagccatcacaagtgccagttttctagaacagataatggccccattgcagcccagcacatccagggcccacaagctgccctcgcggagacagcctggcctgctgcacctccagagctgcggcgaccttcacaccttcacaccagcggggaggccccgagccgagaggaggccccggcgagtggaggctgagcggccacacagcctcattggggtcatccgagagactgtcctgtgaaccctggaagacagaaggccactccaaggggaaggatccctctcctctctgccatttcttggctgggagctgtggtccacctcaaaacaacaggagcactctggaggacacgttttcccacctgttggctcccgtgtctgctgactgagggcattcaggagtaaatgcacaggtcggtccaggcccgtctgggtttgggatgcactgagttggaggttatgaaagctttgatcctcttcttcctctgctgggcctcgcagcattcacaagggtcacatgccctggcatgggcagaaactgggctaatgattctttgcccacttcacccctcgtgtctctctttgttgctaagttctttccctcttggaaggacagatctgccgggctgctatttatagttgcctttggcctttcactgctctgcgatttggcaggaaataaggcgattaaccctatgtgtccacaagcctcaagccttgtttcaggtcaccctcaaatcacactctctttaggcaaaacaggaaacttcttaagtgacaaattttaatgccagacatttaaggagaggattattgttgattccatttactcatgcttgcaaaactagagacccctaaggcagaactgagaataaacatgtttactttgaaaaa

SEQ ID NO: 73102 - DNA, 1009 bp, Homo Sapiens
  misc_feature (342)..(362): n is a, c, g, or t
  misc_feature (380)..(808): n is a, c, g, or t
  misc_feature (855)..(855): n is a, c, g, or t
  misc_feature (963)..(963): n is a, c, g, or t
gttgtcacttactcccttgtgattgaattttttctcctgcatccatggcaggatccccagccagtatagagacttggttggcatcttctgctgcagggactaaaagtatttgactggggcacatgtggctgttgtcattctttctgcatcccactgttcccctccaatttatgttattttctaccctgtttttcagttccatctctgctctgtcctatagctttataaaaccagagtgtgtggggctgaggtcaggagtataagtacctgccttaggcactattccttatataacaaaaatattaaatatttttttcctcagtaaaaggatgaaaattggtnnnnnnnnnnnnnnnnnnnnncctcgtgccgaattcttnnnnnnnnnnnnnnnnnnnnnnnnnnnnnnnnnnnnnnnnnnnnnnnnnnnnnnnnnnnnnnnnnnnnnnnnnnnnnnnnnnnnnnnnnnnnnnnnnnnnnnnnnnnnnnnnnnnnnnnnnnnnnnnnnnnnnnnnnnnnnnnnnnnnnnnnnnnnnnnnnnnnnnnnnnnnnnnnnnnnnnnnnnnnnnnnnnnnnnnnnnnnnnnnnnnnnnnnnnnnnnnnnnnnnnnnnnnnnnnnnnnnnnnnnnnnnnnnnnnnnnnnnnnnnnnnnnnnnnnnnnnnnnnnnnnnnnnnnnnnnnnnnnnnnnnnnnnnnnnnnnnnnnnnnnnnnnnnnnnnnnnnnnnnnnnnnnnnnnnnnnnnnnnnnnnnnnnnnnnnnnnnnnnnnnnnnnnnnnnnnnnnnnnnnnnnnnnnnnnnnnnnnnnnnggcggttgctggcgttttccatagcccgccccctgacgagcacacanatcgacctcaatcagaggtgggaaccgacaggactatagaacaagcgtcccctggagccctcgtggcctctgttcgacctgcgctacggaactgtcgcttctcctcgngagcgtggcttcccaactagctgtagaccattccgtgtagcgtccc

SEQ ID NO: 73103 - DNA, 1764 bp, Homo Sapiens
  misc_feature (60)..(60): n is a, c, g, or t
  misc_feature (669)..(684): n is a, c, g, or t
ttttcttgcgcccacaaggggggccgcccccaaagggtgggcgctgtgtattctcctcgncgcggcggggcgtcttctcccggggtttgtctcatctccagtcgtccccgggctttcggtggagaagcggggtgtcttttcccacattttctcgggggcgcaagaaaaataggcccttttatagatgtgataagtgctcaccgaccgccccggtttttccctcgcgggaagtgagaggttggccgccacggaggagccgcgaggggcgcgcgtcacaattcttcgggagattatcccgcagggggcttgggcggtttggggggcgacttccccctgggtgtgggcataatgaaatctcgccccggctgtaaagtcggggccgctttcaacggaaaacactttccccactatcctgggggagtttgttttgttttctcacaagaagaagcgagcgttatccggggttgtaatccccccgccacggggggagggttttttatattataatattggggggggagggaaatgcccccaagccgccccttgttttccttttgctccaggggattctcttttatggggaaacacggctaggggcccatgtgttcccgtttccctagtggggccccggcggggcccaaaggaaatggttctggaaagatttcttcnnnnnnnnnnnnnnnnccgacaagatatttctggttccgggccggcggggggcgcggcgatggggaagttgggaggtttcaggtcaaaggaattgctttaattgaggtcacaggcatcacaggggtctgctcagcttcctcgccaccagggagaaaagtccttcgttgttggccatggtggaagaataactttgcgagatcacctcaaaccattcgattgtgtagccagcctctttcacagcagcctctactgcctcccggcccagggggaggctggagaacttctgctcaccaatcatgtagtagctgctcttgagcgcatccatgatcaccaggaagccccctggcttcagtaggctgccgaggttcctgagcgccctgcagtaggtggggaggtctgggcaggcggcatccagacacagtgtgctgagcacgcagtcagccgggggtaaggggacggcccccagtggctggctctgagtcacatcacacttcagcacctgcttgaccgcctgtctcaacttctcctccttctctggacccttgactctgttcccttcaagatcacacacataggtcaccactggggaccagtcaaaggcctctggctctttcttcagccacttctccagctcctgcaggttctggtctgagtagtcagtgacgacgatctccttaaaggattcacaagcagagaggagctgatagatagtggggccagagccgatgtcaatcagcaggtctcccttcacaccgtctaggcagaatatcttgaaaagatttttcagaaggtgcttaagaatctggctttctgcagagtgcctagaaccaaacttgtaatatttttctaggtaatcccgagggttaaaatggcttagataggtgtccttggaggtgaagcctgattccattatgtctcacttctgtaccactggagcactgccctccttctctttcctccagaagccagggagtgaccctgcagaagttgtcttcctgagtctcaggctaacagcattccttccatcagttcagcccttcttttagaacagatggttggttaaacactaacagagaaatagaccacaaatgttct

SEQ ID NO: 73104 - DNA, 875 bp, Homo Sapiens
  misc_feature (423)..(465): n is a, c, g, or t
gttactgaacatgttccataatacaggagtgtgagcacactaacaggtaagtgcaggaaaacaagaagaaatattttcagagtatagtcaaaagtacactgagcatgggagaattgttttgacattttgctcaaaactatttctgaagaaaattcaacatttctttcacggaaagttttaggaacaggtaaatacaattatataaagtactggtagaatatgttcgttcagatgaccttgaagtgttttttcagacttatctgaacttgagatctgaactgaatttttattagaaactgttaaagcctctggcattgaaggttagttcataattggtgagttctgaatcacttcatttcctgcagtggttcctgagagaatcttagttcaaaggactgcccccgccaacccctgccccgcccnnnnnnnnnnnnnnnnnnnnnnnnnnnnnnnnnnnnnnnnnnncctaacactaaataactaataggagaaagttggcgtgtcaacataaatattcaactgaaaagcaaaaggctaagcctggcacctaaaacttgtttcaacactttcctctgctgtagattcgatgaaggagcagggagtggattgtgaaatttcctgccatttaccttgccccaggacatgtactgttctgtgggtatacatatttgtagcgtaacaacaattcacagttgaaatttcagatgtatgttaatcatagcctgatattaaacaacattcatgttagcagtaaatttagtcctctgtcccctcacacccttccccgccattgatttctggtaagccagttgactcattgcttctgttcttatcctgttttctctgtcgccaaaccccgtgccccgcctaaaaga

SEQ ID NO: 73105 - DNA, 650 bp, Homo Sapiens
gtatcagacatgtaccgagttcggcttctatgtcacctgtgagaatcccagatgtcctttctcccagctcccagcactgccctcccagctagacctatgtgagcaggtgtttgggctctcagccttgtcagtagcccaggctgtggctcagacgaactcctactacggtggccagacccctggggctaacaaagtgctgtttgttaatggggacacagacccctggcatgtgctaagtgtaacacaggctttaggatcctcagaatcaactcttcttatccgcactggctcccactgcttggacatggcacctgagaggccctcagactcccccagcctccgcctagggcgccagaacatcttccagtagctacagacctggctcaagctggcaaaggagagccagattaagagtgaagtctgaatctcataccctttccactccctgcatggtcacctcagtcctggacatacttgttcactgaacaaaagaaagcagcttgttttgaaagaagaaactcccaggaattggaattcagcacctgttccgcacgtaattggcatgtgtctgcaaacatccttattcccaacttaaagtgctttattgcagagagttatggaaatataagtggatgattattcctcattgt

SEQ ID NO: 73106 - DNA, 976 bp, Homo Sapiens
tgttaattcggcacgaggcggtccgcccacagtttggtatccgaagcctaatgagcaccgcgaatcggcgggtccctggagtgccgggcggcggtgtccagtcgccttcgctgaagtggagcggcggctgcgctcgggtggggcggctcaagcagcattgcggacggagctgagcgcttgcgggcccctgggccgcgctgaaaaccaggcggagctgttgggggcgctgcaggcactggtgggaggtgtagtgcagtatgatgggcagacgggagcgccgctaagcgtgcgacagctctgcggacttctcctcgggggcgggggcaaccgcagccactccacgccctactgcgggcttcgtcgggcggtgcagattgtcttgcacagcctgggccagaagtgtttaagcttttcccgagcagagacagtggcacagctgaggagcacagaacctcaactgtctggtgtgggtgaccggcagtggttgtatcagacatgtaccgagttcggcttctgggacacagacccctggcatgtgctaagtgtaacacaggctttaggatcctcagaatcaactcttcttatccgcactggctcccactgcttggacatggcacctgagaggccctcagactcccccagcctccgcctagggcgccagaacatcttccagcagctacagacctggctcaagctggcaaagggtgaagtctgaatctcataaccttttcagtccctgcatggtcacctccagttctggacatacttgttcactgaacaaagaaagcagtgttttgaaaggaagaaacttcccaggattggaattccgcactgggcggccgtaatggaggtgttggacttcttttccaattaaagtgctatggcgaggttggaaaaagggggaggaaatcccggaacatgggtttgacgaagtgcaccagtttatgggcccccgggggaaatggaaatggcccac

SEQ ID NO: 73107 - DNA, 690 bp, Homo Sapiens
tacggctaggtacgaggctgggtgttgaattcggcacgagggactggtggagctgccgcgctgtccgcgttatctcctcccggtgagaacgaaccgcagtgtccaccggcgaggagccagccctgtcccggtcagagaaagacgacgaggatacctgggagcgggcggcggccgggctgggccgcgccggtgcgggctggcgactctgctcctccgcttgctgctgtctctgggaactgggtgccagcgctgaggggcttccagcggacagggacccccttccccggctcccctgcccaccctgccggggagggcggaagatgccggtgaagaagaagagaaaatcccctggggtggcagcagcagtagcggaagacggaggcctcaaaaagtgtaaaatctccagctattgcagatcccaaccccctgctagactaataagtggagaggaacatttttcaagcaagaagtgcctggcttggttttatgaatatgcaggtcctgatgaagttgtagggccagaaggaatggaaaaattttgtgaagacattggtgttgaacctgaaaatgtgtgactgcacagaaaagttacaaaacaaatttgacttttgcgctcacagttgaatgatattcgtcatttaagaatattacagatatgcctttgatttgcacgggataacgatccgagaa

SEQ ID NO: 73108 - DNA, 1712 bp, Homo Sapiens
  misc_feature (155)..(169): n is a, c, g, or t
  misc_feature (330)..(331): n is a, c, g, or t
  misc_feature (462)..(478): n is a, c, g, or t
  misc_feature (1648)..(1648): n is a, c, g, or t
attgggtgggggaaaacgccaccccctgttgttttatatcccgcggggtttttcttgtggagagacacacgcgatgggccactggtgttttttttctttgtgggggggccccggccccccacaacgaaagggtgttaaaaaaaattttttttgtnnnnnnnnnnnnnnnccccccaaatttccacaccttacctttttggttataatccttccggggagggttgttggacgtactgtggtagttattactatggtctaggtgctgggggcaaagctcttttatgccggggaaaatccggcgttgtttttggttgaaagataatttttcgnngtcacaaatctgaatctttattgttctgaaataaatgttataaacataactcaaaacaaaaacttcaatattcagtctaagaagaggtgtggctcaatgcccatcacatgtaacaagaaaaacctcctttnnnnnnnnnnnnnnnnngtactatgagaagtctttcatatgaatgaaaatgcacccgttggatttttttccccctcatcacattagcttgtatacacgtgggaattgaaaggtttgcattttcttcacatagttcttgctatgatgtctgacggactttttgccactcaacaaattcatcaagaagaacaggccaagcaccatcttcatcatagttactaagatcagcatggactgttctgctgaattctaatacattgtaccattgatctttgttcataacacgatactttgattgctccaggtactggtaaaatactgaaaacagtggccatgtcctcccaagcagaagagctaacatagatttagcagtatcaatatcaaggcttctctgatctttatcccttgcaaaatcaaaggcatatctgtagatattcttaaatgacgaaatatcattcaactgtgagcgcaaaaagtcaaatttgttttgtaacttttctgtgcagtcacactgtaatgaagtcattccctttaaccattcttccttggtaaaaaatcccatgctttcagcctccaatttccacgctaaaactaacataataatattttcaggttcaacaccaatgtcttcacaaaatttttccattccttctggccctacaacttcatcaggacctgcatattcataaaaccaagccaggcacttcttgcttgaaaaatgttcctctccacttattagtctagcagggggttgggatctgcaatagctggagattttacactttttgaggcctccgtcttccgctactgctgctgccaccccaggggattttctcttcttcttcaccggcatcttccgccctccccggcagggtgggcaggggagccggggaagggggtccctgtccgctggaagcccctcagcgctggcacccagttcccagagacagcagcaagcggaggagcagagtcgccagcccgcaccggcgcggcccagcccggccgccgcccgctcccaggtatcctcgtcgtctttctctgaccgggacagggctggctcctcgccggtggacactgcggttcgttctcaccgggaggagataacgcggacagcgcggcagctcctcgtgccgaattcgccacccagcctcgctaccttagaccgttatagtactgccgtgccgtttntttaatcataaaccctcgtctgggggtgttggtaccaaaacctttcgtaggtcgcttccggttc

SEQ ID NO: 73109 - DNA, 1485 bp, Homo Sapiens
  misc_feature (1037)..(1050): n is a, c, g, or t
  misc_feature (1070)..(1313): n is a, c, g, or t
  misc_feature (1337)..(1346): n is a, c, g, or t
ggggacccctggactcctcatctgtatgctcgcctccgggaccctgctcagcaagtgcggaaaacagcggggctggtgatgacccacctgatcctcaaggacatggtgaaggtgaaggggcaggtcagcgagatggcggtgctgctcatcgaccccgagcctcagattgctgccctggccaagaacttcttcaatgagctctcccacaagggcaacgcaatctataatctccttccagatatcatcagccgcctgtcagaccccgagctgggggtggaggaagagcctttccacaccatcatgaaacagctcctctcctacatcaccaaggacaagcagacagagagcctggtggaaaagctgtgtcagcggttccgcacatcccgaactgagcggcagcagcgagacctggcctactgtgtgtcacagctgcccctcacagagcgaggcctccgtaagatgcttgacaattttgactgttttggagacaaactgtcagatgagtccatcttcagtgcttttttgtcagttgtgggcaagctgcgacgtggggccaagcctgagggcaaggctataatagatgaatttgagcagaagcttcgggcctgtcataccagaggtttggatggaatcaaggagcttgagattggccaagcaggtagccagagagcgccatcagccaagaaaccatccactggttctaggtaccagcctctggcttctacagcctcagacaatgactttgtcacaccagagccccgccgtactacccgtcggcatccaaacacccagcagcgagcttccaaaaagaaacccaaagttgtcttctcaagtgatgagtccagtgaggaagatctttcagcagagatgacagaagacgagacacccaagaaaacaactcccattctcagagcatcggctcgcaggcacagatcctaggaagtctgttcctgtcctccctgtgcagggtatcctgtagggtgacctggaattcgaattctgtttcccttgtaaaatatttgtctgtctcttttttnnnnnnnnnnnnnnggccgggcactgtggctcannnnnnnnnnnnnnnnnnnnnnnnnnnnnnnnnnnnnnnnnnnnnnnnnnnnnnnnnnnnnnnnnnnnnnnnnnnnnnnnnnnnnnnnnnnnnnnnnnnnnnnnnnnnnnnnnnnnnnnnnnnnnnnnnnnnnnnnnnnnnnnnnnnnnnnnnnnnnnnnnnnnnnnnnnnnnnnnnnnnnnnnnnnnnnnnnnnnnnnnnnnnnnnnnnnnnnnnnnnnnnnnnnnnnnnnnnnnnnnnnnnnatagcgaacctccatctcaaattnnnnnnnnnntgcctacacgctctttaaaatgcaaggctttctcttaaattagcctaactgaactgcgttgagctgcttcaactttggaatatatgtttgccaatctccttgttttctaatgaataaatgtttttatatacttttaaaa

SEQ ID NO: 73110 - DNA, 386 bp, Homo Sapiens
atgccaggggcactgttctccccagccccccgccccagttgtgacaatagtctctaaacattgtcaaatggtccaaggaaaggggaaaattgccccggttgagaagagcactgctgtaaagtaatgagcctcggctctcctgtctgcacctgtccggttactacttggccaccacgcagccttggctcctacagcccaaaagggagaatggagggaggctccaggctttgctggaggggcctgggtgagttctgtttgctccttgtaccaccatccaaatggtgttatcaaatctcttagattccaaagaggttgaataattaatgttcaaaggcaagagggcaaggcattttttaacactttttaaaataaaaatttataccaca

SEQ ID NO: 73111 - DNA, 2164 bp, Homo Sapiens
  misc_feature (2068)..(2109): n is a, c, g, or t
ggtcggaatcccggtaatgtggcgccgcgcagtcaccgcggagcagacgcggaggctggtggcccctgggcgagatgccgtacgccaaccagcctaccgtgcggatcacggagctcactgacgagaatgtcaagttcatcatcgagaacaccgacctggcggtggccaattcgattcggagggtcttcatcgctgaggttcccataatagccattgactgggttcagattgatgccaattcctcagtccttcatgatgaattcattgctcacaggcttggattaattcccctcattagtgatgacattgtggacaagctgcagtactctcgggactgcacatgtgaggagttctgccccgagtgctcggtggagttcaccctcgatgtgcggtgcaatgaagaccagacgcgacatgtcacgtctcgagacctcatctccaacagcccccgggtcattccggtgacatcccggaaccgagataatgaccccaatgactacgtggagcaggatgacatcctcatcgtcaagttgagaaagggccaggagctgagacttcgagcctatgccaaaaagggctttggcaaggagcatgccaagtggaaccctactgcaggggtggcttttgaatacgatccagacaatgccctgaggcacacagtgtaccccaagcccgaggaatggccaaagagtgagtactcggagctggatgaggatgagtcgcaggctccctatgaccccaacggcaagccagaaaggttttactacaatgtggagtcctgtggctctctgcgtcctgaaaccattgtcctgtcagccctctcaggattgaagaagaaactgagtgatttacaaactcaattaagccacgagatccagagtgatgtgctaaccataaattaactgcagcttgcctgcttcagcaaaaacggagattcaggccagcagctggatatgggggtctctcttcagactcttctcgtttctgagaatctagtctactgttggttgagcttcttggcaggacatcagtaccaactagaagtgggtcatagatagattaccagggatgcagtggtgtttaggcaggataggtctttactggccctgactgctgttaataattggcagcagtgctccccagatcccagaaggtccctgctggagtgtttccagtgcacctgtagggaaccaactagacttctctcctggttagtccagctctttactctaaaccctttctgtccaaaatgagtcattttcagttgtaccttagatgtctggtgttgaggatcaagtgccatagcctttattcagggggcctataaacccttccagttcttgccccagggctggcctgctagcgcttcaaattcccaggtgtccctaatttgagaagtaaccttttggaatagcattagaccctggctgtcccctccccaccaaataaacatgatatttcattctctgtccagcagtcatgaaccccttcacctccaatgacctgatcatttagtttggtgggggtgtgtgtgagtgcgggtgtggccgtggaagcagccgcaggagcaagggcccctcccacatacacaggaggagtatttcatttctccttaatgaaggctctggccctaacccctcagcactgtctccagataggaacatgcacaaagcagttaattaggcagcctggagaaaaccagagatccagtacagaaaggaaaggatatttattgattaacagaagttgtctttttaaaagtgtttatttttggcaataaagagcacaacataatctccttcatgcgtcatcgtgccacttagctgagccagccagctctgcctccctccccaaagacctttggaccccagttcccctctacaggctagctcatccctctgggtggtcattccccgggtcacgttgagagcgaggctgactgcaccacctccctagctcaagggctcctttgggaggggccgcgtgctttatcatcctcctgccacaactcaaatagtggttatttacaagaaggtctgttcccacaaatcaggaccctaaagtattnnnnnnnnnnnnnnnnnnnnnnnnnnnnnnnnnnnnnnnnnntttgacgtgaataaaagatacccttctgcatggtagtcaacaaataccagcacta

SEQ ID NO: 73112 - DNA, 1755 bp, Homo Sapiens
  misc_feature (54)..(92): n is a, c, g, or t
  misc_feature (95)..(129): n is a, c, g, or t
  misc_feature (222)..(251): n is a, c, g, or t
aaagacttggtaatacgaactcccactaataagggagccgcagtgcgtcttttnnnnnnnnnnnnnnnnnnnnnnnnnnnnnnnnnnnnnnncgnnnnnnnnnnnnnnnnnnnnnnnnnnnnnnnnnnncagtcgacggtaccggacatatgcccgggaattcggccattacggccggggatctccctggcctccggtcccaacttcgcttctctgctgacnnnnnnnnnnnnnnnnnnnnnnnnnnnnnnctgccaaaatgtctacaggtccaactgctgccactggcagtaatcgaagacttcagcagacacaaaatcaagtagatgaggtggtggacataatgcgagttaacgtggacaaggttctggaaagagaccagaagctctctgagttagacgaccgtgcagacgcactgcaggcaggcgcttctcaatttgaaacgagcgcagccaagttgaagaggaaatattggtggaagaattgcaagatgtgggcaatcgggattactgttctggttatcttcatcatcatcatcatcgtgtgggttgtctcttcatgaagaaccagcggaactcaaaactgctgttcaagaaacctcttcaagacttttgacttagaacctgctatattatcaagcttacctactgttatctctaaaattttttttgtgttaatgtaaagttgaatttctaggaaacgtgcctttgttttttaatatgcactccaaattagaaggccggccccgtccacattttgcacagtgcctttacagatttacgtatgggctgatgaagaggccttcttaagttccagagtgctataatctagatgtaatgttgtcactaattaattgccattactcccagttagttacccttgtcatttggcattattttcagaaccacattttaaacctttgggtaatcagatttccaacttatgccttccagaaaaaaacactactgcctaacacaaatctgtgataacaacaggctgtgccttattttgataattttctgattccctagaagagaaccctctactttttgtaagcactactgactctcgctgtatttaagatgctggtgaagagcttttgctcttgcattagatttgaagatgtttacattgttgttattgttatgtatcacttgctaaaaatattgttttaatcagagataacctctttaaaaaaatttttaaagaactatggctatgaccaaagcttctattttgccaaaaagttaaataccgataaaatggccttaagtgtactcctgacagttaaattcagaaacgtgccaaatggaactcaaggtgccccttcagaattaaaatcattaccttgtgtgtgaaccttctacatcttcatacgcctttcttccttttgaaaggctgtagacagtgtggctcccttctgaatcagtattttgcatgggggttagaaaagtttgaggtaaactctgacggtctcatacagagttctaccatcagttggcagttatcagctgtgggctcgatatgtttctgatgattaggaagcataatttgtcgctcacagtagacacgtggggcttgtcatttcgggtcaattgaaacaaacaaacctggagttggttctattgtttccatctgcgtccaaccatttctaattagctgtattggcctggcaggcggaaggtcttcaaaagtgccctaaacttttttgtattctatgacccagcgtgagggatttgacactatttgctggca

SEQ ID NO: 73113 - DNA, 2872 bp, Homo Sapiens
  misc_feature (1607)..(1718): n is a, c, g, or t
  misc_feature (1824)..(1881): n is a, c, g, or t
  misc_feature (2205)..(2268): n is a, c, g, or t
agctattgtgactatagaacagtggttaaaaaagcaggctggtaccggtccggaatttcccgggatatcgtcgacccacgcgtcgctagatgtaatgttgtcactaattaattgccattactcccagttagttacccttgtcatttggcattattttcagaaccacattttaaacctttgggtaatcagatttccaacttatgccttccagaaaaaaacactactgcctaacacaaatctgtgataacaacaggctgtgccttattttgataattttctgattccctagaagagaaccctctactttttgtaagcactactgactctcgctgtatttaagatgctggtgaagagcttttgctcttgcattagatttgaagatgtttacattgttgttattgttatgtatcacttgctaaaaatattgttttaatcagagataacctctttaaaaaaatttttaaagaactatggctatgaccaaagcttctattttgccaaaaagttaaataccgataaaatggccttaagtgtattcctgacagttaaattcagaaacgtgccaaatggaactcaaggtgccccttcagaattaaaatcattaccttgtgtgtgaaccttctacatcttcataggcctttcttccttttgaaaggctgtagacagtgtggctccccttctgattcagtattttgcatgggggttagagaaggtttgaggtagactctgaccgtctcataaaagagttctacccagcagttggcagattatcagctgtggactccagcatgtttctgataattatgcaagcaacaattctgtagcctcaagtaagaccacctgtgaacttgatcattatctggcccaaatatgaagataaactataactttggagtttgtttcctatttgtattcacattctgcttcctaaatcagttttctaaattatgcctgcaattaggcattggtcaggggtgaatggctcttttcacagagagtagccaaccagagacctttgctttgatatcatcaactgcagacaatgctgttgatgggaatgctggaagcagaaactttgtcatcggaaaaacttttcttgtatgcatgagactcaacatcaggatccacagcttaaagatgggaattcaggtatgaaagaaaacaggcaaggaggcactgagggagaaagacacagactttatcgctctgtggctcattgttactggaatattctaaaactcttgttcacatgctattatgacttataaagcagcaacagctgaggcgcaccaggacacagcttccatttctttaacgtctgttcccttaacatcgctgaaatgatttactgttgaagagatgccttgcggtgtggccagctgtgaggagaaagcagctggcagtgttaggacattagtccaccttcagcgcagggtctctggccgggtctgactcagaaaccttggtactcgccccttggccacagtgcccagacccatgtaacccactggctcctgcattaacccagaaatacctcgcttctatctgtgcacttagctgggaacttacccactgtaatcacctaaataaagtgtttataaacatgnnnnnnnnnnnnnnnnnnnnnnnnnnnnnnnnnnnnnnnnnnnnnnnnnnnnnnnnnnnnnnnnnnnnnnnnnnnnnnnnnnnnnnnnnnnnnnnnnnnnnnnnnnnnnnnngaaggagaggggaggggagagcaaaaagaaacaaacacagagaagaacagagaaacaagcagacaaacaaaaagaggaagcacagggaagcagaaaaacagcaagnnnnnnnnnnnnnnnnnnnnnnnnnnnnnnnnnnnnnnnnnnnnnnnnnnnnnnnnnncgaccagcagaaaacaacaaaacaaacatacacaagaacgacgacaaccagcgaccaaacagacaacagacgcggtcgctaccaagagaaagaccaagagaaaaacgaccaaaagaacgaagaaaacagacaagcacagaagacaacacggacggtcgaagacaaacacacgacagacacgaacaagaggagagagaaggggagcaggggaggcagcacggcgacagagaaccgaacaaaagaaagagcaaagcagagaaagggcgcagcgaggcagcgccagcacacgcgccagcgaacaacagcaccaggagacagaagggnnnnnnnnnnnnnnnnnnnnnnnnnnnnnnnnnnnnnnnnnnnnnnnnnnnnnnnnnnnnnnnncagcagacaggacgaaagacagaagaaggcacgagcatagagcaaaccaaaatgcagagcagcaagagagtgagaggacgaagcggactcagtgccagagcacgcagccacgcacgaagaggacacggcacagaaccgaagcaggagcgcggccagcgcgggcccagacgaggggacagaagcggagatggaacaaacacgaccgagcaagcgcgagggaggagaggagagagcagcagggtcagacagagaagacagagggaccgaagaaggagcaggcagaagcacagggacagagggaacggaggcgaacaagagcagagagagaacggcagcggaaaaaagagagacgagacaggacagacgagcacaaaaaaggatagaaacatgcacacgcgaagaggggagcgccacgggaaagcgacgaaagcgacgaagcaaggcaaagacggaggacgcaacagcgagccgccgacgcgaaaggagcgagcggagagacgagacgacgaaaccgcacgagacacgcacactagaggagccagcggcagccagcaggcggataggagaacgagacacagagacgagcggagcacgcgagcacaca

SEQ ID NO: 73114 - DNA, 972 bp, Homo Sapiens
gaggcgtattgtgactatagaacagtggttaaaaaagcaggctggtaccggtccggaatttcccgggatatcgtcgacccacgcgtccgctccgccggggcagccgagctgaaccggtctcttcctcggaaaggcagggccgaggggcctgcggggcagccatggaggcgacgcggaggcggcagcacctgggagcgacgggcggcccaggcgcgcagctgggcgcctccttcctgcaggccaggcatggctctgtgagcgctgatgaggctgcccgcacggctcccttccacctcgacctctggttctacttcacactgcagaactgggttctggactttgggcgtcccattgccatgctggtattccctctcgagtggtttccactcaacaagcccagtgttggggactacttccacatggcctacaacgtcatcacgccctttctcttgctcaagctcatcgagcggtccccccgcaccctgccacgctccatcacgtacgtgagcatcatcatcttcatcatgggtgccagcatccacctggtgggtgactctgtcaaccaccgcctgctcttcagtggctaccagcaccacctgtctgtccgtgagaaccccatcatcaagaatctcaagccggagacgctgatcgactcctttgagctgctctactattatgatgagtacctgggtcactgcatgtggtacatccccttcttcctcatcctcttcatgtacttcagcggctgctttactgcctctaaagctgagagcttgattccagggcctgccctgctcctggtggcacccagtggcctgtactactggtacctggtcaccgagggccagatcttcatcctcttcatcttcaccttcttcgccatgctggccctcgtcctgcaccagaagcgcaagcgcctctttcctggacagaaacggcctctttcctcttctccctctttccaactggacc

SEQ ID NO: 73115 - DNA, 463 bp, Homo Sapiens
agctggtctgatgacttgcttagcttggaaatccttgttttcagtgtgtcgagtcaaaatgtgtttatgtgagctgtcactgtggggaaccaattgctttgtcatatagctggttatgaactagtaacatgtttgggaagtcctactgatgttcctttggaagaaaaaatctgctggttttaacaactgtgcttttgctatgtatggtatccaagttagttgaaacgcagacactgagatctgtttgagtttagggtcatttttagaaaggggcagtttaaagcacaatgtctcacatgggacaaagttccaaaatgccaaattcttattttttaaaaagctagttctataaaatactggtattatgggtggggaggaaatagaattgagtcaattggaaagactatccaacttaacatgaaacttgtcaccatgagatagcattagctgcccaggatgctgc

SEQ ID NO: 73116 - DNA, 749 bp, Homo Sapiens
gcggccgcggctgtatgagagacagaagattggcaaactagacaatcttcgatctgaagatgatgtcttggaaaacgggacagacatgcatgtaatggacctacaaagggatgccaacagacagatcagcgacctcaaatttaaacttgcaaaatctgagcaagagataactgcattagaacaaaatgtaataaggttagagagtcaagtatcacgttacaaatcagcggctgaaaatgcagaaaaaatagaagatgaacttaaggcagaaaaacggaaactccaaagagagctccgctctgcattggataaaacagaagagctcgaggtgagcaacggccacttagtgaagcgtctggaaaaaatgaaagcaaatcggagtgcactcttgtcccagcagtaaattccagctctgatcaggcaactggttggtgactggagagcattgtttcataggcttttctctgtcctgtctgggagcgctgcttcttcccctgccttccgagagacgaagaccgtggcgagcttggcgcttaggggctcccgtgccatggctcaccccagggagccccagcagccaccaggtgcctctgtctgcagacccctggcccgggctggcgccgacgctcagaacctgcaggtacttcataagcacacaggggcctcgagggagctctgtgtctgaccgcacagcagcctctgaatgccgctggaagtgatgatcaaagtaaagattcagttgggacttg

SEQ ID NO: 73117 - DNA, 489 bp, Homo Sapiens
tttcatacaatcaacagatcgaaagattgctgtatccagcaaagtaaatgtggtttccatcggcacaacatgtggtggtatcttggtgcacgtttttgggtacctgttctatttcataggctcagagagaaacaccattgttctgtctacctacccctccttgtgcttttatttttaagggcttttgtggggatgtgagggaatgagggcattctttgccgtgacagttttctctgccagcacaagtatactaaaacagcacatgtgaaagcatttacttctacacaagaattgacatttactttgtaggtccattacatgcatgtctgtcccgttttccaagacatcatcttcagatcgaagattgtctagtgtgccaatcttctgtctctcctccagctgccctttgagtttcttaatatgaaaacaccctccagaaaaatcgtgggatttgtctactctgattgagaccgaagagctgaaggtaga

SEQ ID NO: 73118 - DNA, 1088 bp, Homo Sapiens
  misc_feature (988)..(1022): n is a, c, g, or t
ttttttcaagtcataagataaagtttaatcatttgatcatgttaaaagacacaaaacacagccaatctaaccaaatttcaggcatgcatttacataaatatattaaattaagaaaagaaattgtacacttaaacgtccttttcacctagaaatcattaaatccacagatcaacaataaaaccaattctctgcatttaccacttcaagatacaattgttctattttaaagataacacaaatacacttgttagaatttatatgcattatacatatattatattttacatagatagtgtgtatacatatgtagtgtttgtacagatagataaatatatatacatgggtgtgtgcacacgtacagatacacacagatgtactttaggccatctgtactgttactgctgaattctaaagttgagctgaactggtgccgttggatgtgattattgtcttttgcttcagacatgcttatgatgccgattgggcccacaatcccccctagtaaatgtccttgtcttttctacagcacataatcatggtaggcactttaataaatatttgttgaattaataaatggatagatgattgaataatagaagattgattaaagagaactgcatattataataacttggttaaataaatcaaataagttcaaattcagagaaattacctgagccaatgactatgcatgtaacttttcagacatttatagaaatctcacctagtacatatgatagccctgctcccttaaacttgtacctgcctttactacctattcaaatacccttctcccttttattaacagaaatctaagcatgggttgggtctggtgtctcctgcgagtaaggctctggacaaactgccctaattttcacaagctaaaggaaaatgaaccattagagaaaccaaaacatgttagaagaatgataaagatcccggccgtaatggccgaattcccgggcatatgtccggtaccgtcgactgnnnnnnnnnnnnnnnnnnnnnnnnnnnnnnnnnnncggccgcttcctcgctcactgacttcgctgcgctcgtcgttcggctatagcgagtagcgccctata

SEQ ID NO: 73119 - DNA, 1402 bp, Homo Sapiens
ttaagcgggagagagtatgaagtgacggcgcgccgattcggcacgaggttcacccacctgggcgtattcacgctgggcgccagggccgacagctactatgagtacctgctgaagcagtggatccagggcgggaagcaggagacacagctgctggaagactacgtggaagccatcgagggtgtcagaacgcacctgctgcggcactccgagcccagtaagctcacctttgtgggggagcttgcccacggccgcttcagtgccaagatggaccacctggtgtgcttcctgccagggacgctggctctgggcgtctaccacggcctgcccgccagccacatggagctggcccaggagctcatggagacttgttaccagatgaaccggcagatggagacggggctgagtcccgagatcgtgcacttcaacctttacccccagccgggccgtcgggacgtggaggtcaagccagcagacaggcacaacctgctgcggccagagaccgtggagagcctgttctacctgtaccgcgtcacaggggaccgcaaataccaggactggggctgggagattctgcagagcttcagccgattcacacgggtcccctcgggtggctattcttccatcaacaatgtccaggatcctcagaagcccgagcctagggacaagatggagagcttcttcctgggggagacgctcaagtatctgtcttgctcttctccgatgacccaaacctgctcagcctggacgcctacgtgttcaacaccgaagcccaccctctgcctatctggacccctgcctagggtggatggctgctggtgtggggacttcgggtgggcagaggcaccttgctgggtctgtggcattttccaagggcccacgtagcaccggcaaccgccaagtggcccaggctctgaactggctctgggctcctcctcgtctctgctttaatcaggacaccgtgaggacaagtgaggccgtcagtcttggtgtgatgcggggtgggctgggccgctggagcctccgcctgcttcctccagaagacacgaatcatgactcacgattgctgaagcctgagcaggtctctgtgggccgaccagaggggggcttcgaggtggtccctggtactggggtgaccgagtggacagcccagggtgcagctctgcccgggctcgtgaagcctcagatgtccccaatccaagggtctggaggggctgccgtgactccagaggcctgaggctccagggctggctctggtgtttacaagctggactcagggatcctcctggccgccccgcagggggcttggagggctggacggcaagtccgtctagctcacgggcccctccagtggaatgggtcttttcggtggagataaaagttgatttgctctaaccgcaaaaaa

SEQ ID NO: 73120 - DNA, 815 bp, Homo Sapiens
cacaagaggaaagtcataagcccttgggataattaatacaagggttcctttttctggccggtgcaggaagcttgtggccattttgctctcctgaaggagctcgtgccctgttaagttcgatcaccgctccctccagctgatgactgtcctctgcgatctccttccgggcggggatccacaggggcttcttgcctttttgtggcctcctccatgggtcccatccttcaggtcttggcttgggggtctaatctgcaggtgaggtggtccccgctggatgtgtctttgtgtcttctgtgacgaaatctcaggtaagttctcagggtcggtgtccgccttctgaggagctggtaagacgggtggatttgctggttttaacccagcaatttctggcctcatcttctgctcttcctctagcctgaaagccagagctttccaatggtcagccaagttgatgtagaagaggagtccacagaaaagcagaaaggcaaggaggaagagaatcatattccgctgcaatctcgacagttgcttccatttcctccagcacgagcgccgccgccaactcttgctgttgtcatagctctcgccaaagctcagcgtcaccgagatgaagtcccgatgaggcggcggcggcggcggtgggtacatgactacagtggtggcgacggcccaaggggccccgcccactggcggcgtcaggaagtccgactgagaggaaccgagagctccgcttctcctgccctcgcaggcagccatcgcagcgccgtccctcgtgccgaattcggcgcgccgtcgacttcatactcttcgccatt

SEQ ID NO: 73121 - DNA, 2146 bp, Homo Sapiens
  misc_feature (1912)..(1912): n is a, c, g, or t
  misc_feature (2070)..(2070): n is a, c, g, or t
gagagtatgaagtcgacggcgcgccgaaggcggcctgttgacggcgctgcgatggctgcctgcgagggcaggagaagcggagctctcggttcctctcagtcggacttcctgacgccgccagtgggcggggccccttgggccgtcgccaccactgtagtcatgtacccaccgccgccgccgccgcctcatcgggacttcatctcggtgacgctgagctttggcgagagctatgacaacagcaagagttggcggcggcgctcgtgctggaggaaatggaagcaactgtcgagattgcagcggaatatgattctcttcctccttgcctttctgcttttctgtggactcctcttctacatcaacttggctgaccattggaaagctctggctttcaggctagaggaagagcagaagatgaggccagaaattgctgggttaaaaccagcaaatccacccgtcttaccagctcctcagaaggcggacaccgaccctgagaacttacctgagatttcgtcacagaagacacaaagacacatccagcggggaccacctcacctgcagattagacccccaagccaagacctgaaggatgggacccaggaggaggccacaaaaaggcaagaagcccctgtggatccccgcccggaaggagatccgcagaggacagtcatcagctggaggggagcggtgatcgagcctgagcagggcaccgagctcccttcaagaagagcagaagtgcccaccaagcctcccctgccaccggccaggacacagggcacaccagtgcatctgaactatcgccagaagggcgtgattgacgtcttcctgcatgcatggaaaggataccgcaagtttgcatggggccatgacgagctgaagcctgtgtccaggtccttcagtgagtggtttggcctcggtctcacactgatcgacgcgctggacaccatgtggatcttgggtctgaggaaagaatttgaggaagccaggaagtgggtgtcgaagaagttacactttgaaaaggacgtggacgtcaacctgtttgagagcacgatccgcatcctgggggggctcctgagtgcctaccacctgtctggggacagcctcttcctgaggaaagctgaggattttggaaatcggctaatgcctgccttcagaacaccatccaagattccttactcggatgtgaacatcggtactggagttgcccacccgccacggtggacctccgacagcactgtggccgaggtgaccagcattcagctggagttccgggagctctcccgtctcacaggggataagaagtttcaggaggcagtggagaaggtgacacagcacatccacggcctgtctgggaagaaggatgggctggtgcccatgttcatcaatacccacagtggcctcttcacccacctgggcgtattcacgctgggcgccagggccgacagctactatgagtacctgctgaagcagtggatccagggcgggaagcaggagacacagctgctggaagactacgtggaagccatcgagggtgtcagaacgcacctgctgcggcactccgagcccagtaagctcacctttgtgggggagcttgcccacggccgcttcagtgccaagatggaccacctggtgtgcttcctgccagggacgctggcctctgggcgtctaccacggcctgcccgccagccacatggagctggcccaggagctcatggagacttgttaccagatgaaccggcagatggagacgggggctgagtcccgagaacgtgcactttcaacctttacccccagccgggccgtcgggacgtggaggtcaagccagcagacaggcacaacctgctgcggccagagaccgtggagagcctgttctacctgtaccgcgtcacaggggaccgcaaataccagaactggnggctgggagattctgcagagcttcagccgattcacacgggtgagcacctgtcctcgccccgcgtggtcacggccaccgggccacaggcacggcttggggctgtgggggctcaggctggctcccctcttgggtggtggctgtggacttgggtccccggnaggggccgggctttcccgccacccttcggggtgggccacactggcaaccttggggggcccctggggcatcccccat

SEQ ID NO: 73122 - DNA, 556 bp, Homo Sapiens
ggctccacttggttgcggcaagcccgccccttcccggacccaggtcacagccaccaccaagaagcggagccaacctgagccccacagcccagccgtgcctgtggcccggtggccgtgaccacgcggggcgaagacaagtgctcacccgtgtgaatcggctgaagctctgcagaatctcccagccccagtcctggtatttgcggtcccctgtgacgcggtacaggtagaacaggctctccacggtctctggccgcagcaggttgtgcctgtctgctggcttgacctccacgtcccgacggcccgggctgagggtaaaggttgaagtgcacgatctcgggactcagccccgtctccatctgccggttcatctggtaacaagtctccatgagctcctgggccagctccatgtggctggcgggcaggccgtggtaaacgcccagagccagcgtccctggcaggaagcacaccaggtggtcctggaatcagagggcctcttcagccccagataccaggccctgccctcagcctgcagctgcacgggcaaccaagtgcgagg

SEQ ID NO: 73123 - DNA, 630 bp, Homo Sapiens
gtatgctgagggcagggctgggatctggggctgaagagaccctctgattccaggaccaccttggtgtgcttcctgccagggacgctggctctgggcgtctaccacggcctgcccgccagccacatggagctggcccaggagctcatggagacttgtaaccagatgaaccggcagatggagaccgggctgagtccccgagatcgtgcacttcaacctgatacccccagccgggccgtcgggacctgcaggtcaaggtgggcctgggcctgggtcagggtccatcaggaggagggtgcttggcagggcttggcctttgcccctgagctctgcatccgccaacagccagcagacaggcacaaccttgctgcggccagagaccgtggagagcctgtcctacctgtaccgcgtcacaggggacctgcaaataccaggactggcgctgggagattctgcagagcttcagccgattcacacgggtgagcacctgtcctcgccccgcgtggtcacggccaccggcccacaggcacggctgggctgtggggctcagattggctccgctcattggtggtgctgtgacctgggtccggagggcaggcttgcccaaccagtggagcacgatcctctaatacg

SEQ ID NO: 73124 - DNA, 2766 bp, Homo Sapiens
cggcacgaggagaagagcccctgctgcagagagtgcagaaccgtcccaggcaccctgttctgagacttctgaggctgcccccagggagggtgggaagccccctacacccccacccaagatcttatcagagaaactgaaagcctccatgggtgagatgcaggcttctgggccacctgctccaggcacagtgcaggtctcagtgaatggcatggatgacagtcctgagcctgccaagccctctcaggctgagggcaccccaggaactcctccaaaggatgcaacaacatccacagcactgcccccctgggacctgccacctcagttccatccccgctgctcctcccttggggacttgcttggggaaggcccgcggcatcccttgcagcccagggaacggctatatcgggcccagctggaggtgaaggtggcctcggaacagacggagaaactgttgaacaaggtgctgggcagtgagccggcccctgttagtgccgaaacattgctcagccaggctgtggagcagctgaggcaggccacccaggtcctgcaggaaatgagagatttgggagagctgagccaggaagcacctgggctaagggagaagcggaaggagctggtgaccctctacaggagaagtgcaccctagggccttctgggccagaggcaccatcccttctggccatccatcaagtccatcaaggcccagccctgctgagaaatgtgcttctgcttctacagcaatggctgcaggagggccattgggcatgtcagggtttggccatgacccgaagagactcctggcgtccttcctactctgctctggccagtggtgccaggtgccacccaggctactgcctggctatctggcctggcctctgggctggggctggggctgggagcacacacgctgggacctatgtgtttgtgtggtcgttccaaactgccccagggctttgggggcggcacttggggtttctgggaatgacatcatctctgttccccatccccagtagtttacattcctgacttctgaatacagcacagctgagccccctgcagctcccatctccagctattcctaggcaaagagcctcatggctaaggcagcctcaaagccagcccctcctcccacctattctgagtagctgcagaggccttgggtccaggctctaggttcatccctcagttggggggaacgtaggacccagctggagcctcttgagggagatgagaggcctctttgtgaggaggacattagctgtgtggcctctctctctttggccctgtttccttttttgcaaaacaaggacattttctgcagccccttcctctcagtgagctatgattggagggcttaggtctggaggattcaagagtggaagaggaatttaaggggtcccctagtctagtctctgcccctggatagtgtccagccttgtatatttctgaagaggtggatcccagagtggctctgatgtccacattagaaaaacttacttgtaatgatcatgtcagccttcagaagagaatccccaccaacttctgtgcctcctcagatggggatttatctggatctctgtggttccttctcagccgaaacaggtccagtatcccagtcatttcttcaaatgctgataggggtatgttggaatccgaagccacttccccgccttcaagccccagatgggctgctctcctgtaactttctaggagaagagacattttcttctttccctttcctggtccatccctgcaccctggtcctctcccagcctctcccccacattgtccctgactctaggggcacatccagtctccatcgtgctgcagcagctggactgagggcagagcctgtaggtgcagaggccctggctcccgaggtccagccactctccctggggcctctggggtgagagcagcttccgataggacctgcccagatttctgcatgtgcacttttgtttactgaaagagagaaaggggggggtcacagcaacatgccctggcctttctgctctgttccccaaccccactgaggcctgctgcacaggtcaatgccttcgttatcgtttattgtactgtcactttgttcttgaggtagtagtcaaggatcaggaggggcagatgtcttctctgggctgcgtggggccggagcagaggtgagcagcaatgcactggttcgggagcccccatcagcctccttgtgcaaactgggcccccatgccacagtctggctttccctccatctgccccaggacaagagcaagaaggacatcagttgcccagtcatgtgatcccctgccatcttgccttaggaacagccttcccccaccagcagccatggctggctggggctttagccaagccacctactgccaggaattggagcctcagttccctcctgtgtcaagtagctaactgcagcagctggactgagggcagagtctgtgggtgcagagaccctgcatgtaggtcacaggttgaggcccagccactctccctggggcctggtgggtaggcaagtagctctggggccacctcaagtgaccaaatgctattaatttccatcctttagcaggctgggccctaggcaggaagctggcttctgggagaggagtgagaacgtgcagggcctgcctagcttgcgtgcttgaggaaggtggcattccgtgcttgcctccttgaggagggtggcattctgtgtcttctgcttatgaagcgcctttcttaaagtttggcaataaatccatttttatggaaaaaaaa

SEQ ID NO: 73125 - DNA, 1497 bp, Homo Sapiens
  misc_feature (41)..(93): n is a, c, g, or t
  misc_feature (699)..(715): n is a, c, g, or t
  misc_feature (751)..(761): n is a, c, g, or t
  misc_feature (913)..(913): n is a, c, g, or t
  misc_feature (955)..(955): n is a, c, g, or t
  misc_feature (992)..(992): n is a, c, g, or t
gcccgcggcccgacagccctcagccgcggcacggcagcccnnnnnnnnnnnnnnnnnnnnnnnnnnnnnnnnnnnnnnnnnnnnnnnnnnnnnaggtccgcttccgcctgacgccgccctccccggtgcggtccgagccgcagcctgcggtgccgcaggagctggagatgcccgtgctgaagagcagcctggccttgggcctggagctgcgggccgcagccgggagccactttgatgctgcgaaggccgtggaggaacagctgagaaagtcgttccagatccgctgcggcctggaggagagcgtgtccgaggggctgaacgtgccgcgctccaagcggctcttccgggacctggtgagcctgcaggtgccggaggaacaggttctgaatgccgcgctcagggagaaattggctctcctgccgccacaggctcgagccccgcacccaaaggagccacctgggcctgggccagacatgaccatcttgtgtgacccagaaacgctattttatgaatctccacacctgaccctggacggtctgccccctctccgacttcaactccggccccgcccttcagaggacaccttcctcatgcaccggacactgaggcgatgggaagcgtagaccccaaagatccctggagggctagttcgtatttttgtgttaaactatttgttagaataaagtaattttgctaatnnnnnnnnnnnnnnnnncacacgccaccccggaaacagctttcacaccagacnnnnnnnnnnntaaacacactttgttgggccccctcggcccccccaaaaaatttttcaaaaaccatttctttatgtgggcgcgggggccccccgcaaggaaaaaggggaacccgggggcccaaaacggttgtgtttcccatagggaaaaatcccgcggggtcnaatgaaactaaaaggggtctttgggacaatctcccacacccnataaataacaaaaaaacacgcgccccccgcgaggggngtccaacacaccacaataccgcgttctctccccgtagaaaccacacaacatctccgccaacaatagagtggagacgaatctctcgtggaggacgaggggctcactattttatcatgcgcggggagatttctctttgtctcacaacacgcgggggaggcgtcgccgaagctcgcgggagcaccttcccggagaatatatctccaatttgttgtcgcgcggccgccggggtctcgttgggagacgagtctcttctgtccgcgcaaacaaacgtggggcgcgggaaattgtccacgctacagaggcgttcttctcgtgcgcgcacacacgcggtataacaccctctcttccagataacggcgcccgtggaagagcacacacctgagccagcgccccccgcgggcggccatataatacaccctcctgtggctcgcccctggcggcaataaaaaatatttcgtcccccttggtggtaaaaacccgcggcacgcaaagaaaacttggctct

SEQ ID NO: 73126 - DNA, 686 bp, Homo Sapiens
tccgcttccgcctgaccccgccctccccggtgcggtccgaaccgcagcctgcggtgccgcaggagctggagatgcccgtgctgaagagcagcctgcccttgggcctggagctgcggaccgcagccgggagccactttgatgctgcgaaggccgtggaggaacagctgagaaagtcgttccagatccgctgcggcctggaggagagcgtgtccgagggtgaggggggcgggcgaccgaccgcgtgcgggagtcggggtgaggcgcgccactcacctccgtccccgctgcgctctcagggctgaacgtgccgcgctccaagcggctcttccgggacctggtgagcctgcaggtgccggaggaacaggttctgaatgccgcgctcagggagaaattggctctcctgccgccacaggctcgagccccgcacccaaaggagccacctgggcctgggccagacatgaccatcttgtgtgacccagaaacgctattttatgaatctccacacctgaccctggacggtctgccccctctccgacttcaactccggccccgcccttcagaggacaccttcctcatgcaccggacactgaggcgatgggaagcgtagaccccaaagatccctggagggctagttcgtatttttgtgttaaactatttgttagaataaagtaattttgctaataaac

SEQ ID NO: 73127 - DNA, 474 bp, Homo Sapiens
cggcaggtccgcttccgcctgacgccgccctccccggtgcggtccgagccgcagcctgcggtgccgcaggagctggagatgcccgtgctgaagagcagcctggccttgggcctggagctgcgggccgcagccgggagccactttgatgctgcgaaggccgtggaggaacagctgagaaagtcgttccagatccgctgcggcctggaggagagcgtgtccgagggagccacctgggcctgggccagacatgaccatcttgtgtgacccagaaacgctattttatgaatctccacacctgaccctggacggtctgccccctctccgacttcaactccggccccgcccttcagaggacaccttcctcatgcaccggacactgaggcgatgggaagcgtagaccccaaagatccctggagggctagttcgtatttttgtgttaaactatttgttagaataaagtaattttgctaataa

SEQ ID NO: 73128 - DNA, 1104 bp, Homo Sapiens
tgacgaccgcgtccggccaataaatggtttctaattaaaggattgtgacatttaatagccgttgcttgctcttgtcttgctcccttctctctcgaaacttgttaagaaataactcaatattctggcttttccactttaaatgtcatactgaccagcccgtgtatgccagcctcgatctcatcgttttctttaaccggtccaactccctttggcgtcccagtcaagataatatctccttcttccaaggttatgatcttagaaacatagctgatgatgtaggggatggaaaaaatcatggaggatgtctcaccctcctgtctgagttcgccgttgaccttgagccagagcttcagcttgtgagggtcagggatcttctccttgggcacgaacgcgctgaccgggcaggacgccgtgaagctcttcgccagagtccagggcagccccttcttcttgcactcgtcctgcacgtcccgggcggtcatatccaggcacagggcatagccgcccacgtagtccatggccgcagcctcggggactgcgcggcagcgcttgcccatcaccacgcccagctccagctcgtggtgcaggttgcgagtgtacgcgggcatgaggatgggcgagccctcgggcgcgtaggccgtggacggcttcaggaacagcacgggctcgctcaacaccgcgctgcgcatctccctgacgtggtccgcgtagttcctccccacgcagacgatgttctttccccactcccagaagcgggacaatggcctggatgctgccatgattcccatcaagtgcccctgtagtcacgtgggctgggccggtcagctgatgcctacggcatcccggagaggaccaactgcctcggaacgctgtcccccgcagcgacggcccgttccacctcgcgatctgccgggtacccgggcggcgtggcgctcggcctccagggatccactgtgcggtgccaaaaaagaggcggaggctcgcggcacagctctcccggcgcagctctcgggccgccgccgccgctcccaggcccgtctcccggcccgtggcagtcgggctcgcgcctcgtgccgaattcaacaccaggcctcgtactagccg

SEQ ID NO: 73129 - DNA, 1450 bp, Homo Sapiens
ggcacgagggagagagccactgcagaccgcactgctggccttcggagtggccagtgccacgcctggccccgctgccccactgccttccccaactcctggcgagtctcctccagcttctagccttccccagcccgagcccagcagccttccagcccaaggagttccaaccccccttgctcccagccccgccatgcagcctccagtgccgccctgcccagggccaggtctggaaagctcagcagctagtcggtggaatggggagacagaacccccggccgcccctgctgccctcctcaaggtgcccggagcaggaacagcccccaagcctgtgtcggtggcctgcacccagctggcattttctggccctaagctagcgccccggctcggcccccgcccagtgcctcctccacggcctgagagcactgggactgtgggcccaggccaggcccagcagagactggagcagaccagctcgtccctggcagctgcactgagagccgcagagaagagcattggcaccaaggagcaagagggcacccccagcgcctccaccaagcacattctggatgacatcagcaccatgttcgacgccctggctgaccagctggacgccatgctggactgagccctccagcagtgcccactgtgacctgccgaagtccactgcctttgccccagcacagaagaggcccctgccaccctagggacgggccaagggctggtcaggctgaagtgcccctcctagcagggccccttcccactcagcccgcggctgtgggcaccacagctcttgtggggcagcccaccttagaacctgactagcgagggacctccgctgcatctcagcaaagcccctcccagggtttgatcgattgagcaggacagccctgctcctggacagggaccctggtaagagctctctcctcagggaggaagtaggggtggggctttgggggtgctttctctgtaccccccagcccatgtcccaagttgtgccaagggaatgcctcttgccacccaccatcctgcccaggccctgagaggctggaggaggcgtgtgtctggccgggccccctctccgtaggtgtacagaggacatgtaaatacacagcggtggtgcccaggcagctcctgcccccgccttccctcactgaggcagggctagcaggggtgggaggcagtggggttaacagatcccacaagtcctaacttttcaattgtaaatgttattttctaagcagagagaaatgcatatattttaaatggaatttattctatcaactgcctgagaggacacaatgggggaggggcttcggaccacagcaggagccccgactgcccacctgagggcagggagagcctgaccccattggcccaggccctggctctgtaaccattaacctcttcccccaactaacaccaatgaaaacaccattccacgtgaaaaaaa

SEQ ID NO: 73130 - DNA, 879 bp, Homo Sapiens
aggagcgagcctgggtggcgaattcggcacgagggtccatcaacgcccatccttccaactgcatctgtatcaagtttgaccccatggggaagtactttgccacaggaagtgcagatgctttggtcagcctctgggatgtggatgagttagtgtgtgttcggtgcttttccaggctggattggcctgtaagaaccctcagtttcagccatgatgggaaaatgctggcgtcagcatcggaagatcattttattgacattgctgaagtggagacaggggacaaactatgggaggtacagtgtgagtctccgaccttcacagtggcgtggcaccccaaaaggcctctgctggcatttgcctgtgatgacaaagacggcaaatatgacagcagccgggaagccggaactgtgaagctgtttgggcttcctaatgattcttgagaggaggttgtagggagaggaggccccggcagaggtcttccttcatgtggttagtttggtctgttctctcggagttggtgggcaccctaaatatttgtaagttggtataaattgtaaacgtctctggtcaggctgcgcatttcgttcttttgctttgtctgtgtattagctctttccattctttgcccccagcatgagttaactcgcgtggactctgcagtgcgagtagtgaccccagcataccttgtcctctggacctcctgtcttctctgcttctgggtgcatggtagactttgtggcatttgatacaacttggacaatacctagtttggagggaggggaatggaagggcatggaagtttttttaaataattaaaaaaatatatatataattttgagaattgagcatttaataaactgacttttgttattatggaacttc

SEQ ID NO: 73131 - DNA, 1166 bp, Homo Sapiens
tttagaaggttagtgttggttcttttattcgattaaacaggaatacacatatatctaccaaagaataggtaagggagaaataagaacactaaaaaaactcggaatcgttaagtgtgaagcatatttggagttaaaagaaccaaatattactaagtaagcagacgcgggcacgcgctgcataccgggatttgtagtcccttccggggcggggtacagcgcgcctgcgcagagggggccgtcgctcttccgggcgcatgcgtgcggcagcggcgccaggactgactgcgccgtggaggctgctgcagtgttgtgagttggaagctggggagctcggcatggcggtccccgctgcagccatggggccctcggcgttgggccagagcggccccggctcgatggccccgtggtgctcagtgagcagcggcccgtcgcgctacgtgcttgggatgcaggagctgttccggggccacagcaagacgcgcgagttcctggcgcacagcgccaaggtgcactcggtggcctggagttgcgacgggcgtcgcctagcctcggggtccttcgacaagacggccagcgtcttcttgctggagaaggaccggttggtcaaagaaaacaattatcggggacatggggatagtgtggaccagctttgttggcatccaagtaatcctgacctatttgttacggcgtccggagataaaaccattcgcatctgggatgtgaggactacaaaatgcattgccactgtgaacactaaaggggagaacattaatatctgctggagtcctgatgggcagaccattgctgtaggcaacaaggatgatgtggtgacctttattgatgccaagacacaccgttccaaagcagaagagcagttcaagttcgaggtcaacgaaatctcctggaacaatgacaataatatgttcttcctgacaaatggcaatggttgtatcaacatcctcagctacccagaactgaagcctgtgcagtccatcaacgcccatccttccaactgcatctgtatcaagtttgacccccatggggaagtactttgccccaggaaagggcagaaggctttgggtcagccctctggggatgtggaatgaagattaatgtggggtttccggtggcttttttccaggcctgggaatgggccctggtaagaa

SEQ ID NO: 73132 - DNA, 2241 bp, Homo Sapiens
  misc_feature (1385)..(1404): n is a, c, g, or t
  misc_feature (1434)..(2017): n is a, c, g, or t
tttcttctttgttgtattctttatgtattgtcttgatggacttaatattacctgagtttgaaatggatgaagacagctgctaccattaaggaccaaattttatgctaccactaaacaaaaatacccactcagtctgtgttaaattgtatgtctttttaaaggtatttaaagattcaactaagctttaaagagggctgagcagctcaggaagcctgtaatgtgggcataactctttggacctgatcttgatgcttctgctgctctgttagcctctgaagagcaatatctaatttattattactgtaattttttaaaaggctttaaagtgcctcaggggtcccctgaaactaattttctatttctgggattccctggattcattatatgagatggtgacatgattagaggaattcttttttagtatgaaaattgtcccttttcttcttcagtacttgcctccttgctggcattgaattaacacagggacaaaatttggttaattttttatttctaactctcccaacaaacccctgttgcccagtatttgtttggtggcctttaaccacctgagggaaaaaatgagcttattcaagctgccaatatttatctatgggctgtagcagtacactgaattgtactgtgccagggatattgagatgctctgggggtgtattgtatacctgccagttttcttcatttctgaattgagttttcttttcttgatgttggtttccttcatatcacctcaaggtttagatttgtgaaggaataagcatgatggaaataatagtcttgaaaggagatatgttgtatataatcaggaggaagaggaaggaaggacttacccattttgatattttgctgtaggtggccagttttgtttctcatagggaaatctgacccacctgtcatgttggctcctaaggaactgctgttgtaagcggctcatcaagagttgaacttcacgtagccttgttgggaatatggaaaaggaagaaagccacaggactgcccattcagtcttgggaagattgggatgattctgcacaagcaaaaatgactgaagtttatgtatagacacacctctaccaatccatcttcagctgactgaatgttgtatgatagcccttctccaaagcagaggtagaatgttcaggtttcaccatggattttctacttatttcgtttttggaatcaccttacagattccaggtcccttttgtatatattctttattcttttgcttttttaaaaaataattttgtttcatatttaaagcacttgtattagtcaatgtttcgtgttccgcattatttgaaccatttgcccttacagaaagagaaatacttgtttgtgttttaaataaaactgatgtaggaaagtcnnnnnnnnnnnnnnnnnnnngcctacagccgccctcgtgccgaattcttnnnnnnnnnnnnnnnnnnnnnnnnnnnnnnnnnnnnnnnnnnnnnnnnnnnnnnnnnnnnnnnnnnnnnnnnnnnnnnnnnnnnnnnnnnnnnnnnnnnnnnnnnnnnnnnnnnnnnnnnnnnnnnnnnnnnnnnnnnnnnnnnnnnnnnnnnnnnnnnnnnnnnnnnnnnnnnnnnnnnnnnnnnnnnnnnnnnnnnnnnnnnnnnnnnnnnnnnnnnnnnnnnnnnnnnnnnnnnnnnnnnnnnnnnnnnnnnnnnnnnnnnnnnnnnnnnnnnnnnnnnnnnnnnnnnnnnnnnnnnnnnnnnnnnnnnnnnnnnnnnnnnnnnnnnnnnnnnnnnnnnnnnnnnnnnnnnnnnnnnnnnnnnnnnnnnnnnnnnnnnnnnnnnnnnnnnnnnnnnnnnnnnnnnnnnnnnnnnnnnnnnnnnnnnnnnnnnnnnnnnnnnnnnnnnnnnnnnnnnnnnnnnnnnnnnnnnnnnnnnnnnnnnnnnnnnnnnnnnnnnnnnnnnnnnnnnnnnnnnnnnnnnnnnnnnnnnnnnnnnnnnnnnnnnnnnnnnnnnnnnnnnnnnnnnnnnnnnnnnnnnnngacctgccgcttacggaacctgtccgctttctccctcggaagcgtgggcttccacagccacctgtaggacccagtcgggtacgtcttcccccagctgcgtgtgtgagaatccccttcaccgacgcggccttaccgggatatcgcctggccatccggaacagatttgccatgaaaccatggaaagatacaacgagagtcggtctaaatctgattggctactcgcc

SEQ ID NO: 73133 - DNA, 220 bp, Homo Sapiens
ccttttttataaacagaccctaataaagagaacagggtaagatgtgaggctgagtgtgtttaagtacgtgagagagtgtgagtgtgtttgtaagtgagtgtccctatgcgattatgtctctttacgttgctaaggggggagggtgaggattaagtactcgtgccttatatttgtgtgccaattaatgcctaataaataccatgtgcttaaacaagtaaaa

SEQ ID NO: 73134 - DNA, 485 bp, Homo Sapiens
  misc_feature (359)..(372): n is a, c, g, or t
agccatatattgtttgagtctatttatgtgatatgtccagaacagacaaatccatacagatgaaaagtagatggtagtgttttcaggggctggaggaagggaagaatgggaagtaactgctaatggatttaggatttctttttggggtgatgaaaatattctggaattagaaagtgatgatgattgtaccactttgtaaatatcactaaaaaccactgaattatatattttaagggtaaactttatggcatgtaaattatatctcaataaagtaataaagaatatggctattataacctatttatattggatttctaaaagaatatttcatattctactaaaaggcgataggatccagnnnnnnnnnnnnnnatcctgaaaactattttataaccaaaaattttgcttcaaaacatcattctcactatagttataaaacagaaaacaaaactaaatttttacaacataaatatatttacaaaatt

SEQ ID NO: 73135 - DNA, 965 bp, Homo Sapiens
  misc_feature (740)..(741): n is a, c, g, or t
  misc_feature (756)..(756): n is a, c, g, or t
  misc_feature (769)..(769): n is a, c, g, or t
  misc_feature (790)..(790): n is a, c, g, or t
  misc_feature (865)..(865): n is a, c, g, or t
  misc_feature (882)..(882): n is a, c, g, or t
cttttcttgtttgttttttattttgctaagaaggaaccagattttatatcatcattcttcatctaaatggactgccatatgaagttctggtttctctgtttcttcttggttagctggttactaccaaatgcctaaggacaattctcagagcatttccacatgaaggtgattagttttcatttaataaaattaataacacattacatgtagatgaaaatataacaaaaccatacgaaagcttgtcagagatattcaactagaaaactaaaacagtagccactagaaaaaagacatagtggaaaaatttttgaacggatatgctttttgttgaataattacagtaattactaccaatatattcagaccaacaaagattagaaagaacatgcaaaatgctgagaaaatttctcctacaattaaaacaaatgtgtttttatgagagagaaaaaaataagtcaagctcctaaaatgaaaattacaaaacataggattaacaatttattaaaaattacacccttgatttttttgaggccaaaaaaagtagtttttttaaaacaagggcatgaaaaagacttcagattaagactcatactctgttctaaatgaaaagtagtaaaactacttctagtagaaaatacctgctatggaaaaaaatttcagatattttccatttgatgtaggtattaataaaaaatatgatgtttatatctaaaatataactagcattttatttcatttanntatataagtgtttangaaaagttactcntctcagtgttcaaataaatangattgttctcatactagcattttatgatatgtcagtaaatttattctgctgactaagtcaatagatcaattttanattgaaatctaattttnaaagctaattttgtacttgcatgaagtctgcttttctacattaaatttgtctctttataaataactatcatatcaaagatccc

SEQ ID NO: 73136 - DNA, 682 bp, Homo Sapiens
caacacttggctggaattgagtagaaaaaagtccacgatgcctcttcacatgtgtcatgaaatatgagaaatctgtctgattctagatactatttctttacgacacaatgggcaggtctccagctgcaaggcacaatccatgcacaggtcactgtgtccacatggcttcaattgtgtgtctgctacctcatcacaacaaagggaacagcagttttctcggatactgacttgcttcaacagagcaagacgcctgtgccttggcaaaatgattttttcttcagctgttaggaaggcgtagtcattaaaagtgctaaatttcatagatggtgggtatttgaatggttttgctccaaaattgaactcacattgttgatatgacatgaaactagctgcagcaaaaaatccagatacagtagatgaaaagacttgcttttcaggaggcagctggttgccatttaaaaagaagatcatttgcttttcattcaagtctaacagaaatcctactgtatctccttctttccagcatgggtgtatgtgaggcttacttctggcattgtaccaaatcagctgccggcagccatcatacgcacaggagtattcatcatccccaatgccgtagccttccaaatacaaacaaaagaaagtttatccacagcttgtcattcagggaatagtttgagtc

SEQ ID NO: 73137 - DNA, 695 bp, Homo Sapiens
gcgggggtctctagtgaaggagcagtggatactgactgcccggcagtgttctcctcctgccatatgcctctcacgggctatgaggtatggttgggcaccctgttccagaacccacagcatggagagccaagcctacagcgggtcccagtagccaagatggtgtgtgggccctcaggctcccagcttgtcctgctcaagctggagagatctgtgaccctgaaccagcgtgtggccctgatctgcctgccccctgaatggtatgtggtgcctccagggaccaagtgtgagattgcaggctggggtgagaccaaaggtacgggtaatgacacagtcctaaatgtggccttgctgaatgtcatctccaaccaggagtgtaacatcaagcaccgaggacgtgtgcgggagagtgagatgtgcactgagggactgttggcccctgtgggggcctgtgagggtgactacgggggcccacttgcctgctttacccacaactgctgggtcctggaaggaattataatccccaaccgagtatgcgcaaggtcccgctggccagctgtcttcacgcgtgtctctgtgtttgtggactggattcacaaggtcatgagactgggttaggcccagccttgatgccatatgccttggggaggacaaaacttcttgtcagacataaagccatgtttcctctttatgcctgt

SEQ ID NO: 73138 - DNA, 780 bp, Homo Sapiens
  misc_feature (34)..(34): n is a, c, g, or t
gatactgtatgcccggcaatgcttctcctcctgncatatgcctctcacgggctatgaggtatggttggccaccctgttccagaacccacaacatgaagagccaggcctacagcgggtcccagtagccaagatgctgtgtgggccctcaggctcccagcttgtcctgctcaagctggagagatctgtgaccctgaaccagcgtgtggccctgatctgcctgccgcctgaatgatatgtggtgcctccagggaccaagtgtgagattgcaggccggggtgagaccaaaggtacgggtaatgacacagtcctaaatgtggccttgctgaacgtcatctccaaccaggagtgtaacatcaagcaccgaggacatgtgcgggagagcgagatgtgcactgagggactgttggcccctgtgggggcctgtgagggtgactacgggggcccacttgcctgctttacccacaactgctgggtcctgaaaggaattagaatccccaaccgagtatgcgcaaggtcgcgctggccagccgtcttcacgcgtgtctctgtgtttgtggactggattcacaaggtcatgagactgggttaggcccagccttgacgccatatgctttggggaggacaaaacttgtaagtacagtcaaggacaagacttgtactcaaggctgagatttaataaaattaatatttttactacttcaccaaggactttcttaaatgaaaatggtttttccccctacaagtaaacagtaataaagaagagaattattcctaaaaaaa

SEQ ID NO: 73139 - DNA, 556 bp, Homo Sapiens
tgtgtggcctcagctccagcttgtctgccaagctgagagatcgtgaccctaaacagcgttgtcgccctgatctccctgccgcctgaatggtatgtggtccctcaagggaccaagtgtgagattgcaggctggggtgagacaaaagtacggtgtaataacacagtcctaaatgtggccttgctgaacgtcatctccaaccaggagtgtaacatcaagcaccgagaacatgtgcgggagagcgagatgtgcactgagggactgtcggcccctgtgggggcctgtgagagtgactacgggggcccacttgcctgctttacacacaactgctgggtcctgaaaggaattagaatccccaaccgagtatgcgcaaggtcgcgctgaccagccgtcttcacgcgtgtctctgtgtttgtggactggattcacaaggtcatgagactgggttaggcccagccttgacgccatatgctttggggaggacaaaacttttaagtacagtcaacgacaagacttgtactcaaggttgagatttaataaaattaatatttttactaaa

SEQ ID NO: 73140 - DNA, 764 bp, Homo Sapiens
  misc_feature (147)..(189): n is a, c, g, or t
  misc_feature (363)..(398): n is a, c, g, or t
cttgctgttgctttttctcgttcttcactgcttttcttcttttttgctcgcacctcctcaatatactctgattctgacaaggactcagatgataaaggtttatcttcagaatacatctttctctttttgctgagtcctttaatatcnnnnnnnnnnnnnnnnnnnnnnnnnnnnnnnnnnnnnnnnnnnaaactatccttactgtctgattcagtttctgacatggagctttcagaagatttatgtgaacggttcttctttttctttctccgttttccttgtttcttatcctcatcttcagaatcagaagaactgctggaagaatcagagcttgatgaagaagaagatgaatacctaccagannnnnnnnnnnnnnnnnnnnnnnnnnnnnnnnnnnnggatgagctctcacttccacttaacaatttctccctgtgtttttccagttctttcttccagttctcattcattttttcttcaaattcagccaaagccttggagcctttctttttcttttctagttgctcttttacttcttcccaggtaggccttggtcgattcagataatcctgtattgttggccctgaagactggattggaccccttgatctcgccattgctattgggttcatataggccacccgattgtcccgcttccccatggtgctggatcgagcgcacagtagcacgccgagggaaaccgggccggagagactgccgaagagggcctgccgcaggtcctcttgccgcctccccactccccc

SEQ ID NO: 73141 - DNA, 449 bp, Homo Sapiens
  misc_feature (52)..(87): n is a, c, g, or t
gaactggaaaaacacagggagaaattgttaagtggaagtgagagctcatccnnnnnnnnnnnnnnnnnnnnnnnnnnnnnnnnnnnntctggtaggtattcatcttcttcttcatcaagctctgattcttccagcagttcttctgattctgaagatgaggataagaaacaaggaaaaccggagaaagaacaaagaagaaccgttcacataaatcttctgaaagctccatgtcagaaactgaatcagacagtaaggatagtttaacaaaagaaaaagaagtcaaaagatggaactgagaaagaaaagcatattaaaggactcagcaaaaagagaaagatgtattctgaagataaacctttatcatctgagtccttgtcagaatcagagtatattgaggaggtgcgagcaaaaaagaagaaaagcagtgcaagaacgagaaaaagcaacag

SEQ ID NO: 73142 - DNA, 479 bp, Homo Sapiens
tgagagccactttgcctagcccctagtgtcttttgatttcaaaaaagcgcacatccacggagaagaaacgcaattagaaaatgttgttcccaacaaggtctttgagctccacataatctgtatctaagataataccttaacacatctcatctgccttttacatgttcaattagggcttctgcgcattggctggccaaacatcttgagctacttcatgtggctttttagaagcatgaccacgtttgtaggatggaaatatttaggctttgttaccaaatctaagatgccacagatttttggtaagtgatcctaagacaccagtgaatacaggaggttacaacatgaaaaatgctgtgcctttgaattgaggaatactgtatggaaacacggttgtatttacctttttattttataaatattgagaatataaaaaaattagaaaatagaaaagctgaaagtatgaatattaaaatacatag

SEQ ID NO: 73143 - DNA, 880 bp, Homo Sapiens
ctggaccggtccggaattcccgggatatcgtcgacccacgcgtccgcggacgcgtgggttgtcaaactacctctcagcaggcagctgaagttcatgcacacctcacaccagttcctcctgctgagcagccctcctgccaaggaggctcggttccggaccgccaagaagctctatggcagcacctttgccttccatgggtcccacattgagaactggcattcgatcctgcgcaatgggctggtcaatgcatcctacaccaaactgcaggaatgggaaaaggacagcacaggatgccctccaaggatgagctggtccagagatacaacaggatgaataccatcccccagacccgatccattcagtcacggttcctgcagagtcggaatctaaactgtatagcactttgtgaagtgattacatctaaggacctccagaagcatgggaacatctgggtgtgccctgtgtccgaccatgtctgcacaagattcttctttgtatatgaggatggtcaggtgggcgatgccaacattaatactcaggaccccaagatacagaaggaaatcatgcgtgtgatcggaactcaggtttacacaaactgagggggccccagccctcgtaccacccctgttaccccaggatccatctgccctcataaaagtgttcaggtacagcagctgaggctgccctgaggaatcaaggggccattaccaaggggcaggaaaaggatatgtaagaggtggccttcatggtagagcttgacccaagaactactccacattcggatggcccagactgactccatcccctgactttccctttgacttcaccctgtttgtaaataaaacaataaaatggaaggtgctgtggactggatttgaaa

SEQ ID NO: 73144 - DNA, 394 bp, Homo Sapiens
ggcacccggtgggacctcctaggactgggccttcttccagggggcccctggcagcagctggggtgtcgggcagaatgtgacttgtggccttaccatggacttgaatgggacttggctggcctcaggatcttgtgcctggaaatagcctgaggtggctcaggaagcggagaaagggtgccagaccattctctggcggggaccagggcccaaggccccagggctggaaggagaccaaggggcagccgccctggagggacatcagtgcttcctcttccacccaattcccccacgcggttccatgttttcccaccagcctgttggcgaagttgctgctccggcattcagtacctgcttcttccagagaaataaagttagtttctattttatgttaaaa

SEQ ID NO: 73145 - DNA, 1053 bp, Homo Sapiens
  misc_feature (53)..(53): n is a, c, g, or t
  misc_feature (55)..(55): n is a, c, g, or t
  misc_feature (89)..(90): n is a, c, g, or t
  misc_feature (117)..(117): n is a, c, g, or t
  misc_feature (152)..(152): n is a, c, g, or t
  misc_feature (157)..(157): n is a, c, g, or t
  misc_feature (231)..(231): n is a, c, g, or t
  misc_feature (262)..(262): n is a, c, g, or t
  misc_feature (265)..(265): n is a, c, g, or t
tttgattgacggtacattcaacagaacgttgacatgatcgatttatcgactcntntaggattgccctcggcaagatcgcacgaggctcnnttaaagggaggggtgtacctgagactncaggtgagggagaagctgtctctgctgctggcctntatcntgagagggaagtgctagaattagacaagtgactgtagggggaccgtctagaacaccagcccagacacacgtccntcagtcagggagagtgagcagccgcacagcntcntggagaatcccgaataggacttgggctgagagcagagaggagggtcgggcgggcccgcctcagtgttgcttctcacagaagctgcgactctagaccaggcctgcagccagaacgccgattccgggagcttgggagccctgcgtcagggcccagagcctcgcacttgctgtgtgcgaagatcgccttgctttactgtgaccacagccccgacgcggggctgtttaacaagaacttcagcgcagccggcgtttctgttaccccggccgcggctcttggcggcgggagaggcgcagtggctgcaggctgccccctgccggccacaagggagcagcgtccgcgccgccgcccaccggccctcccgccagctcctcagcctgctccctgggaggcaggctccagaagcaccccgacggggggccttattaagtgcgagaagcctctccagcgagtcttccccgtgtgtcctcatctgcggcaggcaggagagggggagcaaacaggaaattccacagctgcctccagaaacattaaccacccctctctagtcttactggtattttttgtttccttaataaagctccagtctccctcatttgagcaatactctcatttcctctgatgtctggatgatcggcagggcaggaatctgagcgctggccccgtggtgaggccatgttctcataatcaggctccagccagaaaaataagaaacaccgcaacaggcttcagtatcagggctgaaactgctggatgaataaactatttattaaaaacggatgtttcttgcc

SEQ ID NO: 73146 - DNA, 787 bp, Homo Sapiens
aaactataggctaggtacgaggcctgggtgttgaattcggcacgagggaacaccaggcccagacacacggtccctcaggtcaggaggagtgagcagccggcacagcctcctgggaggatcccgaagtagggactggggctgagagcagagaggagggtcgggcagccccagggcgggcgggcccgcctcagtgttgcttctcacagaagctgcgactctagaccaggcctgcagccagaacgccgattccgggagcttgggagccctgcgtcagggcccagagcctcgcacttgctgtgtgcgaagatcgccttgctttactgtgaccacagccccgacgcggggctgtttaacaagaacttcagcgcagccggcgtttctgttaccccggccgcggctcttggcggcgggagaggcgcagtggctgcaggctgccccctgccggccacaagggagcagcgtccgcgccgccgcccaccggccctcccgccagctcctcagcctgctccctgggaggcaggctccagaagcaccccgacggggggccttattaagtgcgagaagcctctccagcgagtcttccccgtgtgtcctcatctgcggcaggcaggagagggggagcaaacaggaaattccacagctgcctccagaaacattaaccacccctctctagtcttactggtattttttgtttccttaataaagctccagtctccctcatttgagcaatactctcatttcctctgatgtctggatgatcggcagggcaggaatctgagcgctggcc

SEQ ID NO: 73147 - DNA, 755 bp, Homo Sapiens
cgttcgacggagactctgctctccggtactggatgaatccaagttcagttgctccacatgctccctcaggtccgctttctcctccaggaggtccataagggcgcgtatgactcgcccccagtcccgtgaggctgggacagcggcctcgggctccttatcggccgaggtgagcgtctccatcacctggcccagcttctcctgcagctcctttacttgctgctccaactgcagtgcgctcttgttctcgtgcttcagctcctccaagtcgctctgtggctcggccagctgctgaagcctcttctcccgttcccgaagcctctcctgctgctcctgaagcccctcccgccagctcctcagcctgctccctgggaggcaggctccacaagcaccccgacggggggccttattaagtgcgagaagcctctccagcgagtcttccccgtgtgtcctcatctgcggcaggcaggagagggggagcaaacaggaaattccacagctgcctccagaaacattaaccacccctctctagtctgactggtattttttgtttccttaataaagctccagtctccctcatttgagcaatactctcatttcctctgatgtctggatgatcggcagggcaggaatctgagcgctggccccgtggtgaggccatgttctcataatcaggctccagccagaaaaataagaaacaccgcaacaggcttcagtatcagggctgaaactgctggatgaataaactatttattaaa

SEQ ID NO: 73148 - DNA, 1536 bp, Homo Sapiens
  misc_feature (1005)..(1013): n is a, c, g, or t
gtgttgtctgtgaatggggttttaactgtggatgaatggaccttatctgttggcttaaaggactggtaaaatcaaaccatcttattcttcaggtgaatgttttactttccaaagtgctctcctctgcaccagcagtaataaatacaatgccataatcccttaggtttgcctagtgcttttgcaattttcaaagcacttccataagcattccttccacctccttgataggcatttatggaaagcctgctacatgtcaatcatactgttaggcacaggggacctaaagacacataaaaggatggcattctgcctcataaattgcaaaacctaatgaaagtgactgcttggtaaacaaattattattatattataaaatgctataaaagagccatattgaaagtgccctgttggagacagggcaaatgccacaaaaatgatgtaaatttacatggaggaaaagtagaatctgcctggtttgtaggcagcagaagacatttttcatcagtgggcaggtgttctttaccttttgtagaaatgggagtcaagtctcaaataggaggctccacaaaatctcatgccaggtctctgataccttattcacagaagttctttgaagtatttattgttattttctttgacttatgggaaaactgggacacaggaagacaggtaaattacccaacctcacacgttaagtcagaactgggagccataattttgtatccctggtataaatagacaatctctcgaagaaatgaagagatgaccatagaaaaacatcgagatatctccagctctaaaatcctttgtttcaatgttgtttggcatatgttatctttggaatttagtgtctgagcctctgtctgttactgtagtatttaaaatgcatgtattataatcatataatcataactgctgttaattcttgattatatacctagggacaatgtgtaatgtaagattactaattggttctgcccaatctcctttcagattttattaggnnnnnnnnntaaacctcctgatcggagacaatgtattaatcagaagtgtaaactgccagttctatatagcatgaaatgaaaagacagctaatttggtccaacaaacatgactgggtctagggcacccaggctgattcagctgatttcctaccagcctttgcctcttccttcaatgtggtttccatgggaatttgcttcagaaaagccaagtatgggctgttcagaggtgcacacctgcattttcttagctcttctagaggggctaagagacttggtacgggccaggaagaatatgtggcagagctcctggaaatgatgcagattaggtggcatttttgtcagctctgtggtttattgttgggactattctttaaaatatccattgttcactacagtgaagatctctgatttaaccgtgtactatccacatgcattacaaacatttcgcagagctgcttagtatataagcgtacaatgtatgtaataaccatctcatatttaattaaatggtatagaagaacaaataaaaaaa

SEQ ID NO: 73149 - DNA, 2309 bp, Homo Sapiens
  misc_feature (111)..(205): n is a, c, g, or t
cgtttgagcgatgtttactaacggcgcaagggcggggagcgaagcgcagcggggcgcaggggccggaacgggaccgagcgtgggttgcatgggcctcgatgggacgggccnnnnnnnnnnnnnnnnnnnnnnnnnnnnnnnnnnnnnnnnnnnnnnnnnnnnnnnnnnnnnnnnnnnnnnnnnnnnnnnnnnnnnnnnnnnnnnncggggttccgtgccccagagtcgagggagccgtgggcttggggtccggatcgcggccgcggggcgctggcgtgcggtgtcatttctgcggtgtaaatgctcccaccttggccgatttcaagccaccaggtgaggatggcactgcaacatcttccactgaggctccagctgccctcgcaggggcgctggcgtgcggtgtcatttctgcggtgtaaatgctcccaccttggccgatttcaagccaccaggtgaggatggcactgcaacatcttccactgaggctccagctgccctctcaggtacatcagggcctggacgtcctctggggaggccacagaggaagggcctaggctaggaggtgcctctccattcagcacccgggccaggatccctgctagctggggtgtggagttctcctccaggagggccaggactcggccccctgccagcccccgaagcattgcagccaggagtgcagcgtgggggccctgcaggccatggccaggccccagcgccaccagcaccaggtcaggctggaagccataggccaggggcagcaccaagcccaagatgcagctcaggaaaccaccggtcatcactggcagtggcgtggagacatggaacatggatagggcagccgcctccttgcccctgatgttcagccacagactcctcccgtcatgggcgaggtctggaggccggtccagctgtcccagggccacgcacagcagcctctgggctccgtgggacaggcctctccgaacagccacatccagggtggctgctgcagcagaggctggagtggctgctataccactgttcacctgcccatccagcatcccatctaagaggtacaggagcttcccaagtgcagtgagggcctcctcccgggccagggactcgtgtggcctggcccaggcttctgtctcctccctcagggctgacgcttcctgttggatgacgtcagggggcagaaccaatgtgatatccggcgttgtcagggcaacagcggtgcggacagagggtgcggggcagaggcacgcctggtccaggagggagcttcggtgcagatgcagctgccttacacactggacccccaggcagcagaggtggaggcctcccctctggggagtggctgctggggctcatcggcacagcggtcacatcttgctgctggaggctcttccagtgcggggcctgggcagcacgggcactctggatggactctagggcactctgacatggcgccattggccctgacaggggtggggccgggtcacccagcagcgtctgtactgtcatgcacactgactccgccagtgactccaggtggtaggccgccctccagcacggcacagacccggccgccggccagcacctgcagcagctgtgtgaggtgggcgaagcactctggcgtggcctgcatttgcccctcagggtccccgatggctgagtcaaatcctgccgagaccagcaccagctcagggtcaaactcaaaggccagtgggagcagcaggtgcaggaaggcagccacgtagtcagcgtttcccatcccaacctggcaggacatcccaggctacatcctgaactggttccagggcaggttgacagtgaagccgaggccctgtccccgccccactgcgtctgcatctgactctcgcaggaaaggccagaagcgcccatgctcatagcggtgccaggagaagtaaaggacgctggggtcatcctcaaagagatactggatcccctggccatggtgcacatcccagtccacgacgaggatcctgtgtagcccgtgtttctgcttggcatgtgcagctgctatggccacgttgttgaacacacagaacccgttggcagccgccctctggccatggtgcccgggaggcctcaccagggcaagcccattttgcacagctccagtgagcacagcgtccaccagctgcagtccagcccctgcggccagccgcgcgcagtgaaaggtactctgtgcaccaggcccagctcctcttccgaggcctcgcgggctgacaaccgcagacacctctgttccagccgcgctgccgcaggcgatccagggctgcggtcaggcgctcagacgctcg

SEQ ID NO: 73150 - DNA, 722 bp, Homo Sapiens
cccgcccaggccggtgcccgccgcccgcctgcgccccaggcaggtcccaggcctccggctgctcccggccgaagccccgagtgcgagatcgagcgtcctgagcgcctgaccgcagccctggatcgcctgcggcagcgcggcctggaacagaggtgtctgcggttgtcagcccgcgaggcctcggaagaggagctgggcctggtgcacagggagacccaggtcctaggcaaggaggagctgcaggcgctgtccggacagttcgacgccatctacttccacccgagtacctttcactgcgcgcggctggccgcaggggctggactgcagctggtggacgctgtgctcactggagctgtgcaaaatgggcttgccctggtgaggcctcccgggcaccatggccagagggcggctgccaacgggttctgcgtgttcaacaacgtggccatagcagctgcacatgccaagcagaaacacgggctacacaggatcctcgtcgtggactgggatgtgcaccatggccaggggatccagtatctctttgaggatgaccccagcgtcctttacttctcctggcaccgctatgagcatgggcgcttctggcctttcctgcgagagtcagatgcagacgcagtggggcggggacagggcctcggcttcactgtcaacctgccctggaaccaggttgggatgggaaacgctgactacgtggctgccttcctgca

SEQ ID NO: 73151 - DNA, 1008 bp, Homo Sapiens
ctcggggcgccgaggcttcgcgcccgctggttcctcgctccggggcggagctcgcgatagcgaccgggagcaggcgcggggcgggacccaggtccgaggcgaggaagccggaagccaggcgcggggagcctcccccttcgactgcagcctcgctccgtgccttctgcgcgcctgggatcccggagcctgcctaggttctgtgcgctcccgcccaggccggtgcccgccgcccgcctgcgccccaggcaggtcccaggcctccggctgctcccggccgaagccccgagtgcgagatcgagcgtcctgagcgcctgaccgcagccctggatcgcctgcggcagcgcggcctggaacagaggtgtctgcggttgtcagcccgcgaggcctcggaagaggagctgggcctggtgcacagagtacctttcactgcgcgcggctggccgcaggggctggactgcagctggtggacgctgtgctcactggagctgtgcaaaatgggcttgccctggtgaggcctcccgggcaccatggccagagggcggctgccaacgggttctgcgtgttcaacaacgtggccatagcagctgcacatgccaagcagaaacacgggctacacaggatcctcgtcgtggactgggatgtgcaccatggccaggggatccagtatctctttgaggatgaccccagcgtcctttacttctcctggcaccgctatgagcatgggcgcttctggcctttcctgcgagagtcagatgcagacgcagtggggcgggggacagggcctcgggcttcactgtcaacctgccctggaaccaggatttgactcagccatcggggaccctgaggggcaaatgcaggccacgccagagtgcttcggccaccttcacacagcttgcttgcagggtgctggccggcggccgggtcttgtgccgtgctggagggcgggttacacctggagtcactggcggggtcaggtgttcattaccgtacggacgctgctgggttacc

SEQ ID NO: 73152 - DNA, 1053 bp, Homo Sapiens
ttcgactgcagcctcgctccgtgccttctgcgcgcctgggatcccggagcctgcctaggttctgtgctgctcccgcccaggcctggtgcccgccgcccgcctgcgccccaggcaggtcccaggcctccggctgctcccggccgaagccccgagtgcgagatcgagcgtcctgagcgcctgaccgcagccctggatcgcctgcggcagcgcggcctggaacagaggtgtctgcggttgtcagcccgcgaggcctcggaagaggagctgggcctggtgcacagcccagagtatgtatccctggtcagggagacccaggtcctaggcaaggaggagctgcaggcgctgtcctggacagttcgacgccatctacttccacccgagtacctttcactgcgcgcggctggccgcaggggctggactgcagctggtggacgctgtgctcactggagctgtgcaaaatgggcttgccctggtgaggcctcccgggcaccatggccagagggcggctgccaacgggttctgcgtgttcaacaacgtggccatagcagctgcacatgccaagcagaaacacgggctacacaggatcctcgtcgtggactgggatgtgcaacatggccagggggatccagtatctctttgaggatgaccccagcgtcctttacttctccttggcaccgctatgagcatgggcgcttctggcctttcctgcgaggagtcagatgcagacgcagtgggggcggggacacgggcctcggctacacttgtcaacctgccctggaaccacgttggggatgggaaacgctgactaacgtggctgcctacctgcacctgctgctccactgggcctttgagtttgaccctggagctggtgctgggcctcggcaggaatttgactcagccatcggggggaccctggaggggcaaaatgcaggccccccgcccgaattgctttcgccccacctcacaccagctgcctggaggggccgggctaaccaccctggagggtcacttggggcgggaaatccagggggggccattgaacaattaacacaa

SEQ ID NO: 73153 - DNA, 895 bp, Homo Sapiens
tgcagcctcgctcgtgccttctgcgcgcctgggatccggagcctgcctaggttctgtgcgctcccgcccaggccggtgcccgccgcccgcctgcgccccaggcaggtcccaggcctccggctgctcccggccgaaggtggggacaggcagtggcaggcacctactagcgagggcgtttgggaacccaggttgaccacggtgcagccatggggaccgcgcttgtgtaccatgaggacatgacggccacccggctgctctgggacgaccccgagtgcgagatcgagcgtcctgagcgcctgaccgcagccctggatcgcctgcggcagcgcggcctggaacagaggtgtctgcggttgtcagcccgcgaggcctcggaatgaggagctgggcctggtgcacagagtacctttcactgcgcgcggctggccgcaggggctggactgcagctggtggactgctgtgctcactggagctgtgcaaaatgggcttgccctggtgaggcctcccgggcaccatggccagagggcggctgccaacgggttcttgcgtgttcaacaacgtggccatagcagctgcacatgccaagcagaaaccacgggctacacaggatcctcgtcgtggacttgggatgtgcaccatggccaggggatccagtatctctttgaggatgaccccagcgtcctttacttctcctggcaccgctatgagcatgggcgctactggcctttcctgcgagagtcagatgcagacgcaatgaggcggggacagggcctcggcttcactgtcaacctggcctgggaagcaggatgggatggggaaacgctgactacgtggctgacttcctgaacctgctgatccaacagacctatgaggtgactgcacggagggataccca

SEQ ID NO: 73154 - DNA, 497 bp, Homo Sapiens
ccatcctgcttgatggagcccgttaagacccttaaaaataaaagaattgcaagccccccctgttgtaagaggcgaggaaaattttgggtccggccactcccccagccaaaatttttccctctctgccgggcaccttccctataagatcgattttgtcaagggtccagaatggtgctagatgacggggcatctttctagaaggcaatgtatcctgattacttggccaagagagaacagtggaagaaactgcgggagggaaagctgggaacgaaaggttaagcagctgcaggaggaaacgcccacctggtggtcctttaactgaagctttgccccctgcccgaaaggaaggtgatttgcccccactgtggtggtatattgtgaccagaccccgggagcggcccatgtagaaagagagagacctcatctttcatgcttgcaagtgaaatatgttacagaacatgcacttgccctaataaaaaatcagtgaaatggtcaaa

SEQ ID NO: 73155 - DNA, 799 bp, Homo Sapiens
  misc_feature (746)..(754): n is a, c, g, or t
cagtcgacggtaccggacatatgcccgggaattcggccattacggccggggagcgccgtaatggcgttcttggcgtcgggaccctacctgacccatcagcaaaaggtgttgcggctttataagcgggcgctacgccacctcgagtcgtggtgcgtccagagagacaaataccgatactttgcttgtttgatgagagcccggtttgaagaacataagaatgaaaaggatatggcgaaggccacccagctgctgaaggaggccgaggaagaattctggtaccgtcagcatccacagccatacatcttccctgactctcctgggggcacctcctatgagagatacgattgctacaaggtcccagaatggtgcttagatgactggcatccttctgagaaggcaatgtatcctgattactttgccaagagagaacagtggaagaaactgcggagggaaagctgggaacgagaggttaagcagctgcaggaggaaacgccacctggtggtcctttaactgaagctttgccccctgcccgaaaggaaggtgatttgcccccactgtggtggtatatcgtgaacagaacccgggagcggccatgtagaaagagagagacctcatctttcatgcttgcaagtgacatatgttacagaacatgacttgccttaataagaaatcagtgaatggtcagaagaagataagagaagaaaaaatttgggggggacgaggcgggaagggttaaacaagtgtnnnnnnnnncaaggtagacgggaatggacccagaaacggaggaaggggtgattc

SEQ ID NO: 73156 - DNA, 803 bp, Homo Sapiens
gggccagtaactatccacggtcgtaatggtagcgaggcctgggtggcgaattcggcacgaggccccgctcagtcacccgcagcaggcgtgcagtttcccggctctccgcgcggccggggaaggtcagcgccgtaatggcgttcttggcgtcgggaccctacctgacccatcagcaaaaggtgttgcggctttataagcgggcgctacgccacctcgagtcgtggtgcgtccagagagacaaataccgatactttgcttgtttgatgagagcccggtttgaagaacataagaatgaaaaggatatggcgaaggccacccagctgctgaaggaggccgaggaagaattctggtaccgtcagcatccacagccatacatcttccctgactctcctgggggcacctcctatgagagatacgattgctacaaggtcccagaatggtgcttagatgactggcatccttctgagaaggcaatgtatcctgattactttgccaagagagaacagtggaagaaactgcggagggaaagctgggaacgagaggttaagcagctgcaggaggaaacgccacctggtggtcctttaactgaagctttgccccctgcccgaaaggaaggtgatttgcccccactgtggtggtatattgtgaccagaccccgggagcggcccatgtagaaagagagagacctcatctttcatgcttgcaagtgaaatatgttacagaacatgcacttgccctaataaaaaatcagtgaaatggtaaaaacccccttgtccgacccaaaacattggcccattgcccgg

SEQ ID NO: 73157 - DNA, 765 bp, Homo Sapiens
  misc_feature (24)..(24): n is a, c, g, or t
  misc_feature (600)..(633): n is a, c, g, or t
cccaattcctgcattgttaatatntgtgaggaaaagtgaaacaagtgatctgttttagcccagatgatgaaagtggatatggcacattttcacacacgtgagataattacagcttgccccacaacactgggtgttggagaaagggagagatagtcataagtggaagaaaaagccaagcatagtgagtgggaaagagagtgagagcctgtgcaggctgctgacgagccccaggcagcccacaagtttctcgtggggagatggaggcagagcccagggtaggggacagagctgctggggcctttccttgcctgggaatctgtcccaggaagagcttccccactcccatcccccaaattggaaaaaccgtacattcaagcctgtttggccctgaaattcttaagaatctggttaagaattaactcactaatgtcaaaagtcaaaacctcctaggggttgtcctgggagtcaggttcacgggtacagaagatgaatctcagatgtcactcaacctgagccgtcattctctgtggcagggctgccctgggtttctcttactcaatccctggagtgtaagcatttggattgtgtcacagattaccnnnnnnnnnnnnnnnnnnnnnnnnnnnnnnnnnncaatatcagtgcccacaccttactgagtattgagttttagagctttcgcttgatgtgcttgaccaagagacttcttttgtatccttttcttgtcctatgatgtaaataaaagcctcgatttatgtaaaaaaa

SEQ ID NO: 73158 - DNA, 1021 bp, Homo Sapiens
  misc_feature (293)..(304): n is a, c, g, or t
  misc_feature (529)..(538): n is a, c, g, or t
cagtcgacggtaccggacatatgcccgggaattcggccattacggccgggtgcttctttttattgacatgatagataaatatgtatctacacagagtaataataataaaacacagtaaacattctatttctctatggtctacagcatgccagtaaataatatgtaggaccaataataaattatcaattacacatttttgtgttaactaattaaaagcatagtgtataagtgagtacactctaattaacttgcttctgttgcactttagttttctacctgcatatggactgcannnnnnnnnnnnaacacagtcagtatgtagaatgggatgtattcttctgctgctgcttattaaataaagaaagcctgagtgttcttagatggggttattctgagatgagggtcttagcctacagttctttttgaacactgaacaggtgcttggttttttaattatattcatcttttcagggtaaattggttttcctgagtttctcgtaatgctcatttttacatgctgctactagcnnnnnnnnnnaaaacaaagtaaaagttgctgctttctaaaatattaatggccttatatttgaaagtgccattgcaatcgtaagtagactatgtatttcctataatgatgtctgatatttaaataggaaatcagacaaacaatattcagaaagtttaagcatataaactttttatttttaacttgcctaaatccctgtattccaaaacctgctgcatcataataaatatatctatatatatttagcataagacgtgatatttttaatttcttttttaaaaaattatatttgtctcttagagttaaaattttctttatataatattgtcatatgtcatagttttaatacaattcacatgatttctatgtttcttaatgatattttgttgtgtaaaattgatcggattgattaaaaaacaaattctctggaatttgtgcgttcatgctttttcgtattctttatggcttttaaataaatatacaatggttaatagt

SEQ ID NO: 73159 - DNA, 717 bp, Homo Sapiens
tgaaattggagtaaaagtttaataagtgaaagaaaaaagctctccacagtggagatggggatccaaataagttgcccagtatgaggctggggtccggggtttttatggactgggaaggggaaggaatgcacttaccctgcgggctgtcttggagaaagcgtgattcagcttggtctgggaccttggcccgggaccaatcaggaaccgaagtgatgattcataagggctattcagcttggcccgggaccaatcaggagttgaagtgatgattcctaagggctattcagcttggcctgggaccaatcaggagctgaagtgatgatttacagaggctgggcttttccttttccacaaaagaaagtgccaacctgaacctactgaagcccactgtgttcatgcccacaaaagaagaaactttttcctcggagcctgctgattatacaaaggacaaaggcatttctgtgtctggtcttgttcccttaactgagtgagccggaggtttgtgcgagtttttacctgaatgggctggaggttcttctatctgtgcagccatgggcatgtctccaggcacaatcccctgtgctagttcccttatcagtgcctgtagcttgattgtcttccccaggctgctttttgtgttatgtggggatgagacactgacccgtttggctgggggtctccagggacccttcccttgctgtctaccaactcctctca

SEQ ID NO: 73160 - DNA, 1234 bp, Homo Sapiens
  misc_feature (429)..(440): n is a, c, g, or t
tcctgaggaagttgtattagctgttaatgctctgtgagttcagaaaaagtcttgatagtaaatctagttttcgacacagtgcatgaactaagtagttaaatattaacatattcagaaaggaatagtggaaaaggtatcttggttatgacaaagtcattacaaatgtgactaagtcattacaaatgtgactgagtcattacagtggaccctctgggtgcattgaaaagaatccgttttatatccaggtttcagaggacctggaataataaaaagctttggattttgcattcagtgtagttggattttgggaccttggcctcagtgttatttactgggattggcatacgtgttcacaggcagagtagttgatctcacacaacgggtgatctcacaaaactggtaagtttcttatgctcatgagccctcccnnnnnnnnnnnnaatttggtgcctgcaactttcttaacaatgattctacttcctgggctatcacattataatgctcttggcctcttttttgctgctgttttgctattcttaaacttaggccaagtaccaatgttggctgttagaagggattctgttcattcaacatgcaactttagggaatggaagtaagttcatttttaagttgtgttgtcagtaggtgcggtgtctagggtagtgaatcctgtaagttcaaatttatgattaggtgacgagttgacattgagattgtccttttccctgatcaaaaaatgaataaagcctttttaaacaaaatccaaacttttaatcaagtcttgatatgtatgactgagaaaaaatacactacatctagagatgattgagatgttttgcaaagaattgaagggggagtgagaattggtttttcttgcaggggctttgaactctagatttaattcagatttcagggtctatcagttcaccaactgatgcaaatttgaacagatactctaaggctaagtgtcctaggttggatgaactgaagctactatcaagatctcgttcccaaggattaatttagaacaaagtaattggacaagtttattggggaggggatagaaatgaattctaaagtacctataacaaatactctgtgtatgttttttacatcgtatttgccttttacattgtttagaccaaattctgtgtgatgttatcctcgggaagaggatagaaattaattctaaagtacctataacaaatgctcggtttgtatatgtttttataaa

SEQ ID NO: 73161 - DNA, 1101 bp, Homo Sapiens
tctgcatgttcacatggctcgctgactccaaactacaagtcaagggcctctcgttaggagttacccgtcacctgaccgtgtgcccccctacccccatcacaagatgcctgaccaccaccatgtggggtggcctgatactcaacccaccaggtgctgccacccccataataagggacttgaccctcaatgctcagggcccctgaccccaaagtcggcatccccgaactctcccaagaagctccaggttctccattgtctccaacctcctctgccccccccaaagcctccattctcagtaagaaactcgtggaggggctgtccgctctggtggtggacgttaagttcggaggggccgccgtcttccccaaccaggagcaggcccgggagctggcaaagacgctggttggcgtgggagccagcctagggcttcgggtcgcggcagcgctgaccgccatggacaagcccctgggtcgctgcgtgggccacgccctggaggtggaggaggcgctgctctgcatggacggcgcaggcccgccagacttaagggacctggtcaccacgctcgggggcgccctgctctggctcagcggacacgcggggactcaggcccagggcgctgcccgggtggccgcggcgctggacgacggctcggcccttggccgcttcgagcggatgctggcggcgcagggcgtggatcccggtctggcccgagccctgtgctcgggaagtcccgcagaacgccggcagctgctgcctcgcgcccgggagcaggaggagctgctggcgcccgcagatggcaccgtggagctggtccgggcgctgccgctggcgctggtgctgcacgagctcggggccgggcgcagccgcgctggggagccgctccgcctgggggtgggcgcagagctgctggtcgacgtgggtcagaggctgcgccgtgggaccccctggctccgcgtgcaccgggacggccccgcgctcagcggcccgcagagccgcgccctgcaggaggcgctcgtactctccgaccgcgcgccattcgccgccccctcgcccttcgcagagctcgttctgccgccgcagcaataaagctcctttgccgcg

SEQ ID NO: 73162 - DNA, 850 bp, Homo Sapiens
  misc_feature (63)..(97): n is a, c, g, or t
ggggctagctgctgttatagccgaacgacgagcgcaggagtcatgtgagcgaggaagcggcgnnnnnnnnnnnnnnnnnnnnnnnnnnnnnnnnnnncagtcgacggtaccggacatatgcccgggaattcggccattacggccgggggctccagaccaggccccttggagcaggaaaaagatccactgatggaattcagacccctttccccttgggtcccagacagctcccccaagggaggagctgaggacttccctccctctgccccaagccttgtttccccaaggacaggtaccaaactcctcccctactgacacttctcaaccaagaaaacttcctttccattccctcaccagctgggcacccctatagctgcttaaatactttccaaatccagctgcactcctagccagggaaggtgaagggatgcacagaggtgggggaggggtactgtgcagggtactcagcatccctgaccaccaggtgccaatgatcagcggacgtggtctggggcacacaggaggcaccttggataagctggagtctattcctggattcaatgtcatccagagcccagagcaggtacggggcgccacggatcagtcattgatccaggttgatgatggagaccctggccagaatcactaaaagatcactcgagtggatcattagggtcactaatgagcacactgatcaaggcatactcatgagtcaatgggccaggaccgaaatcatcagtggaactatgacgtaggatcaaaaaatgggaagttggacaaaatcacagatggctgccgggacacgctggctcacacctgtagtcctagcactaggagaggccgaagaggg

SEQ ID NO: 73163 - DNA, 1084 bp, Homo Sapiens
cgctgtggagcggcccgcgtgggttggatgagcggctgtacggtccggattcccgggattcggcgacccacgcgtccgcttcgccccgccgccggcagtggaccgctgtgcgcgaaccctgaaccctacggtcccgacccgcgggcgaggccgggtacctgggctgggatccggagcaagcgggcgagggcagcgccctaagcaggcccggagcgatggcagccttgatgaccccgggaaccggggccccacccgcgcctggtgacttctccggggaagggagccagggacttcccgacccttcgccagagcccaagcagctcccggagctgatccgcatgaagcgagacggaggccgcctgagcgaagcggacatcaggggcttcgtggccgctgtggtgaatgggagcgcgcagggcgcacagatcggggccatgctgatggccatccgacttcggggcatggatctggaggagacctcggtgctgacccaggccctggctcagtcgggacagcagctggagtggccagaggcctggcgccagcagcttgtggacaagcattccacagggggtgtgggtgacaaggtcagcctggtcctcgcacctgccctggcggcatgtggctgcaaggtgccaatgatcagcggacgtggtctggggcacacaggaggcaccttggataagctggagtctattcctggattcaatgtcatccagagcccagagcagatgcaagtgctgctggaccaggcgggctgctgtatcgtgggtcagagtgagcagctggttcctgcggacggaatcctatatgcagccagagatgtgacagccaccgtggacagcctgccactcatcacagcctccattctcagtaagaaactcgtggaggggctgccgccctggtggtggaccgttcacgtgcggcaggggccgcgtcttccctacccgggagcaggcccgggagctgccaagacgctggttggcgtggagccgcctatggctcgggtccggcaccttcaccgcagggcagaactgggtccttgctgggcccgcctggcgtggaggaggcgctgctcgctggg

SEQ ID NO: 73164 - DNA, 1152 bp, Homo Sapiens
gtagcgaggcctgggtggcgaattcggcacgagggcgaaccctgaaccctacggtcccgacccgcgggcgaggccgggtacctgggctgggatccggagcaagcgggctgagggcagcgccctaagcaggtacgggcggggctcaagtcgcgaggcggcggaagcgggaggcagacacggacgagggcgacacagacacgggaccgaggggcggacaccggagagacacgggaaaagggggtcgggacaggagcacgtggctcagacaccgacgccgggaggccgcagaccccggacgtgtcaggcatccccgctaggcccggagcgatggcagccttgatgaccccgggaaccggggccccacccgagcctggtgacttctccggggaagggagccagggacttcccgagcccttcgccagagcccaagcagctcccggagctgatccgcatgaaagcgagacggaggccgcctgagcgaagcggacatcaggggcttcgtggccgctgtggtgaatgggagcgcgcagggcgcacagatcggggccatgctgatggccatccgacttcggggcatggatctggcaggagacctcggtgctgacccaggccctggcatcagtccgggacagcagctggagttggccagaggcctggcagcaagcagacttgtggacaaagcataccacaagcggggatgtgagtagaccagggatcagactaggatcatcagaacttgacctagcggcatgtagccatgcaaggatgcaaagtggattcagcggacgatggacatgaggccaccaccaggacggaagccttgcgatacgcctgcagacaaattccgagagacaaaaggcaatcagatgacacagaccagacgaagtgctagaggaccagtaggaagaagaacacaggaaacgggagcaagtggtactgagaaaggaaggtattggacacaagagtgaacaaaagaggccaaaggaagccagaaagccagtgaagaccacagagaagcgagaagaagggacacaatcgagagcaacaatcaagggaggcagagaaagacgaagaacaacacaaaagaggtcgagagaaagccgaagagcataagaacagcaaagatgagcataaagtgccggcggcaaaaat

SEQ ID NO: 73165 - DNA, 2993 bp, Homo Sapiens
  misc_feature (1992)..(1992): n is a, c, g, or t
  misc_feature (2851)..(2890): n is a, c, g, or t
  misc_feature (2899)..(2930): n is a, c, g, or t
ctcctcttcagaggagaaagaaacagataacaccaaaccaaaccccgtagctccatattggacatccccagaaaagatggaaaagaaattgcatgcagtgccggctgccaagacagtgaagttcaaatgcccttccagtgggaccccaaaccccacactgcgctggttgaaaaatggcaaagaattcaaacctgaccacagaattggaggctacaaggtccgttatgccacctggagcatcataatggactctgtggtgccctctgacaagggcaactacacctgcattgtggagaatgagtacggcagcatcaaccacacataccagctggatgtcgtggagcggtcccctcaccggcccatcctgcaagcagggttgcccgccaacaaaacagtggccctgggtagcaacgtggagttcatgtgtaaggtgtacagtgacccgcagccgcacatccagtggctaaagcacatcgaggtgaatgggagcaagattggcccagacaacctgccttatgtccagatcttgaagactgctggagttaataccaccgacaaagagatggaggtgcttcacttaagaaatgtctcctttgaggacgcaggggagtatacgtgcttggcgggtaattatatcggactctccatcactctgcatggctcactgtcaccagacctgtggcaaaagccctggaagagaggccggcagtgatgacctcgcccctgtacctggagatcatcatctattgcacaggggccttcctcatctcctgcatggtggggtcggtcatcgtctacaagatgaagagtggtaccaagaagagtgacttccacagccagatggctgtgcacaagctggccaagagcatccctctgcgcagacaggtaacagtgtctgctgactccagtgcatccatgaactctggggttcttctggttcggccatcacggctctcctccagtgggactcccatgctagcaggggtctctgagtatgagcttcccgaagaccctcgctgggagctgcctcgggacagactggtcttaggcaaacccctgggagagggctgctttgggcaggtggtgttggcagaggctatcgggctggacaaggacaaacccaaccgtgtgaccaaagtggctgtgaagatgttgaagtcggacgcaacagagaaagacttgtcagacctgatctcagaaatggagatgatgaagatgatcgggaagcataagaatatcatcaacctgctgggggcctgcacgcaggatggtcccttgtatgtcatcgtggagtatgcctccaagggcaacctgcgggagtacctgcaggcccggaggcccccagggctggaatactgctacaaccccagccacaacccagaggagcagctctcctccaaggacctggtgtcctgcgcctaccaggtggcccgaggcatggagtatctggcctccaagaagtgcatacaccgagacctggcagccaggaatgtcctggtgacagaggacaatgtgatgaagatagcagactttggcctcgcacgggacattcaccacatcgactactataaaaagacaaccaacggccgactgcctgtgaagtggatggcacccgaggcattatttgaccggatctacacccaccagagtgatgtgtggtctttcggggtgctcctgtgggagatcttcactctgggcggctccccataccccggtgtgcctgtggaggaacttttcaagctgctgaaggagggtcaccgcatggacaagcccagtaactgcaccaacgagcttcctgccgcaggtacatgatgatgcgggactgctggcatgcagtgccctcacagagacccaccttcaagcagctggtggaagacctggaccgcatcgtggccttgacctccaaccaggagtacctggacctgtccatgcccctggaccagtactcccccagctttcccgacacccggagctctacgtgctcctcagggngaggattccgtcttctctcatgagccgctgcccgaggagccctgcctgccccgacacccagcccagcttgccaatggcggactcaaacgccgctgactgccacccacacgccctccccagactccaccgtcagctgtaaccctcacccacagcccctgctgggcccaccacctgtccgtccctgtccccttttcctgctggcagggacccggctgcctaccagggggccttcctgtgtggcctgccttcaccccactcagctcacctctccctccacctcctctccacctgctggtgagaggtgcaaagaggcagatctttgctgccagccacttcatcccctcccagatgttggaccaacacccctccctgccaccaggcactgcctggagggcagggagtgggagccaatgaacaggcatgcaagtgagagcttcctgagctttctcctgtcggtttggtctgttttgccttcacccataagcccctcgcactctggtggcaggtgccttgtcctcagggctacagcagtagggaggtcagtgcttcgtgcctcgattgaaggtgacctctgccccagataggtggtgccagtggcttattaattccgatactagtttgctttgctgaccaaatgcctggtaccagaggatggtgaggcgaaggccaggttgggggcagtgttgtggccctggggcccagccccaaactgggggctctgtatatagctatgaagaaaacacaaagtgtataaatctgagtatatatttacatgtctttttaaaagggtcgttaccagagatttacccatcgggtaagatgctcctggtggctgggaggcatcagttgctatatattnnnnnnnnnnnnnnnnnnnnnnnnnnnnnnnnnnnnnnnngtcatatannnnnnnnnnnnnnnnnnnnnnnnnnnnnnnnaaattatgttcgtaacctattttcagtttaggtccctcaataaaaattgctgctgcttcattt

SEQ ID NO: 73166 - DNA, 901 bp, Homo Sapiens
agggggagagagtatgaagtcgacggcgcgccgaattcggcacgaggtggaaaagaaattgcatgcagtgccggctgccaagacagtgaagttcaaatgcccttccagtgggaccccaaaccccacactgcgctggttgaaaaatggcaaagaattcaaacctgaccacagaattggaggctacaaggtccgttatgccacctggagcatcataatggactctgtggtgccctctgacaagggcaactacacctgcattgtggagaatgagtacggcagcatcaaccacacataccagctggatgtcgtggagcggtcccctcaccggcccatcctgcaagcagggttgcccgccaacaaaacagtggccctgggtagcaacgtggagttcatgtgtaaggtgtacagtgacccgcagccgcacatccagtggctaaagcacatcgaggtgaatgggagcaagattggcccagacaacctgccttatgtccagatcttgaagactgctggagttaataccaccgacaaagagatggaggtgcttcacttaagaaatgtctcctttgaggacgcaggggagtatacgtgcttggcgggtaactctatcggactctcccatcactctgcatggttgaccgttctggaagccctggaagagaggccggcagtgatgacctcgcccctgtacctggagatcatcatctattgcacaggggccttcctcatctcctgcatggtggggtcggtcatcgtctacagatgagagtgtacaagaagatgactcaaagcagatgctgtgccactggcagacatcctcgccaacggtacatgctgctgatcatgctctgacctggtctctgtcgctcagtcctcatgatcagcacagtctgatgactcaact

SEQ ID NO: 73167 - DNA, 817 bp, Homo Sapiens
gcagtgtgggcatcctgccagaggtgcacaggctggagtttcaggcactgcaggctgatgacacacagggagagtgtgcctgcctcctgtcctccccggggttttttgcagactcgaagtctcactgcaccagtgtctctgatggtggtgagggtgggtgatggtgcccagcaccaacagttttagtggcctgtccttgacctgccgtggtcctttgtaaactatggctccatgctgtgtgacagatcaacgtgctgatggtaagtagactaggcttccccaggcatgccgtccgtgggggcctgaagagacagtgagtgccattggccccattcgcagatgtgggagactctgctcaggcctgtgaggctgggcagcccttcaccagagttcggaggagcagtgtgtggcgccacgtcccgactggccatacccacacagaagcagtgctgcccggggcctcatctgggccagcttggactctgcttcctccaggagcagcagggaagctctgggccacctccctggatagcaggaacttgacctgccatgtgtgccctgccttcctggccagctgtgcttgttatcttccattctcacaaactgtctttgaagcaatagaataaagaatgtgtgttttctttcctggtatacatacatgatcccatgctcccaagctccattcttccttccctcaactctctgccctccacagagctatggagaaggctggagatgaaagctttgtagtgaggactgataaagatctcatcactgctccttataataaacctaataaagcaagaaaccaaaaaaa

SEQ ID NO: 73168 - DNA, 699 bp, Homo Sapiens
  misc_feature (12)..(12): n is a, c, g, or t
  misc_feature (253)..(266): n is a, c, g, or t
  misc_feature (269)..(293): n is a, c, g, or t
accagctcatcntgcatggattttgagggtgctaataaaacctccttaggaactctctttgtcccacagcgaaaactggaagtctcaacagaggatgtccattaatcaacagatgttggcttagtttaattttctaaagagttgtttaatagagaaaatgtacacagactgatttggagaacacattctctgaaaatactgtaaatacgttggggatttgttcaatgtgaaatcagatagttgttttcatacnnnnnnnnnnnnnnatnnnnnnnnnnnnnnnnnnnnnnnnntatatttgtataaagctaagtttagctttcaatcctacaaaataaaagtaaaatgttgaactctaagatatattaacttctagggggaaaaatccattattttagctatgcctatactattatgcaaagtaactgtattaaagtttacttccctctaagcaagtatgcttgacatgcctaacacagcattcccttaaacattttgcacaaagaaaatgctgtgtgatgtataatgttgtatttttaaataggggtatagctatattttttgtaatttctttaatctgttgttgcagtgtatctttttgtaaagtttgcaacaatcctcaatcaagtctatggaaaaattatttataaaatgtatttttaatcataagttgttcaaattaaaacttttctaaaatat

SEQ ID NO: 73169 - DNA, 3190 bp, Homo Sapiens
  misc_feature (193)..(252): n is a, c, g, or t
  misc_feature (2290)..(2333): n is a, c, g, or t
tccctcccacctccaaagttcatacttcgtcgcctaacaagccaaggtagcgaggcctgggtggcgaattcggcacgaggcaagatggcggcgctgactcctggagagcggtcgcgccggaggccgcgggggccggagcggagcagccgcggctgaggttcccgagtcgccgctcggggctgcgctccgccgnnnnnnnnnnnnnnnnnnnnnnnnnnnnnnnnnnnnnnnnnnnnnnnnnnnnnnnnnnnnacatggtgccagtcgcaccccttccccgccgccgctgagctcgccggccgcgcccgggctgggacgtccgagcgggaagatgttttccgccctgaagaagctggtggggtcggaccaggccccgggccgggacaagaacatccccgccgggctgcagtccatgaaccaggcgttgcagaggcgcttcgccaagggggtgcagtacaacatgaagatagtgatccggggagacaggaacacgggcaagacagcgctgtggcaccgcctgcagggccggccgttcgtggaggagtacatcccccacacaggagatccaggtcaccagcatccactggagctacaagaccacggatgacatcgtgaaggttgaagtctgggatgtagtagacaaaggaaaatgcaaaaagcgaggcgacggcttaaagatggagaacgacccccaggaggcggagtctgaaatggccctggatgctgagttcctggacgtgtacaagaactgcaacggggtggtcatgatgttcgacattaccaagcagtggaccttcaattacattctccgggagcttccaaaagtgcccacccacgtgccagtgtgcgtgctggggaactaccgggacatgggcgagcaccgagtcatcctgccggacgacgtgcgtgacttcatcgacaacctggacagacctccaggttcctcctacttccgctatgctgagtcttccatgaagaacagcttcggcctaaagtaccttcataagttcttcaatatcccatttttgcagcttcagagggagacgctgttgcggcagctggagacgaaccagctggacatggacgccacgctggaggagctgtcggtgcagcaggagacggaggaccagaactacggcatcttcctggagatgatggaggctcgcagccgtggccatgcgtccccactggcggccaacgggcagagcccatccccgggctcccagtcaccagtggtgcctgcaggcgctgtgtccacggggagctccagccccggcacaccccagcccgccccacagctgcccctcaatgctgccccaccatcctctgtgccccctgtaccaccctcagaggccctgcccccacctgcgtgcccctcagcccccgccccacggcgcagcatcatctctaggctgtttgggacgtcacctgccaccgaggcagcccctccacctccagagccagtcccggccgcacagggcccagcaacggtccagagtgtggaggactttgttcctgacgaccgcctggaccgcagcttcctggaagacacaacccccgccagggacgagaagaaggtgggggccaaggctgcccagcaggacagcgacagtgatggggaggccctgggcggcaacccgatggtggcagggttccaggacgatgtggacctcgaagaccagccacgtgggagtcccccgctgcctgcaggccccgtccccagtcaagacatcactctttcgagtgaggaggaagcagaagtggcagctcccacaaaaggccctgccccagctccccagcagtgctcagagccagagaccaagtggtcctccataccagcttcgaagccacggagggggacagctcccacgaggaccgcagcacccccctggccaggcggtgtctctgttcgcacaggtccggagaagcgcagcagcaccaggccccctgctgagatggagccggggaagggtgagcaggcctcctcgtcggagagtgaccccgagggacccattgctgcacaaatgctgtccttcgtcatggatgaccccgactttgagagcgagggatcagacacacagcgcagggcggatgactttcccgtgcgagatgacccctccgatgtgactgacgaggatgagggccctgccgagccgcccccaccccccaagctccctctccccgccttcagactgaagaatgactcggacctcttcgggctggggctggaggaggccggacccaaggagagcagtgaggaaggtaaggagggcaaaaccccctctaaggnnnnnnnnnnnnnnnnnnnnnnnnnnnnnnnnnnnnnnnnnnnntgctgccaagaatgaagagcaaacacaagaagagcaaggacaaggaggagggcaaggaggagcggcgacggcggcagcagcggcccccgcgcagcagggagaggacggctgccgatgagctggaggctttcctggggggcggggccccgggcggccgccaccctgggggtggcgactacgaggagctctaggccggcgtgggcagtggccgccctggggcggggggcgtgcctgtcactgcctggggaggcatttgcctctgtaccatcgcctttgccgctgccccgtggctgccgtgtgcgcttctgagctggaagaggccgggcattggtggtccccaggctgggccctgcaggtgctgggccttcaggcccagtgtgagcctgctctgcaagaagggaggggacagctggcttcagccaggctcggtggacaccctggccctctcggggcagagccgccagtgtttctcagggatgtgactgaggcccaggagggacctgtgagggtctgtttacagaggctgggcaggggccgcttggctgtggggtgtgcgctgccccggcacctgcttgccctccgcgctcatctggggccgcagcatgcctatggttccgcttccggccgggagccctgaacacgggtgtgcagactcaccctaaagggcggcccaggccccacgctagaaggctggcgagaccgaaggcagcatgtgaggcctctcctgggagtgggggttgtgtttcccacagtggcctcagctgcgcccccgctcaggtgagcccgaaggcaggagccgggaggcactcctcccaaacactccactcagaccataaagcactcctgtttcactctgc

SEQ ID NO: 73170 - DNA, 877 bp, Homo Sapiens
cgcggcgctgttttgaaatcgggccgcggggggtctctcaagctggttccaacgctgaggccccacagcctcccaattccgggcagacccctgacacctgctgtctggccccttccggcctgaagctgcagccgcgccatgtccacccctccgttggccgcgtcggggatggcgcccgggcccttcgccgggccccaggctcagcaggccgcccgggaagtcaacacggcgtcgctgtgccgcatcgggcaggagacagtgcaggacatcgtgtaccgcaccatggagatcttccagctcctgaggaacatgcagctgccaaatggtgtcacttaccacactggaacatatcaagaccggttaacaaagctacaggataatcttcgccaactttcagttctcttcaggaagctgagattggtatatgacaaatgcaatgaaaactgtggtgggatggatcccattccagtcgagcaacttattccatatgtggaagaagatggctcaaagaatgatgatcgggctggcccacctcgttttgctagtgaagagaggcgagaaattgctgaagtaaataaaaaactcaaacagaagaatcaacagctgaaacaaattatggatcaattacgaaatctcatctgggatataaatgccatgttggcaatgaggaactaagctgatatttaaatttcctgctttacacatgttataccattgttttttccctcaagtattttttccctgtgaagaagattatttatctgcttttattttagtcactaaaactaaagtttttatttttacattggtgacttttttaccttaaacatattaactttttttaaatgctattttatgcaaacgattctcgtcactc

SEQ ID NO: 73171 - DNA, 731 bp, Homo Sapiens
ataaggtttccttcgtcagtccaggcaggactgtgcggttggaaaagggacggatgctggtcctggaaggggcgtcgttatctagaagctcccaacctaagtgggtgactcatagggagggcaaggagagaaggacacagcaagcaacttacatgtaaaacaagacgtgtgggttattatggaagaaattcacaaccaaacttggggttagcccgtattgttttccaagaactctatgtggacagtgacaaaaaacagacctaagaactagcagactgggcaaagctttttcacataacaacaacaaaaaaagcaattcctcaggaaaaaatggtcaatgggtcattgtgtgtagacaaaactacaagttctgctccagactctggggaaaccattctgccatcttcaagctgtggccattctgtaatacagactacgctaaatcacatgttgtcatcaaggcagaatattttgttcctttatgggtcagcctgggatacaaaattagagaaactttgcaatgaaaaatcccttgtgtctcattgaactttttccttaattcaaacctttcctttcacagttttgattagtgcctttgcccatgtggacaatattttatgatcaggttttaagagtaatccatccatggctgcttggctgcctggaacttaaaacaacgacaacaacaatgtccagataaacccaataaaataggtttttaaatgtgaaaa

SEQ ID NO: 73172 - DNA, 1166 bp, Homo Sapiens
  misc_feature (112)..(112): n is a, c, g, or t
  misc_feature (137)..(137): n is a, c, g, or t
  misc_feature (160)..(160): n is a, c, g, or t
tatatgacgcgtgggggagtgaagggagaacggtcggatctcaattcctaattctaccatgcctaatgatgaatcctaccccatcccaagactgactggctacatacagagngggcagatctatgtggacagacagnctgcacaacagacagatttatcncacctatcaatgtgctgccctcactatcacggttaatgaagtctgctattggagaagggatgaccaggaaggatcatgccgatgtatctaaccagctatatgcgtgctatgctattggaaaggatgtgcaagccatgaaagctgtcgttggagaagaagcccttacctcagatgatcttctctacttggaatttctgcagaagtttgagaggaacttcattgctcagggtccttacgaaaatcgcactgtctttgagactttggacattggctggcagctactccgaatcttccccaaagaaatgctgaagagaatccctcagagcaccctcagcgaattttaccctcgagactctgcaaagcattagctgctgcttctgcattgctccgcgctcttgtgaaatactggttctgttttctttattccttttgcactctcggttcccacctttgtgttggagtttaccatgttaccctgtaattaaaaacaaagaataggtaacatattgtgccagtgttgcaacgttttaaactgctaacagaccttaaaatatccccctacctgggtcctcagtgctatgtttaaagtgctgcagggatggagtggcgttttcttattgctgtatgtattgtacatagtggagtagttagttacctgataacagtcttgttatttgggtctcttagaccttacctctcaactccctcaagagtaccagtctctgaagttataatgctttggtctctacattaggggcaagatccagtctgagagaagtctacctttgagaagggccaagaggctctttcctgagtgtttgctttcggtttgttggtatgcctgtattgctgggctgtgctgctgctcgaagcagatggttttgactgtctttttgctctttcctatataatgaatagatgagtgaaaggagttttctttatctctttagtacttacgtattgggattcctgtgtcttacagctctcccaatacgtaagtactaaa

SEQ ID NO: 73173 - DNA, 1151 bp, Homo Sapiens
  misc_feature (884)..(919): n is a, c, g, or t
  misc_feature (1005)..(1005): n is a, c, g, or t
  misc_feature (1044)..(1067): n is a, c, g, or t
cggaagtacgaggctgggttgaatcggcacgagggtgtcgctttcggttgttggtatgcctgtattgctgggctgtgctgctgctcgaagcagatggttttgactgtctttttgctctttcctatataatgaatagatgagtgaaaggagttttctttttctctttagtacttacgtattgggattcctgtgtcttacagctctccctctccaaataatacacagaatcctgcaactttttgcacagctggtatctgtctggtagcagtgagaccccttgtcttggtgatccttactgggtttccaagcagaggagtcacatgattacaattgccagtagagttgttgtttggggtacaagatgagaagaaagaaaaacctacagcctttctacattctgacatgctaacagtggtttaagtttctaaagtgtttaccagatgctgaaggcaaggggagggagcagaagcacttatgtttacggatattttaaactctgttagagagcagcctttgaaaatccccaatttggttctgctttttgacctctctctaccttttcagggtaatctttgtggcacaaacgatagcatttccaagctttagagttttctgaattcctgcgccttcctgacgtgagccctgagcgatcttctatgcagttctgccatgcgtcctgttggtctctctgtgttctttgttacttgggtgcaatagcaacttccctaccccgtgcattccatctttcatgttgtgtaaagttcttcacttttttctctgagggctgggggttgggggagtcagcatgattatattttaatgtagaaaatgtgacatctggatataaaatgaaaataaatgttaaattaaatgggcacaccacnnnnnnnnnnnnnnnnnnnnnnnnnnnnnnnnnnnngaacccgctttccctattctgtcccctcttattccctccataactaaagtcggggggcccatgccccccatcagttacccaagatncccttgtgtggggggcgccttcggccccttagaaaaaannnnnnnnnnnnnnnnnnnnnnnnggggcccggggcccccctattatgataaagcccaacaggggggacaaaagcggtgttccccacaaaaaagaacctgtggtgcca

SEQ ID NO: 73174 - DNA, 2032 bp, Homo Sapiens
  misc_feature (81)..(115): n is a, c, g, or t
aaggactatatacctcatatggccctgcgctgtgcagtcgaacgaccgagcgcagcgagctattgagcgaggaagcggcgnnnnnnnnnnnnnnnnnnnnnnnnnnnnnnnnnnncagtcgacggtaccggacatatgcccgggaattcggccattacggccggggagtgccagccgccagtggtcgcacttggagggtctcgccgccagtggaaggagccaccgcccccgcccgaccatggccgaggagctggtcttagagaggtgtgatctggagctggagaccaatggccgagaccaccacacggccgacctgtgccgggagaagctggtggtgcgacggggccagcccttctggctgaccctgcactttgagggccgcaactacgaggccagtgtagacagtctcaccttcagtgtcgtgaccggcccagcccctagccaggaggccgggaccaaggcccgttttccactaagagatgctgtggaggagggtgactggacagccaccgtggtggaccagcaagactgcaccctctcgctgcagctcaccaccccggccaacgcccccatcggcctgtatcgcctcagcctggaggcctccactggctaccagggatccagctttgtgctgggccacttcattttgctcttcaacgcctggtgcccagcggatgctgtgtacctggactcggaagaggagcggcaggagtatgtcctcacccagcagggctttatctaccagggctcggccaagttcatcaagaacataccttggaattttgggcagtttgaagatgggatcctagacatctgcctgatccttctagatgtcaaccccaagttcctgaagaacgccggccgtgactgctcccgccgcagcagccccgtctacgtgggccgggtggtgagtggcatggtcaactgcaacgatgaccagggtgtgctgctgggacgctgggacaacaactacggggacggcgtcagccccatgtcctggatcggcagcgtggacatcctgcggcgctggaagaaccacggctgccagcgcgtcaagtatggccagtgctgggtcttcgccgccgtggcctgcacagtgctgaggtgcctaggcatccctacccgcgtcgtgaccaactacaactcggcccatgaccagaacagcaaccttctcatcgagtacttccgcaatgagtttggggagatccagggtgacaagagcgagatgatctggaacttccactgctgggtggagtcgtggatgaccaggccggacctgcagccggggtacgagggctggcaggccctggacccaacgccccaggagaagagcgaagggacgtactgctgtggcccagttccagttcgtgccatcaaggagggcgacctgagcaccaagtacgatgcgccctttgtctttgcggaggtcaatgccgacgtggtagactggatccagcaggacgatgggtctgtgcacaaatccatcaaccgttccctgatcgttgggctgaagatcagcactaagagcgtgggccgagacgagcgggaggatatcacccacacctacaaatacccagaggggtcctcagaggagagggaggccttcacaagggcgaaccacctgaacaaactggccgagaaggaggagacagggatggccatgcggatccgtgtgggccagagcatgaacatgggcagtgactttgacgtctttgcccacatcaccaacaacaccgctgaggagtacgtctgccgcctcctgctctgtgcccgcaccgtcagctacaatgggatcttggggcccgagtgtggcaccaagtacctgctcacctcaacctggagctttcctgagaagagcgttctcttgcatctctagagaatacgtgactgcttacgagtcactctcaagtgcggcttctctgagcagtacacgctctctgctaaagactctctgaatcaaacaatcgatctggacacgaccactgtgtaggctgcagtctggcgagtactctgagcgcaagacaagacactg

SEQ ID NO: 73175 - DNA, 690 bp, Homo Sapiens
  misc_feature (44)..(78): n is a, c, g, or t
aaacctgacgagcgcagcgagtcaggtgagcgaggaagcggcgnnnnnnnnnnnnnnnnnnnnnnnnnnnnnnnnnnncagtcgacggtaccggacatatgcccgggaattcggccattacggccggggtttgatctacttcatagctccttggagcaggcaaaaaagggacagcatgccccttggctggatcagggaatccagctccctagactgcatcccgtacctcttcccatgactgcacccagctccagggcccttgggacagccagagctgggtggggacagtgataggcccaaggtcccctccacatcccagcagcccaagcttaatagccctccccctcaacctcaccattgcgaagcacctactatgtgctgggtgcctcccacacttgctggggctcacggggcctccaaaccatttaatcaccatgggaaactgttgtgggcgctgcttccaggataaggagactgaggcttagagagaggaggcagcccctccaaaccagtggcctcgtggttatcagcaaggctgggtaatgtgaaggcccaagagcagagtctgggcctctgactctgagtccactgctccatttataaccccagcctgacctgagactgtcggagaggctgtctggggcctttatcaaaaaaagactcagccaagacaaggaggtagagagggga

SEQ ID NO: 73176 - DNA, 2251 bp, Homo Sapiens
  misc_feature (2098)..(2137): n is a, c, g, or t
tcaagatccggatccttggggagctcaagcagaaacgcaagctggtggctgaggtgtccctgcagaaaccgctccctgtggccctggaaggctgcaccttcactgtggagggggccggcctgactgaggagcagaagacggtggagatcccagaccccgtggaggcaggggaggaagttaaggtgagaatggacctgctgccgctccacatgggcctccacaagctggtggtgaacttcgagagcgacaagctgaaggctgtgaagggcttccggaatgtcatcattggccccgcctaagggacccctgctcccagcctgctgagagcccccaccttgatcccaatccttatcccaagctagtgagcaaaatatgccccttcttgggccccagaccccagggcagggtgggcagcctatgggggctctcggaaatggaatgtgcccctggcccatctcagcctcctgagcctgtgggtccccactcaccccctttgctgtgaggaatgctctgtgccagaaacagtgggagccctgaccttggctgactggggctggggtgagagaggaaagacctacattccctctcctgcccagatgccctttggaaagccattgaccacccaccatattgtttgatctacttcatagctccttggagcaggcaaaaaagggacagcatgccccttggctggatcagggaatccagctccctagactgcatcccgtacctcttcccatgactgcacccagctccaggggcccttgggacagccagagctgggtggggacagtgataggcccaaggtcccctccacatcccagcagcccaagcttaatagccctccccctcaacctcaccattgtgaagcacctactatgtgctgggtgcctcccacacttgctggggctcacggggcctccaacccatttaatcaccatgggaaactgttgtgggcgctgcttccaggataaggagactgaggcttagagagaggaggcagccccctccacaccagtggcctcgtggttattagcaaggctgggtaatgtgaaggcccaagagcagagtctgggcctctgactctgagtccactgctccatttataaccccagcctgacctgagactgtcggagaggctgtctggggcctttatcaaaaaaagactcagccaagacaaggaggtagagaggggactgggggactgggagtcagagccctggctgggttcaggtcccacgtctggccaggcactgccttctcctctctgggcctttgtttccttgttggtcagaggagtgattgaaccagctcatctccaaggatcctctccactccatgtttgcaatgcttttatatggcccagccttgtaaataaccacaaggtccactccctgctccacgaagccttaagccataggcccaggatatttctgagagtgaaaccatgactgtgaccaccttctgtccccagccctgtcctggttccttcctatgcccaggtaccacccttcagaccccagttctaggggagaagagccctggacacccctgctctacccatgagcctgcccgctgcaatgcctagacttcccaacagccttagctgccagtgctggtcactaaccaacaaggttggcaccccagctaccccttctttgcagggctaaggcccccaaacatagcccctgccccggaggaagcttggggaacccatgagttgtcagctttgactttatctcctgctctttctacatgactgggcctcccttgggctggaagaattggggattctctattggaggtgagatcacagcctccagggccccccaaatcccagggaaggacttggagagaatcatgctgttgcatttagaactttctgctttgcacaggaaagagtcacacaattaatcaacatgtatattttctctatacatagagctctatttctctacggttttataaaagccttgggttccaaccaggcagtagatgtgcttctgaaccgcaaggagcaaacactgaaataaaatagtttattttttcacctgggatacacaatccggggaaaatatgaaaaatgtccggccggccnnnnnnnnnnnnnnnnnnnnnnnnnnnnnnnnnnnnnnnncgcgggccccagaaagtaaagtgaacatgggccattactggtttcctaaggaaatcctggtgcaagaactaagggccttggattctcccccaataaaaaaggcccggggggaaa

SEQ ID NO: 73177 - DNA, 1065 bp, Homo Sapiens
  misc_feature (939)..(939): n is a, c, g, or t
  misc_feature (997)..(997): n is a, c, g, or t
  misc_feature (1009)..(1009): n is a, c, g, or t
agagtatgaagtcgacggcgcgccgaattcggcacgaggagttccagttcgtgccatcaaggagggcgacctgagcaccaagtacgatgcgccctttgtctttgcggaggtcaatgccgacgtggtagactggatccagcaggacgatgggtctgtgcacaaatccatcaaccgttccctgatcgttgggctgaagatcagcactaagagcgtgggccgagacgagcgggaggatatcacccacacctacaaatacccagaggggtcctcagaggagagggaggccttcacaagggcgaaccacctgaacaaactggccgagaaggaggagacagggatggccatgcggatccgtgtgggccagagcatgaacatgggcagtgactttgacgtctttgcccacatcaccaacaacaccgctgaggagtacgtctgccgcctcctgctctgtgcccgcaccgtcagctacaatgggatcttggggcccgagtgtggcaccaagtacctgctcaacctcaacctggagcctttctctgaaaagagcgttcctctttgcatcctctatgagaaataccgtgactgccttacggaatccaacctcaacaaggtgcaggccctcctcgtggagccagttatcaacagctacctgctggctgagagggacctctacctggagaatccagaaatcaagatccggatccttggggagcccaagcagaaacgcaagctggtggctgaggtgtccctgcagaacccgctccctgtggccctggaaggctgcaccttcactgtggagggggccggcctgaccttggctgactggggctggggtgagagaggaaagacctacattccctctcctgcccagatgccctttggaaagccattgaccacccaccatattgtttgatctacttcatagctccttggagcaggcanaaaagggacagcatgccccttggctggatcagggaatccagctccctagactgcatcncgtacctcttcncatgactgcaccagctcccagggccttgggacagcagagctgggtggggacatgat

SEQ ID NO: 73178 - DNA, 925 bp, Homo Sapiens
gcctgtttaatgcacaggtgtgagtggattgcttatggctatgagataggttgatctcgcccttaccccggggtctggtgtatgctatgctttcctcagcagtatggctctgacatctcttagatgtcccaacttcagctgttgggagatggtgatattttcaaccctacttcctaaacatctgtctggggttcctttagtcttgaatgtcttagctcaattatttggtgttgagcctctcttccacaagagctcctccatgtttggatagcagttgaagaggtgtgtgggtgggctgttgggagtgaggatggagtgttcagtgcccatttctcattttacattttaaagtcgttcctccaacatagtgtgtattggtctgaagggggtggtgggatgccaaagcctgctcaagttatggacattgtggccaccatgtggcttaaatgattttttctaactaataaagtggaatatatatttctactgtgtgtcatgttgacttctgctcttgaaattcgtggtagggagggtcttaatttctagacctgaggtttaattttaacatctcaatactttggagcaggaaagtgcttaaatcactttgtttaaaacatagtatcagtagacttctgaatttgggggcagaggcagttgggtctgccatgtatcaaccagttatgtgagcctaggccacgattattgcaggcctgtcatgactagatctgtaaagaagaagaaaaatgatcaccacttccagcccctctccttgagtctctggggcaaagaggactatcagtccaggaggctgtgggctttttcttttgtactcttcagcgtgttttacttacccaccaaaaaggctgcttaattcagattgttctcaaagtcagttggtaaagtgtccacaccacacagtagcgaa

SEQ ID NO: 73179 - DNA, 1571 bp, Homo Sapiens
  misc_feature (1507)..(1519): n is a, c, g, or t
ctggtgcttcccttggtgccagagcttctgagcacccacccattttttgacacagctgaaccagacatggatgatccagcttatattgcagttttggtacttattttcaatgctgctaaaacctgtccaacaatgccagcattgttctcagatcacaccttcaggcactatgcctacctccgagacagtctttctcatcttgttcctgccttgaggttaccaggtagaaaactggtgtcatcagctgtttctcccagcatcatacctcaagaggatccttcccagcagttcctgcagcagagccttgaaagagtgtatagtcttcagcacttggaccctcagggagcccaggagctgctggaattcaccatcagggatctgcaaagacttggagaacttcaatctgaattggcaggagtagctgatttctctgccacctatcttcgctgtcaactacttctcatcaaggccttgcaggaaaagttgtggaatgtaagctgcccctttgtatttgaagcagagtgatttggcctcagcagcagcgaaacagattatggaagagacctacaaaatggaattcatgtacagtggtgtggagaataagcaggtggtgattatacatcacatgaggctgcaggccaaagctttgcaacttttagtaacagcacgaactacacgaggacttgaccccttatttgggatgtgtgaaaaattttacaggaagtagacttttttcagaggtatttcatcgctgatttgccccacttgcaggacagctttgtggacaaactccttgaccttatgccccgactcatgacatccaaacctgcagaagtggtcaaaattctacagaccatgctgcgacagagtgcctttctgcatctcccgcttccagagcagatccacaaagcctcagccaccatcatcgagccagcgggcgagtcagacaaccctttgcggtttacctctgggttggtggttgccctggatgttgatgcaaccctggagcatgtgcaggatcctcagaacactgttaaggtccaggtcttatatccagatggccaggctcagatgattcaccccaagcctgcagacttccggaatcctggcccagggcggcaccggctcatcactcaggtttatctctcccacaccgcttggacagaggcatgccaggtggaagtgaggctgctgctggcctacaactccagtgctcgcattccaaaatgcccctggatggagggtggtgagatgtcaccacaggtggaaaccagcatcgagggcaccattcccttcagcaagcctgtaaaagtttatataatgcccaaacctgcacggcgctaaggcaaaaacagtcttcccaaccgtggcctagagggcccttcttaggtgtcagaatgagccaagcctgaagcacttcacctggaattgatgtgtaggcttaaggagtatgtgacccttacagtctcatctggtatcaaacacaggataaattgtttcttcattnnnnnnnnnnnnnccttcaagtctacttacccttctcctgtccacaataaagttgagaaaacacc

SEQ ID NO: 73180 - DNA, 842 bp, Homo Sapiens
gaggacgcaggtgattacacctgtaaatttatacacaatgaaaatggagccaattatagtgtgacggcgaccaggtccttcacggtcaaggatgagcaagcttttctctgtttccagtaatcggagcccctgcacaaaatgaaataaaggaagtggaaattggaaaaaacgcaaacctaacttgctctgcttgttttggaaaaggcactcagttcttggctgccgtcctgtggcagcttaatggaacaaaaattacagactttggtgaaccaagaattcaacaagaggaagggcaaaatcaaagtttcagcaatgggctggcttgtctagacatggttttaagaatagctgacgtgaaggaagaggatttattgctgcagtacgactgtctggccctgaatttgcatggcttgagaaggcacaccgtaagactaagtaggaaaaatccaagtaaggagtgtttctgagactttgatcacctgaactttctctagcaagtgtaagcagaatggagtgtggttccaagagatccatcaagacaatgggaatggcctgtgccataaaatgtgcttctcttcttcgggatgttgtttgctgtctgatctttgtagactgttcctgtttgctgggagcttctctgctgcttaaattgttcgtcctcccccactccctcctatcgttggtttgtctagaacactcagctgcttctttggtcatccttgttttctaactttatgaactccctctgtgtcactgtatgtgaaaggaaatgcaccaacaaccgtaaactgaacgtgttcttttgtgctcttttataacttgcattacatgttgtaagcatg

SEQ ID NO: 73181 - DNA, 693 bp, Homo Sapiens
  misc_feature (36)..(36): n is a, c, g, or t
  misc_feature (547)..(606): n is a, c, g, or t
aacttgattatactatttataattggcacagtactntgaattatgccagtactacattgtaaaacagagttgtattttttgatatttaacaatgcttaacactttaaatgccacttctgaggaatggacctggtgtaacacacttgaatatgtgtgatgccaaactttttaaaatacaatataaattatgcttatttattattttctttagtttaatcttggtcatgttttggtgtgtatttttaatttttttcttaaattaacactttggcatgaacattactgcaggtttttgatgaatataatgaatgtatggaattcaattgaatttgcatggtcttcggaattttttctgtgtgtataaatttagctgctattaacagaagagagaactttctgtgagtagccatgtgtgttgatcagatacagtttttctgagatcttcaattaatctcactttaaaaatgaccaaaacatgtctttcttgaattaactttgaataaaagtttgtatattatttgtttcacagtgttcttgatttttatcnnnnnnnnnnnnnnnnnnnnnnnnnnnnnnnnnnnnnnnnnnnnnnnnnnnnnnnnnnnngtcacttcacaaatctgcatttttaatttattgccaaagtgacctcacctacaagacaaaactattaaatgaataaccgaagtcaat

SEQ ID NO: 73182 - DNA, 1075 bp, Homo Sapiens
  misc_feature (12)..(12): n is a, c, g, or t
  misc_feature (29)..(29): n is a, c, g, or t
  misc_feature (33)..(33): n is a, c, g, or t
  misc_feature (302)..(302): n is a, c, g, or t
  misc_feature (360)..(360): n is a, c, g, or t
  misc_feature (744)..(805): n is a, c, g, or t
ctttcagcatantttacatgagaacaccntcancaagtattgtgagtgactgagatctagcactctccactgtagctcacttaagtctcagcagaagatacgatcgtctgccttatagccctcagatactgaagattatttttggtagaagcacccgtgtaggctttttctgcaatgagcagcagctgactgaattttcataagaaacttggactgcaggacttaatctgtagtctttagacaacagttgctttcataaaggactagttcttatcaaaccttgaatgactacagattatttntgtgaaggaggatgaagtaatgtgtgttcttgtaaaattaaattgtatctttatgtcnttctaaaaatctgtataccaggaactgaaaatctttgaacagatattaaaatctacgtaagtatacaaactagttgagggatacactgtttgcttttataaaataactttgattacatgaatataataaattatgtgcatataaatgtgtgtctatatgctttcctttaaatatgtttgaaaagatgtttgaaacttgattatactatttataattggcacagtactttgaattatgccagtactacattgtaaaacagagttgtattttttgatatttaacaatgcttaacactttaaatgccacttctgaggaatggacctggtgtaacacacttgaatatgtgtgatgccaaactttttaaaatacaatataaattatgcnnnnnnnnnnnnnnnnnnnnnnnnnnnnnnnnnnnnnnnnnnnnnnnnnnnnnnnnnnnnnncttaaattaacactttggcatgaacattactgcaggtttttgatgaatataatgaatgtatggaattcaattgaatttgcatggtcttcggaattttttctgtgtgtataaatttagctgctattaacagaagagagaactttctgtgagtagccatgtgtgttgatcagatacagtttttctgagatcttcaattaatctcactttaaaaatgaccaaaacatgtctttcttgaattaactttgaataaaagtttgtatattatttgtt

SEQ ID NO: 73183 - DNA, 667 bp, Homo Sapiens
gagaattgtggagaggtcttcagtgaacagttttgccttaagacacacatgagagctcagaatggagggaacacttttgagggtaattgttatggaaaagacagcatcagtgtgcacaaggaagcctctattggacaagaactttccaaatttaatccatgtggaaaagtcttcaccttaactccaggccttgctgtgcatcttgaaattctcaatggaagacaaccctacaaatgtaaggaatgtggaaaaggctttaagtattttgcaagccttgataatcacatgggaatccacattggagagaaactctgtgaatttcaggaatgtgagagagccatcacaacttcctcacacttaaagcagtgtgtagcagttcatactggaaagaaatccgaaaagactaagaactgtgggaaatccttcactaatttttctcaactttctgcacatgcaaaaactcataaaggagagaagtcctttgaatgtaaagaatgtggaagatcctttagaaattcctcatcctttaatgttcacattcaaattcacactggaataaaaccacacaaatgtacggaatgtgggaaagccttcactagatcaactcaccttactcaacatgtaagaactcacactggaataaaaccctatgaatgtaaggaatgtg

SEQ ID NO: 73184 - DNA, 721 bp, Homo Sapiens
  misc_feature (27)..(27): n is a, c, g, or t
caacacaaaatacccctaagatcttgnccaatagagaaatgtcatggaattttagaaatgacagtatctgccgagtttattccaagttatatcatttcaaagatgaagaaacccaggctcagagggagccatcacatccacaccctgtcacccttcgtggccagtgccagacagtagctagttggatgctaaaagtagaatttagatatcttaacaataagcccagcagtctttcaacttcattcgtaaatcatttttgttttgagcatctgtcacgtggcagcacttgcctggatactggagagctgagaaggaatgcgacaggcaagtcctactctcacagtgtatacattcaggaggaacaagacacacagtgccaagtaaataaagtagctgaacttcatcaaatgattttattcttaaagtcattaaagcatgtaatgttcccctttttttgtttcaggggtgtacagattgaagaagtgtaggtgtttatgtggttttagtgacaaaccccatgtgctttcattgattttatgttttatgttaaaacatcaaccgcaaggtaaaatgcatattgtatgttgttggatacgtacttaactggtatgcatcccatgtctttgggtactagtgtatgaattctaatctctgtaaatgaaatgttgtatgtgttaatatatttaatagatgtaacttaataaactggcattgaagactg

SEQ ID NO: 73185 - DNA, 1002 bp, Homo Sapiens
  misc_feature (98)..(98): n is a, c, g, or t
  misc_feature (103)..(103): n is a, c, g, or t
  misc_feature (135)..(237): n is a, c, g, or t
aaccgtcaaaattccccccggagaccccattcccccgggtttttggcctcctatagaagggccccgggggcgggttctacagctccgggacttttaanctagnccgcggacggaataccattttccccccaggannnnnnnnnnnnnnnnnnnnnnnnnnnnnnnnnnnnnnnnnnnnnnnnnnnnnnnnnnnnnnnnnnnnnnnnnnnnnnnnnnnnnnnnnnnnnnnnnnnnnnnccacgcgtccgctttggatgtttcactattaagtctgatgtgtggtccttggaatcctcctatacgaaattgtcacctatgggaaaaattccctacccagggagaactaatgccgacgtgatgaccgccctgtcccagggctacaggatgccccgtgtggagaactgcccagatgagctctatgacattatgaaaatgtgctggaaagaaaaggcagaagagagaccaacgtttgactacttacagagcgtcctggatgatttctacacagccacggaagggcaataccagcagcagccttagagcacagggagacccgtccatttggcaggggtggctgcctcatttagagaggaaaagtaaccatcactggttgcacttatgatttcatgtgcggggatcatctgccgtgcctggatcctgaaatagaggctaaattactcaggaagaacaccctctaaatgggaaagtattctgtactcttagatggattctccactcagttgcaacttggacttgtcctcagcagctggtaatcttgctctgcttgacaacatctgagtgcagccgtttgagaagaaaacatctattctctccaaaaatgcacccaactagctctatgtttacaaatggacataggactcaaagtttcagagaccattgcaatgaatccccaataattgcagaactaaactcatttataaagctaaaataaccggatatatacatagcatgacatttctttgtgctttggcttacttgttt

SEQ ID NO: 73186 - DNA, 1761 bp, Homo Sapiens
  misc_feature (1621)..(1655): n is a, c, g, or t
  misc_feature (1761)..(1761): n is a, c, g, or t
caaaataccaaaaaagaaatacaatcaagcaaaagttgaacatgcgcggctggtaccggtccggaattccctggatcggagagacgccggtggcggggctggtagcccggcagccgcaggtggggccacgagcgctggctgagggaccgagccggagagccccggagcccccgtaacccgcgcggggagcgcccaggatgccgcgcggggactcggagcaggtgcgctactgcgcgcgcttctcctacctctggctcaagttttcacttatcatctattccaccgtgttctggctgattggggccctggtcctgtctgtgggcatctatgcagaggttgagcggcagaaatataaaacccttgaaagtgccttcctggctccagccatcatcctcatcctcctgggcgtcgtcatgttcatggtctccttcattggtgtgctggcgtccctccgtgacaacctgtaccttctccaagcattcatgtacatccttgggatctgcctcatcatggagctcattggtggcgtggtggccttgaccttccggaaccagaccattgacttcctgaacgacaacattcgaagaggaattgagaactactatgatgatctggacttcaaaaacatcatggactttgttcagaaaaagttcaagtgctgtggcggggaggactaccgagattggagcaagaatcagtaccacgactgcagtgcccctggacccctggcctgtggggtgccctacacctgctgcatcaggaacacgacagaagttgtcaacaccatgtgtggctacaaaactatcgacaaggagcgtttcagtgtgcaggatgtcatctacgtgcggggctgcaccaacgccgtgatcatctggttcatggaacaactacaccatcatgggcgggcatcctcctgggcatctggcttccccagttcctgggggtgctgctgacgctgctgtacatcacccggggtgggaggacatcctcatggagcactctgtcactgatgggctcctggggcccggtgccaagcccagcgtggaggcggcaggcacgggatgctgcttgtgctaccccaattagggcccagcctgccatggcagctccaacaaggaccgtctgggatagcacctctcagtcaacatcgtggggctggacagggctgcggcccctctgcccacactcagtactgaccaaagccagggctgtgtgtgcctgtgtgtaggtcccacggcctctgcctccccagggagcagagcctgggcctcccctaagaggctttccccgaggcagctctggaatctgtgcccacctggggcctggggaacaaggccctcctttctccaggcctgggctacgggggagggagagcctgaggctctgctcagggcccatttcatctctggcagtgccttggcggtggtattcaaggcagttttgtagcacctgtaattggggagagggagtgtgcccctcggggcaggagggaagggcatctggggaagggcaggagggaagagctgtccatgcagccacgcccatggccaggttggcctcttctcagcctcccaggtgccttgagccctcttgcaagggcggctgcttccttgagcctagnnnnnnnnnnnnnnnnnnnnnnnnnnnnnnnnnnngtactgataacaggagtttctgactaatcaaagctggtatttcccccgcatgtcttattcttgcccttcccccaaccagtttgttaatcaaacaataaaaacatgn

SEQ ID NO: 73187 - DNA, 687 bp, Homo Sapiens
  misc_feature (291)..(291): n is a, c, g, or t
atgtctctccactctcctgccttcagccatagcaaagaatccttccaaaatcaaactcttcacttttttgactcaagtgttgttgttcagtctctcgcgtgtcaatgtggtcatggttcatgaaaccggaccctcaagatggatgattgcttttaactactgccagctgatgtctctcagcccctgccctcatacaagatttttctcagccttcagcctaccactgcagaatccgatgtgacccaccattagggagtctgcatcttggaagagttggaaataaccctttanacatcaacatgcttcaaagactttttgcctttggcctagtaagatgcctctccagctactgagcccacaagtaacatgagcggataaaaagagacttgtttgtgctagaaatgagggtctatgctatgagggggtccaagactctggcgaaatgtgctttttcatcaatggagaaatgaaaggaaaacacaagcaagaaaaaagttaacttgtattatgtatttttactacacttttcttaaaaatagagcattgggaaaactctgaaagagactgacatttttctcaacaggaatccatacttaacagttctggctttcattaaattttgctctttggtacctgggccttttatttaacatctatatttgttttaactctcttggcagatgtgtg

SEQ ID NO: 73188 - DNA, 966 bp, Homo Sapiens
  misc_feature (41)..(82): n is a, c, g, or t
  misc_feature (84)..(119): n is a, c, g, or t
aaaaaccttgttcatcacttattagggcgctagctctttgnnnnnnnnnnnnnnnnnnnnnnnnnnnnnnnnnnnnnnnnnncnnnnnnnnnnnnnnnnnnnnnnnnnnnnnnnnnnnncagtcgacggtaccggacatatgcccgggaattcggccattacggccgggcccgtatggtatttgttagatgttcaacaggaagcacatgattgagaacatcttgggacagaccaaaaccactgacagatggcaaggctcggcgattctgatttcccttctcaaatctgctcaactccaagagtcttgagaaactgctaaaatttgcctctgtcactcaagtcttacaaatgttatcttgtaaacctttgaggtgaactattccactgtcttgtacataggcatcttattcactgcaccctgtcacacccagcaccccccgcccgcacattatttgaaagactgggaatttaatggttagggacagtaaatctacttctttttccagggacgactgtcccctctaaagttaaagtcaatacaagaaaactgtctatttttagcctaaagtaaaggctgtgaagaaaattcattttacattgggtagacagtaaaaaacaagtaaaataacttgacatgagcacctttagatcccttcccctccatgggctttgggccacagaatgaacctttgaggcctgtaaagtggattgtaatttcctataagctgtaatagtggaggtattgtgggttcatttgagtaagccctccaaagataccattcaaataacctgggagaatgtcataaattattcagataattaacactgcatgaatctgattcagaggcatgcatttacatatgttgccctaattaccatttgatgatcataaatacaagtgaatgacattggacttttagtaacaaacttaatttttaaaaaggtgtagacaatggtggttaaaaa

SEQ ID NO: 73189 - DNA, 915 bp, Homo Sapiens
ggaggcagtggtatcaacgcagagtggtcattaggcgggcagcagcaagaagaagaagaaggaagacactgaccgctcccagtccagatctccatcccgctccgtgtcaaaggagcgggaacatgccaagtctgaatccagccagagggaaggtcgaggagagagtgagaatgctggcaccaatcaggagacccggtccaggtcgagatccaattccaaatcgaaaccaaaccttccatcagaatcacgctccagatcaaagtcagcttcaaaaacccgatctcggtccaagtctagatccaggtctgcttccagatcgccctcccgatctagatctaggtcccactcaaggtcctaactggctatggccacagctggaactacccgagaagtcttttgtacatgtttggtagccgtagcacaagtgattggagtagaacatgtcactgctgtacatttttaactcccctaatggtgtgtctataattgttaaatctaagtgcttcctctcagtaaagcctcctggcaccaggccttcctgctcgactgaaaaaaattttctctttgaaaatccccttttactcatggcccacagtagaatatccaaaacgccttggctttcaggcctggcctttcctacagggagctcagtaacctggacggctctaaggctggaatgaccacataggtaggtatggtgagttcaaccatttttgctcttgaattgatgcccttcgatgtatgccatttagtgaaagtgctaagtcttaagtttcctaccactttggtttcatatttttggacttaacaaagttgtgaatagcacagtcgaggaaaattgatacctgcagtaacccataggaaataaactgtagagttccatattctggtattgtgattatattgttttatatt

SEQ ID NO: 73190 - DNA, 1342 bp, Homo Sapiens
  misc_feature (1022)..(1067): n is a, c, g, or t
  misc_feature (1320)..(1320): n is a, c, g, or t
caggtagaggctgggtttaatcggccgagggcgacgccgcgttgccgccgtgctctcgctttgcccgccgccgcctaaggggggctggggccggggccagccatcactgccgttgccgggatgccgcgggtgtacatcggccgcctgagctaccaggcccgggagcgcgatgtggagcgcttctttaagggctacgggaagatcctggaggtggatctgaagaacggatatggttttgtggagtttgatgatctgcgtgatgcagatgatgctgtttatgaactgaatggcaaagacctttgtggtgagcgagtaattgttgagcatgcccgcggcccacggcgagatggcagttacggttctggacgcagtggatatggttatagaagaagtggccgagataaatatggccctcctactcgcacagagtacagacttattgtggagaatttgtcaagtcggtgcagctggcaagacctaaaggattatatgcgtcaggcaggagaagtgacttatgcagatgctcacaagggacgcaaaaatgaaggggtgattgaatttgtatcttattctgatatgaaaagagctttggaaaagttggatggaactgaagtcaatgggagaaaaatcagattagttgaagacaagccaggttccagacgacgccggtcctactccagaagccggagtcattcaaggtctcgctctcgaagcagacattcccgtaagagcagaagccgaagtggcagcagcaaaagcagtcattctaagagtagatctcggtccaggtcgggctcccgctcccggagcaagagccggagccggagccagagtcggagccggagcaagaaagagaaaagcaggagccccagcaaggaaaagagccgcagccgcagccatagcgctggcaagagccgcagcaagagcaaagaccaagctgaagagaagatccaaaacaatgacaatgtcgggaaacccaagagccggagtcctagcaggcataaaagtaagagcaaaagtcnnnnnnnnnnnnnnnnnnnnnnnnnnnnnnnnnnnnnnnnnnnnnntgtgagcaggggcaggagccaggagaagagcctccgccagagtcggagccggagcaggagcaaagggggcagcaggagccgtagcaggagccgcagcaagagcatgtacaagaggaagggcaggaaagagaagcagagaggagagccgcagtcgcagtcgcagccgcagcaagagtgagaggagcagaaagcgaggcagcaagcgagacagcaagggcggcagccgccagaagaaagagaagggagacactgnacgcctccccagtcagatctcc

SEQ ID NO: 73191 - DNA, 851 bp, Homo Sapiens
  misc_feature (467)..(526): n is a, c, g, or t
aagcagacctggatctagacttggaccgagatcgggtttttgaagctgactttgatctggagcgtgattctgatggaaggtttggtttcgatttggaattggatctcgacctggaccgggtctcctgattggtgccagcattctcactctctcctcgaccttccctctggctggattcagacttggcatgttcccgctcctttgacacggagcgggatggagatctggactgggagcggtcagtgtcttccttcttcttcttcttgctgctgcccgccttgctgtctcgcttgctgcctcgctttctgctcctctcactcttgctgcggctgcgactgcgactgcggctctcctctctgcttctcttcctgcccttcctcttgtccttgctcttgctgcggctcctgctccggctcctgctgcccgctttgctcctgctccggctccgactctggcggaggctcttnnnnnnnnnnnnnnnnnnnnnnnnnnnnnnnnnnnnnnnnnnnnnnnnnnnnnnnnnnnnactcctgctccgacttttgctcttacttttatgcctgctaggactccggctcttgggtttcccgacattgtcattgttttggatcttctcttcagcttggtctttgctcttgctgcggctcttgccagcgctatggctgcggctgcggctcttgtccttgctggggctcctgcttttctctttcttgctccggctccgactctggctccggctccggctcttgctccgggagcgggagcccgacctggaccgagatctactcttagaatgactgcttttgctgctgccacttcggcttctgctcttacgggcgcagtctgtgagg

SEQ ID NO: 73192 - DNA, 1323 bp, Homo Sapiens
  misc_feature (1199)..(1274): n is a, c, g, or t
accagcgagtgtgaatatagaaccagtgttttcaaacaaagcaggctggtacaggtccggaattcccgggatatcgtcgacccacgcgtcgcggacgcgtgggttgtccggagagaatcatcactctgaccggccccaccaatgccatctttaaggctttcgctatgatcatcgacaagctggaggaagatatcaacagctccatgaccaacagtaccgcggccagcaggcccccggtcaccctgaggctggtggtgccggccacccagtgcggctccctgattgggaaaggcgggtgtaagatcaaagagatccgcgagagtacgggggcgcaggtccaggtggcgggggatatgctgcccaactccaccgagcgggccatcaccatcgctggcgtgccgcagtctgtcaccgagtgtgtcaagcagatttgcctggtcatgctggagacgctctcccagtctccgcaagggagagtcatgaccattccgtaccagcccatgccggccagctccccagtcatctgcgcgggcggccaagatcggtgcagcgacgctgcgggctacccccatgccacccatgacctggagggaccacctctagatgcctactcgattcaaggacaacacaccatttctccgctcgatctggccaagctgaaccaggtggcaagacaacagtctcactttgccatgatgcacggcgggaccggattcgccggaattgactccagctctccagaggtgaaaggctattgggcaagtttggatgcatctactcaaaccacccatgaactcaccattccaaataacttaattggctgcataatcgggcgccaaggcgccaacattaatgagatccgccagatgtccggggcccagatcaaaattgccaacccagtggaaggctcctctggtaggcaggttactatcactggctctgctgccagtattagtctggcccagtatctaatcaatgccaggctttcctctgagaagggcatggggtgcagctagaacagtgtaggttccctcaataacccctttctgctgttctcccatgatccaactgtgtaatttctggtcagtgattccaggttttaaataatttgtaagtgttcagtttctacacaactttatcatccgccaagaatttaaaaatcacattctctgttcagctgttaatgctgggatccatannnnnnnnnnnnnnnnnnnnnnnnnnnnnnnnnnnnnnnnnnnnnnnnnnnnnnnnnnnnnnnnnnnnnnnnnnnngataagaaatgtaagagtggaatgttaataaatttcagtttagttctgt

SEQ ID NO: 73193 - DNA, 867 bp, Homo Sapiens
  misc_feature (706)..(780): n is a, c, g, or t
ccccgatgagtaaaacttggccccccagtcatcccgcgggcggcaagatcggtgcagcgacgctgggggtacccccatgccacccatgacctggagggaccacctctagatgcctactcgattcaaggacaacacaccatttctccgctcgatctggccaagctgaaccaggtggcaagacaacagtctcactttgccatgatgcacggcgggacccggattcgccggaattgactccagctctccagaggtgaaaggctattgggcaagtttggatgcatctactcaaaccacccatgaactcaccattccaaataacttaattggctgcataatcgggcgccaaggcgccaacattaatgagatccgccagatgtccggggcccagatcaaaattgccaacccagtggaaggctcctctggtaggcaggttactatcactggctctgctgccagtattagtctggcccagtatctaatcaatgccaggctttcctctgagaagggcatggggtgcagctagaacagtgtaggttccctcaataacccctttctgctgttctcccatgatccaactgtgtaatttctggtcagtgattccaggttttaaataatttgcaagtgtccagtttctacacaactttatcatccgctaagaattcaaaaatcacattctctgctcacctgttaatgctgggatccatannnnnnnnnnnnnnnnnnnnnnnnnnnnnnnnnnnnnnnnnnnnnnnnnnnnnnnnnnnnnnnnnnnnnnnnnnncgataagaaatgtaagagtggaatgttaataaatttcagtttagttctgtaatgtcaagaatttaagaattaaaaaacggattggtt

SEQ ID NO: 73194 - DNA, 988 bp, Homo Sapiens
gaaatcttcaaaccttttattttgcaatggagcatctgttcaaagagaaatgcaaacttcaaacagagccctccaacattctaaatgagcagacagctttccctgcggtttctactgaaatctagcttggataccagatattcacatattcagttagaatctcatcagatgcactggaaggcaccattgctcctgcaaccagacagttccaggacaacacctctaacagcaattcatctcaactgcacagctgttccactcagatggccacatgcacatctggtaaactgctctatcagagcagagtaaagcacagacagctgagtcccagagtgagctgcttaagaatttcaggtttccctagaagataaagtacttcaaagtacatgctcagcagaactgctacaataattttccaatcagaaaaggaagtgatgaccaacgagcaaatgttacaaacagaaaatcaacagcattgaccaagtgcctaaaacttagtaaacaagcatgtatacatatgatttttctattagtaaaagccatgtgccccaatatacgaaaaacattgtacttctaaacgatctcaaatggagacaatgatttcatttataatagcattagagaataaaacacttacggatatatctaacaaagtattaacacctgtacaataaaatctacaaaacactgctgaaagaaagcaagatctaaatcaatgggaagacattccatctttttggatcagaagactttgtattaggatggccaaaagattcaatgtaatctctattaaaatcccagttgtcttatttacagaccttgccaagttaaccctacattcatattctcaaggtacccagaatagccaaataatctcgaaaaaagaacagttggatgactcacactttcttacttcagaacccacgcgtccgcgacgcgtgggtcgacgatatcccgggaattccggacctgtaccagcctgcttttt

SEQ ID NO: 73195 - DNA, 799 bp, Homo Sapiens
catggggggtagccccgcagcgtcgctgccaccgatcttggccccgccgccgcagatgactgggaggctgcccgggcatgggctggtacggaatggtcatgactctccccttgcggagactgggagagcgtctccagcatgaccaggcaaatctgcttgacacactcggtgacagactgcggcacgccagcgatggtgatggcccgctcggtggagttgggcagcatatcccccgccacctggacctgcgccccccgtactctcggcggatctctttgatcttacacccgcctttcccaatcagggagccgcactgggtggccggcaccaccagcctcagggtgaccgggggcctgctggccgcggtactgttggtcatggagctgttgatatcttcctccagcttgtcgatgatcatagcgaaagccttaaagatggcattggtggggccggtcagagtgatgattctctccggacaattcccctccgagatgttgatccgcgcgccactctcctcgcggatcctcttaaccgactcccctttcttcccaatgatgcttcctacttcctttccgtgcataagaagccgaatggtgagagtcacatttagtccactttcagtcacaccggcatccatggcgagcggcgggcggcgttcgggggagttgggctcgttacgtggtcaagtctttggcggctggcggggggaggggaggtgtaggcccaaaactgccggcgcgaggcgagcgagggccgcgggagcgagcgggagcgggcgggaggccgcagcgtagtcgca

SEQ ID NO: 73196 - DNA, 499 bp, Homo Sapiens
  misc_feature (12)..(12): n is a, c, g, or t
  misc_feature (348)..(382): n is a, c, g, or t
atgtccggggcncagatcaaaattgccaacccagtggaaggctcctctggtaggcaggttactatcactggctctgctgccagtattagtctggcccagtatctaatcaatgccaggctttcctctgagaagggcatggggtgcagctagaacagtgtaggttccctcaataacccctttctgctgttctcccatgatccaactgtgtaatttctggtcagtgattccaggttttaaataatttgtaagtgttcagtttctacacaactttatcatccgctaagaatttaaaaatcacattctctgttcagctgttaatgctgggatccatatttagttttataagcnnnnnnnnnnnnnnnnnnnnnnnnnnnnnnnnnnnggctcatgaattttatttctgtttgtcgataagaaatgtaagagtggaatgttaataaatttcagtttagttctgtaatgtcaagaatttaagaattaaaaaacggattggttaaaa

SEQ ID NO: 73197 - DNA, 585 bp, Homo Sapiens
  misc_feature (427)..(489): n is a, c, g, or t
cctcaaaccacccatgatctcaccattccaaataacttaattggctgcataatcgggcgccaaggcgcaaacattaatgagatccgccagatgtccggggcccagatcaaaattgccaacccagtggaaggctcctctggtaggcaggttactatcactggctctgctgccagtattagtctggcccagtatctaatcaatgccaggctttcctctgagaagggcatggggtgcagctagaacagtgtaggttccctcaataacccctttctgctgttctcccatgatccaactgtgtaatttctggtcagtgattccaggttttaaataatttgtaagtgttcagtttctacacaactttatcatccgccaagaatttaaaaatcacattctctgttcagctgttaatgctgggatccatatttannnnnnnnnnnnnnnnnnnnnnnnnnnnnnnnnnnnnnnnnnnnnnnnnnnnnnnnnnnnnnnctgtttgtcgataagaaatgtaagagtggaatgttaataaatttcagtttagttctgtaatgtcaagaatttaagaattaaaaaacggattggtta

SEQ ID NO: 73198 - DNA, 941 bp, Homo Sapiens
  misc_feature (705)..(705): n is a, c, g, or t
attcggcacgaggtggggatcccggcaagtaacatgactaaaaagaagcgggagaatctgggcgtcgctctagagatcgatgggctagaggagaagctgtcccagtgtcggagagacctggaggccgtgaactccagactccacagccgggagctgagcccagaggccaggaggtccctggagaaggagaaaaacagcctaatgaacaaagcctccaactacgagaaggaactgaagtttcttcggcaagagaaccggaagaacatgctgctctctgtggccatctttatcctcctgacgctcgtctatgcctactggaccatgtgagcctggcacttccccacaaccagcacaggcttccacttggccccttggtcaggatcaagcaggcacttcaagcctcaataggaccaaggtgctggggtgttcccctcccaacctagtgttcaagcatggcttcctggcggcccaggccttgcctccctggcctgctggggggttccgggtctccagaaggacatggtgctggtccctcccttagcccaagggagaggcaataaagaacacaaagctgtagaactcaacaaggtgaatcctgtgaaatagagacagtccggagcgttcttgcggggccgggacaagggggaaatctggccgtgctagatgtttcctgggtacgctgttttctgttcaagggtgtatacncagagggaccccaagggggagggagatagctccaggtaggccgtttcccgatattttcgccgcgcaacagtttgggggggacaccacccaaggaggttcaaggccgtttgaccgaccagcatgtggtcgggagaggttgggaaccaggggctcggcagagactatgtgggggcccccgtttgacccatttaggaaaacgactttcaccgatgagttaaggttgaaaacacgtggac

SEQ ID NO: 73199 - DNA, 2049 bp, Homo Sapiens
  misc_feature (1212)..(1213): n is a, c, g, or t
  misc_feature (1215)..(1216): n is a, c, g, or t
  misc_feature (1451)..(1465): n is a, c, g, or t
  misc_feature (1654)..(1654): n is a, c, g, or t
  misc_feature (1678)..(1678): n is a, c, g, or t
  misc_feature (2017)..(2017): n is a, c, g, or t
  misc_feature (2021)..(2021): n is a, c, g, or t
aggctggaccggtccggattcccgggatcaaatccatccgcaagactcacagcactgcgtatcaaaaagactttgaccaaaattgataattccctcgacaaattgaaaactgactgttgacattttcatagtgtcaagaaggaagatttgacgttgttgtcattgtccagctgggacctaatgctggcctgactggttgtcagaatggaatccatctgtctccctccccaaatggctgctttgacaaggcagacgtcgtacccagccatgtgttggggagacatcaaaaccaccctaacctcgctcgatgactgtgaactgggcatttcacgaactgttcacactgcagagactaatgttggacagacactgttgcaaaggtagggactggaggaacacagagaaatcctaaaagagatctgggcattaagtcagtggctttgcatagctttcacaagtctcctagacactccccacgggaaactcaaggaggtggtgaatttttaatcagcaatattgcctgtgcttctcttctttattgcactaggaattctttgcattccttacttgcactgttactcttaattttaaagacccaacttgccaaaatgttggctgcgtactccactggtctgtctttggataataggaattcaatttggcaaaacaaaatgtaatgtcagactttgctgcattttacacatgtgctgatgtttacaatgatgccgaacattaggaattgtttatacacaactttgcaaattatttattacttgtgcacttagtagtttttacaaaactgctttgtgcatatgttaaagcttatttttatgtggtcttatgattttattacagaaatgtttttaacactatactctaaaatggacattttcttttattatcagttaaaatcacattttaagtgcttcacatttgtatgtgtgtagactgtaactttttttcagttcatatgcagaacgtatttagccattacccacgtgacaccaccgaatatattactgatttagaagcaaagatttcagtagaattttagtcctgaacgctacggggaaaatgcattttcttcagaattatccattacgtgcatttaaactctgccagaaaaaaataactattttgttttaatctactttttgtatttagtagttatttgtataaattaaataaactgttttcaagtcaaaaaaacannanncagcgaagccaacgacgctacccacacccacagactattctactatgtgttgctataataccaaatcaaacgccagccgcgcccccctcccgtgaaagagaggcgtgttgctacacccaccccacaggagaaagctgtccctatatccccgcctttacacactttcttctgaacggggccccctctgggcgcgccgcgcgaagatagctgttcacaccacacacctcgtggagtnnnnnnnnnnnnnnntccgccccccaccgcccaatggaggagaaaaacggggcttaattatatatttgtttccataaataacgaggagaaacattcaatgtgttaacacaataatcaccaatacacccggggagagaatactccccccccgaccacgacagctttagaatcatgcaccctggtctcccgtggcgggtctgtggngcaaacgcgagacggggtttggcnttgtcctcctcaacaacaccttcccataatcaatgcctcccccatgaccgcactccaccgacgagcgcctctctcctcggcaggaggtagatctcttcaaccaaactatgaagagccgcccactccacatacgaaaataatccacaagcagcacgaatgcaaggcacaccaacaaaccccggccgcgccccgcctccctcccagcattcctcctccgcacagacccaacaattacggatgtgtgaccacacgaaagatgtcacatatataagaatcactggggctccccccagcaaaaattatcctctcctaccatcggccgccagttcttgtgcacanagantttgtacttggtaaacaaacaaaacaca

SEQ ID NO: 73200 - DNA, 703 bp, Homo Sapiens
  misc_feature (619)..(619): n is a, c, g, or t
  misc_feature (630)..(630): n is a, c, g, or t
atattataaatatttattcaggtatggtcaaaatttatccatattaatgataattatttaaatgctctttagctgttcatcaccatattaatactaggaataatgacagctaattttaattgagaacttcctaactgtggcccagttacagtaaaataaacactattagatacaccccatcgattattacagcaagcctatgaaacatactgtattacacagccagtattagaaatgaaaaactcatgggaaggatatgtataaaacttgctcaaagttaccccagctaataagtggctaggacacaattaaacacctatgcagttttctttcctgagctgaaatcctaaatccttggctgtatggcccctcattcaaaagtcctaaactggctaaaatttatataacagaaaattcacagaatcatttccttctacttttccactaccagggctgttaacagtcccaagcaaaagggcaaaaattttttctacttgagataagaaaaatatagagtgtgacagaaggtattctaccaatataaaaacactttaccaggaaaactgagaagggggctgttaaccttccgggaaatgtaggtcttcagtggattccccanatttctttcanaaaaaatttgtaatgttctttttcagtgaagcctttgcactgctagagctgaagaatgtgatcaatcggcttg

SEQ ID NO: 73201 - DNA, 745 bp, Homo Sapiens
agcggtcgcagagcccgtcgggagtcgtagtccgggacgggcccacagcattgtccgcgacgcagctcgggatccgcgtcggagtgtcggccgggttgctgccaggcaccgtcgagcgttagccacccagcattgagctgccagcggctgttctccctaagcaccctcgctcacgtcgcctcgcctcgcctcgcctcgcttgaccggccgcagccttggataccagccttaaatcgagccgactacggcccagccccgcccgcggcgaggtgcgcggggttcggtgcgagcccctcgcccctggccgggccagcctcttgatgcaccggggacgggcgcgcccatccgactcttcgaggggcggcagggccccatctgtgtctttcgctctcgagcccccagctagagttggcttcagcggaatacctactgtgcgggattattcaacaagccgattgatcacattcttcagctctagcagtgcaaaggcttcactgaaaaagaacattacaacttttttgaaagaaatttgggggtaaatttaattttaaatactgatttttgataacatttgatcttatgacagcatttgtatttttaattacagataggattacactaaaagtcatttctgacctgctcccttacccttatggctaaaataaactgctaggccctgaagcaaaggcgagccatgttctagagcaatgtctttcttgtattaaaatacagccccatgctcaca

SEQ ID NO: 73202 - DNA, 1705 bp, Homo Sapiens
  misc_feature (1322)..(1344): n is a, c, g, or t
tgccagtaactatagcggtcctaaggtagcgaggcctgggtggcgaattcggcacgagggggaggcgggggcccagcacacgtccccagtggcagcgggagcggcagctacgggttcgcggagcccccgaccccccaagggctagaggagcgctcggcggaccaaagaaagcccgcgagcggctgcgcgcccaccaataggtgcggggctcggagccgcgcagcctgcgccgtccctccctccgccccagcggcgcgtcctgcctgcagagagccaggccggagaagccgagcggcgcagaggacgccagtggcgcgcgccgcagccacccaccctccggaccgcggcagctgctgacccgccatcgccatggcccgcgggaaagccaaggaggagggcagctggaagaaattcatctggaactcagagaagaaggagtttctgggcaggaccggtggcagttggtttaagatccttctattctacgtaatattttatggctgcctggctggcatcttcatcggaaccatccaagtgatgctgctcaccatcagtgaatttaagcccacatatcaggaccgagtggccccgccaggattaacacagattcctcagatccagaagactgaaatttcctttcgtcctaatgatcccaagagctatgaggcatatgtactgaacatagttaggttcctggaaaagtacaaagattcagcccagagggatgacatgatttttgaagattgtggcgatgtgcccagtgaaccgaaagaacgaggagactttaatcatgaacgaggagagcgaaaggtctgcagattcaagcttgaatggctgggaaattgctctggattaaatgatgaaacttatggctacaaagagggcaaaccgtgcattattataaagctcaaccgagttctaggcttcaaacctaagcctcccaagaatgagtccttggagacttacccagtgatgaagtataacccaaatgtccttcccgttcagtgcactggcaagcgagatgaagataaggataaagttggaaatgtggagtattttggactgggcaactcccctggttttcctctgcagtattatccgtactatggcaaactcctgcagcccaaatacctgcagcccctgctggccgtacagttcaccaatcttaccatggacactgaaattcgcatagagtgtaaggcgtacggtgagaacattgggtacagtgagaaagaccgttttcagggacgttttgatgtaaaaattgaagttaagagctgatcacaagcacaaatctttcccactagccatttaataagttnnnnnnnnnnnnnnnnnnnnnnncctactagtcttgaacaaactgtcatacgtatgggacctacacttaatctatatgctttacactagctttctgcatttaataggttagaatgtaaattaaagtgtagcaatagcaacaaaatatttattctactgtaaatgacaaaagaaaaagaaaaattgagccttgggacgtgcccatttttactgtaaattatgattccgtaactgacttgtagtaagcagtgtttctggcccctaagtattgctgccttgtgtattttatttagtgtacagtactacaggtgcatactctggtcatttttcaagccatgttttattgtatctgttttctactttatgtgagcaaggtttgctgtcc

SEQ ID NO: 73203 - DNA, 966 bp, Homo Sapiens
cgggcgaagaaggagcagaacatcaagaggcagagggggtgaggcgagaaaacagaaggcataagcaccacactccaaaagtgggggagaaagaaaggcccacatggcatggggagcgtaatacaatggcagggtcggccctaccaagtgacctggaagggcggggccgacaatagtaaagtttggcacgtaagaggaggcaacagacggcaagctcacaggcaaaatccctgcgggtggattcatgggcatctatgcatccgaaagtagagcgtaattaatgtgtaagttgcatatgcctcgggaacaggagacctcctacaggcggatgccgtcgtggggagtcgagggagataagatgaccaagtgcctgtttgccatgcagagctgggagtttcacacccacccccccagcgtgttctctccttacctttggcatcctttggcctggtggggaaacagaggcccagggtggagacctaagcgggtataagaccaggtggcctgctccttttctgggccctagcacaggtgggtaacccccacccaacccagctcctgctgctgtcccagtcttgggctggggcctggaaagaggaagaggctgcctggggctgggccagcccgctgtgcactttgaccccagttccttgccagcacggctgctaacagactgccacttgagtgcgccttgcaggcactcccagagcagccatggaaggagctggccctcacaccatccacctccacactgcctcctggccagctgcccaccccagtgccaggtgggagagggagcagaacagccagccccttccaggtggcagtcggaagggtttttgtttttgtttctgttgccatttgtgtaaatactagtctttttggaaaaaaaataatgtaaagatgttttgtataaactctgaattattttcttgttgcttttttcttagaaaaaaatgagaacta

SEQ ID NO: 73204 - DNA, 716 bp, Homo Sapiens
tgttactctaaaatccgccctcagcttgcacgccggaagctgcgattcctgcagcggaagaggcgtgatctggccttcgactcgctatgtccactaacaatatgtcggacccacggaggccgaacaaagtgctgaggtacaagcccccgccgagcgaatgtaacccggccttggacgacccgacgccggactacatgaacctgctgggcatgatcttcagcatgtgcggcctcatgcttaagctgaagtggtgtgcttgggtcgctgtctactgctccttcatcagctttgccaactctcggagctcggaggacacgaagcaaatgatgagtagcttcatgctgtccatctctgccgtggtgatgtcctatctgcagaatcctcagcccatgacgcccccatggtgataccagcctagaagggtcacattttggaccctgtctatccactaggcctgggctttggctgctaaacctgctgccttcagctgccatcctggacttccctgaatgaggccgtctcggtgcccccagctggatagagggaacctggccctttcctagggaacaccctaggcttacccctcctgcctcccttcccctgcctgctgctgggggagatgctgtccatgtttctaggggtattcatttgctttctcgttgaaacctgttgttaataaagtttttcactctggcaaaacaaaaacacagagcgac

SEQ ID NO: 73205 - DNA, 1049 bp, Homo Sapiens
  misc_feature (60)..(60): n is a, c, g, or t
  misc_feature (75)..(75): n is a, c, g, or t
  misc_feature (79)..(79): n is a, c, g, or t
  misc_feature (84)..(84): n is a, c, g, or t
  misc_feature (86)..(86): n is a, c, g, or t
  misc_feature (92)..(92): n is a, c, g, or t
  misc_feature (120)..(120): n is a, c, g, or t
  misc_feature (122)..(122): n is a, c, g, or t
  misc_feature (157)..(157): n is a, c, g, or t
  misc_feature (175)..(175): n is a, c, g, or t
  misc_feature (219)..(219): n is a, c, g, or t
  misc_feature (229)..(229): n is a, c, g, or t
  misc_feature (254)..(254): n is a, c, g, or t
  misc_feature (265)..(265): n is a, c, g, or t
  misc_feature (289)..(289): n is a, c, g, or t
  misc_feature (430)..(430): n is a, c, g, or t
  misc_feature (545)..(587): n is a, c, g, or t
ctggccagaatcgcagaggacccagtgtgcctctggagagttcgttgacatactgccatnttgccaccaccgctntcantgacntntgagcnaatgagccagggacctgccaaagtgggntntcagagctgcctgcagcacgaatcctcggagagtncagaactgctgatgcagncagatccagccagagctgaaccaccaatggtgagtcgtcacccntacgcccccncaggagcctcctgagtctgtgagcncatccgctccncctgcagagctggaggtgcagccntcagagtgtgtcgtgtgcctggaacgggaggcccagatgatcttcctcaactgtggccacgtctgctgctgccagcagtgctgccagccactgcgcacctgcccgctgtgccgccaggacatcgcccagcgcctccgcatntaccacagcagctgagtgctgcccgcccacctgggcctggtcctagccctgcctcggccactgtgagccccgggctcctgctcagccttgtgccagccagactcgtatgaggctnnnnnnnnnnnnnnnnnnnnnnnnnnnnnnnnnnnnnnnnnnntcctaagctccaagcatgtctgggccaggcagaggtgctcctcatccatgacaccaccagtctgaatggtcctgggggctggggctggagaggccgctgcaccaccacccgagcctgggagccagcgtcccagcctaatcacggatctgctgcctcccagctgtcttgactgaaggccaccgcccctgcaggagcttgggtcctcatctgggggccatgcacaggcccgtcccaccctgcatgtgggaagggagcaggagggcctggctgggtgaggggaggccttcctgggaaggcgtgtggtgcaggcctgtgctcacagtggcaccagcaaccctgggtctccctctctgctgctccccagaaccccggggccctcctgctctccacaactgtccctccttaccccatgtagctcgatccgaagcaggagtgtcaataaacctgtcttcagtgcgaaaa

SEQ ID NO: 73206 - DNA, 549 bp, Homo Sapiens
agaatgagcaaaagcaaattgacacccgtgccgcgctggtggagaagcgccttcgctatctcatggacacaggaaggaacacagaagaagaagaagctatgatgcaggaatggtttatgttagttaataagaaaaatgccttaataaggagaatgaatcagctctctcttctggaaaaagaacatgatttagaacgacggtatgagctgctgaaccgggaattgagggcaatgctagccattgaagactggcagaagaccgaggcccagaagcgacgcgaacagcttctgctagatgagctggtggccctggtgaacaacagcgatgcgctcgtcagggacctggacgcgcaggagaagcaggccgaagaagaagatgagcatttggagcgaactctggagcaaaacaaaggcaagatggccaagaaagaggagaaatgtgttcttcagtagccatcagatcagaaagaatctctcccaacattttagagtcttgcttcccaaaccagaaaaagtcagactcattgttgatttaaaacttttaacattt

SEQ ID NO: 73207 - DNA, 543 bp, Homo Sapiens
gagaaggacacttcacgggcccagagctcctggtactgcccttcctttgagggccgtggagggctgtggacagcccagcaacctgtcgctcttggaggctggtgtggccttgaggagggaagcctcgcatggccgctggaagagaggcgcctcctggcctggctctgcagaacccaggggcacgctctgggcctgggctgaggaagtcccgctctccccgcggctctgagttggactgaggacaggtgtgggcgccagtgtgggtgcaggcgcaggtgcaggcacagggccactgtcctccaggcaggctttttggtgctaggccctgggactggaagtcgcccagcccgtatttatgtaaaggtatttatgggccactgcacatgcccgctgcagccctgggatcagctggaagctgcctgtcatctcctgcccaatccccagaaaccctgattcaggtctgcaggctcctgcgggctcaccaggctgctggctccggtaccatgtaaacctaggaaggtaaaggagcaggcaacctcaaaa

SEQ ID NO: 73208 - DNA, 576 bp, Homo Sapiens
aaaagatattttactgaagagctaaaaactggccagtgtggggttagcagatcgaataacttgaaatagaccgtgcagtattcctagcactcaatgtaatcaccctatttgtgacagagaaagggaaaaaaatataataagatcatctacctataatttgaataattttgagctatcaaaatgtctttgtaattttcacaaccgctgtccattgtttgaggatgttacctactaaactgaaaacattcattccatatctacttacacatacaccagcaacagtataaatgtaagcctaactttgcaaaattcgtaataatttagtgatggaattttttaataacatgcagtatataaatgtgcagattttatgcgtgttgacaaaatcatttttcagcttgcaaaatgggactgcaatattacatttttcacttaagcagttttttacatctacgttgttgctttctaaaatgaatgtgaatgccatcttttatgactgcaacttgccttttccattacagaaatttttgtttgatgtaatcaataaactttggtatgatatgattgataaaaaaa

SEQ ID NO: 73209 - DNA, 747 bp, Homo Sapiens
tcagcagcttgaagagtgctgagccccacagccgccaggagagagaaggaggagcacaagtgggccatggagcagggccggcaggagctgtatggggccctgacccaaggccttcaggggctggagaagaccctgcgtgacagtgaggagatgcagcgggcccgcaccactcgctgcctgcagctgctggcccaggagatccgggacagcaagaagttcctgtgggaggagctggaactggtgcgggaggaggtgaccttcatctatcagaagctccaagcgcaggaggatgagatctcagagaacttggtgaacattcagaaaatgcagaaaacgcaggtgaaatgccgcaaaatcctgaccaagatgaagcagcagggtcatgagacagccgcctgtccggagactgaagagataccgcagggagccagtggctgctggaaggatgacctccagaaggaactgagtgatatatggtctgctgtgcacgtgctgcagaactccatagacagcctcactttgtgctcgggggcctgtcccaaggcctcgagcctaagaggccacaaggggcaccagtgcctgagccctccactcccctcctgggactctgactccgactctgaccaggacctctcccagccacctttcagcaagagcggccgctccttcccacccgcttgagcagccgggactgctctccctgaagacccctccagagagaaaataaactagcccagaccctcctct

SEQ ID NO: 73210 - DNA, 1367 bp, Homo Sapiens
  misc_feature (55)..(55): n is a, c, g, or t
gaaaattgacacaagcttttgtacaacagacccccgcaaggggttttttcttaanaaacctgcatcggcagtaactataacggtcctaaggtagcgaggcctgggtggcgaattcggcacgaggacgatggtgtccccgcgggatcaaacttcagcgtcacagctgaggactggcttcgtggtccctgatgggagagcatgaacaggtgaagcccttggagaccagctcttccaaagtcaaagccaagaccattgtgatgattcccgactcccagaagctcctgcgatgtgaacttgagtcactcaagagccagttacaggcccagaccaaggctttcgagttcctgaaccactcagtgaccatgttggagaaggagagctgcttgcagcaaatcaagattcagcagcttgaagaggtgctgagccccacaggccgccagggagagaaggaggagcacaagtggggcatggagcagggccggcaggagctgtatggggccctgacccaaggccttcaggggctggagaagaccctgcgtgacagtgaggagatgcagcgggcccgcaccactcgctgcctgcagctgctggcccaggagatccgggacagcaagaagttcctgtgggaggagctggaactggtgcgggaggaggtgaccttcatctatcagaagctccaagcgcaggaggatgagatctcagagaacttggtgaacattcagaaaatgcagaaaacgcaggtgaaatgccgcaaaatcctgaccaagatgaagcagcagggtcatgagacagccgcctgtccggagactgaagagataccgcagggagccagtggctgctggaaggatgacctccagaaggaactgagtgatatatggtgatgcccagcctgcagtctgacccctgaccctcctctgaacccgttcccccaacgggatctggcagtgaccaccagaacctggagcccacctgagtccagacttccctcaccccctaggactcaccccaccacggcccccaaccttagctgtactgctgtctacaccctgagcagtgtggagtctcccagcgcccccagctccttgtcttcttgcaggtctgctgtgcacgtgctgcagaactccatagacagcctcactttgtgctcgggggcctgtcccaaggcctcgagcctaagaggccacaaggggcaccagtgcctgagccctccactcccctcctgggactctgactccgactctgaccaggacctctcccagccacctttcagcaagagcggccgctccttcccacccgcttgagcagccgggactgctctccctgaagacccctccagagagaaaataaactagcccagaccctcctct

SEQ ID NO: 73211 - DNA, 1894 bp, Homo Sapiens
  misc_feature (1580)..(1640): n is a, c, g, or t
agtaaatgtttcactgctctatttatatataatgtctgaattaattctgtgaggaaaggccaggaaattgcatgtgaagttcggtgcagtcaccacctctgtgtgacctgagctgcagtctcttcgctgagatgcaggttttaaatgagacttggggggctgagggcaggcctcaggcctcccagcgccccaacccctccttggtctaatgaaatgcagttcttagtgcagagatgttttaaggtgcaatatatctcttcctttcccgtggttttagagccaagctcaaggtagtaggacgtagggtcttattttgttttcaaacccccatcctcagagcgcagatacatgcagaggcttctgccaggataccacggggccttagtgggaacaggtggagaccagcacttccctttcctgctgctgaggtagggattggggggtcagaacccactcacttttgcctgttaaagttgccctcctgacgctggcagctctgccttggtcactggggatgcggctcgttgctcagccaccagtggccttgcggtattgtccaccatccactagagtgggatgaagtccagagtgtgggtatacatctcagatgcccatctacccactggggacttcaatgccagctgcatttggtttggttttcttaactgttggcttctccccacagcgttttttgtaaaattttaaacattcatattgttttcaaacttggaattcatagacactctggctctaggttccttaagggggaaaaccaaaagatgactttatttccacattcaagaaaatcagttcagttccaaagctgtggtccttccagccacttctagggacactggggaaccttgttaaacgttgacatcagtgctctccagcccgtgctgtcaccctcctatcttctggatctgccttcgggatggtcagtgacagcttctggaagctgagcacacacaggtgcacagccatgctgtggtctggcctgctacggcagcatggcagctctggtggagccttctcccttgccatttggttcccctgtgccaagtagctgcaggctgcccctcaaatcttcatttgtcccttttcacttcctgcagaacaagcctgggttagagggtctgctggaaatggcctttgaagaccaaggataccaggatgtgtgcactctgtcgtgttctgtgatgaatgggaaacgtaggcttccagaaagccagctctcttctgaaatgtgacggacctaagcaggaagtcatccaggacaggagtggctcagtgttggggatggacgctgtcgcccagccatgctccaccagggccaccaatgtgtagttggctggtggtcttcgggcatgtgagacctgctcttcactgtttccaccccacttggtggcctccaggatggtagtggcaccctcagagccccatcttcagcatgttctgaagcctcagagtggaaattcctgctaaggctctgtgtggacgcctttctcccgtgatctaaaggggacactgtactcaagcttttgacctcatgccttgtgtagtaaaaaaggatttggggnnnnnnnnnnnnnnnnnnnnnnnnnnnnnnnnnnnnnnnnnnnnnnnnnnnnnnnnnnnnncctttcctctttgtctttccatgtagaccagatatttgaaagggcagacgatggctagaggtgtaatgtgcagcttgtttatacggtattttgggaaacttaccttggatgggaaatcgaatcgtggattcaccaggccggtgctggcacactcaccctcgccctttccctccggttcagtacctattgtttctcctttcaaatatgtgattgtactagctctttccatatgaaagaattctccttatttaaat

SEQ ID NO: 73212 - DNA, 520 bp, Homo Sapiens
  misc_feature (203)..(246): n is a, c, g, or t
acttggtggcctccaggatggtagtggcaccctcagagccccatcttcagcatgttctgaagcctcagagtggaaattcctgctaaggctctgtgtggacgcctttctcccgtgatctaaaggggacactgtactcaagcttttgacctcatgccttgtgtagtaaaaaaggatttgggggttttgtttggttcctgagaggnnnnnnnnnnnnnnnnnnnnnnnnnnnnnnnnnnnnnnnnnnnncctctttgtctttccatgtagaccagatatttgaaagggcagacgatggctagaggtgtaatgtgcagcttgtttatacggtattttgggaaacttaccttggatgggaaatcgaatcgtggattcaccaggccggtgctggcacactcaccctcgccctttccctccggttcagtacctattgtttctcctttcaaatatgtgattgtactagctctttccatatgaaagaattctccttatttaaataaaaaaagtttaaaaagataaaaaa

SEQ ID NO: 73213 - DNA, 682 bp, Homo Sapiens
  misc_feature (231)..(315): n is a, c, g, or t
  misc_feature (372)..(424): n is a, c, g, or t
atttaaataaggagaattctttcatatggaaagagctagtacaatcacatatttgaaaggagaaacaataggtactgaaccggagggaaagggcgagggtgagtgtgccagcaccggcctggtgaatccacgattcgatttcccatccaaggtaagtttcccaaaataccgtataaacaagctgcacattacacctctagccatcgtctgccctttcaaatatctggtctnnnnnnnnnnnnnnnnnnnnnnnnnnnnnnnnnnnnnnnnnnnnnnnnnnnnnnnnnnnnnnnnnnnnnnnnnnnnnnnnnnnnnccccatgccttgtgtactaaaaaaggatttgggggttttgtttggttcctgagaggnnnnnnnnnnnnnnnnnnnnnnnnnnnnnnnnnnnnnnnnnnnnnnnnnnnnnctttccatgtagaccagatatttgaaagggcagacgatggctagaggtgtaatgtgcagcttgtttatacggtattttgggaaacttaccttggatgggaaatcgaatcgtggattcaccaggccggtgctggcacactcaccctcgccctttacctccggttcagtacctattgtttctcctttcaaatatgtgattgtactagctctttccatatgaaagaattctccttatttaaataaaaaaagtttaaaaaga

SEQ ID NO: 73214 - DNA, 520 bp, Homo Sapiens
  misc_feature (199)..(286): n is a, c, g, or t
acctgctcttcactgtttccaccccacttggtggcctccaggatggtagtggcaccctcagagccccatcttcagcatgttctgaagcctcagagtggaaattcctgctaaggctctgtgtggacgcctttctcccgtgatctaaaggggacactgtactcaagcttttgacctcatgccttgtgtagtaaaaaaggannnnnnnnnnnnnnnnnnnnnnnnnnnnnnnnnnnnnnnnnnnnnnnnnnnnnnnnnnnnnnnnnnnnnnnnnnnnnnnnnnnnnnnnatgtagaccagatatttgaaagggcagacgatggctagaggtgtaatgtgcagcttgtttatacggtattttgggaaacttaccttggatgggaaatcgaatcgtggattcaccaggccggtgctggcacactcaccctcgccctttccctccggttcagtacctattgtttctcctttcaaatatgtgattgtactagctctttccatatgaaagaattctccttatttaaat

SEQ ID NO: 73215 - DNA, 387 bp, Homo Sapiens
  misc_feature (66)..(153): n is a, c, g, or t
cccgtgatctaaaggggacactgtactcaagcttttgacctcatgccttgtgtagtaaaaaaggannnnnnnnnnnnnnnnnnnnnnnnnnnnnnnnnnnnnnnnnnnnnnnnnnnnnnnnnnnnnnnnnnnnnnnnnnnnnnnnnnnnnnnnatgtagaccagatatttgaaagggcagacgatggctagaggtgtaatgtgcagcttgtttatacggtattttgggaaacttaccttggatgggaaatcgaatcgtggattcaccaggccggggctggcacactcaccctcgccctttccctccggttcaggacctattgtttctcctttcaaaaatgggattggactagctctttccaaatgaaagaattctccttatttaaat

SEQ ID NO: 73216 - DNA, 1592 bp, Homo Sapiens
  misc_feature (495)..(532): n is a, c, g, or t
  misc_feature (615)..(652): n is a, c, g, or t
attgttactctcactctcactactgctttctgaagtctctttgtgtcactttagtatgtgtacctcctgggtgctctctgtacattttttctcctctatacaagtctgtgccatggcttctgctgtcatttcttctgctttgctcttcaccaggatttcgctgtgcccgtttccttgtctccctttgcttgtaactaccaggacttctgctccggcttctccggctcctttcctccctgccgtggcttctgctgctcccctcctttctttcagagcctctcttctctgggctatgtttatgggttctggactttttgtcagaatcagaatggctccatttgctgtcctccctagaactctcgtgttttaagaacctgggcttttccttggctttttcccggttatggtgactgctagaaagttcttcatgaagctttctcttcttagacttgtccttctcttcagaatcactgttgttatgccctgaacacttgnnnnnnnnnnnnnnnnnnnnnnnnnnnnnnnnnnnnnnattgttactctcactctcactactgctttctgaagtctcagtagaggaagaggaggaggaggaggaagatgagagtaacaatnnnnnnnnnnnnnnnnnnnnnnnnnnnnnnnnnnnnnncaagtgttcagggcataacaacagtgattctgaagagaaggacaagtctaagaagagaaagcttcatgaagaactttctagcagtcaccataaccgggaaaaagccaaggaaaagcccaggtttcttaaaacacgagagttctagggaggacagcaaatggagccattctgattctgacaaaaagtccagaacccataaacatagcccagagaagagaggctctgaaagaaaggaggggagcagcagaagccacggcagggaggaaaggagccggagaagccggagcagaagtcctggtagttacaagcaaagggagacaaggaaacgggcacagcgaaatcctggtgaagagcaaagcagaagaaatgacagcagaagccatggcacagacttgtatagaggagaaaaaatgtacagagagcacccaggaggtacacatactaaagtgacacaaagagaatgaagcagaagtagagaagaaagactgtatgtgacaattacctgggaataaaaatatctccacttttttattgaatacctttagcaaggggtaaattatgtactgttgtctttctaataaaaaagctcaattttaatttttcatctctagactgtcaattcaagtacaaaactacatgagtactatgagaatgaattttgcaaatatttgtaagtaagctattttggggctgtggaaatattttctgttggtaactgtttcttgttccccataccagataaaaaccgcatataactctgtgacattttctttgttctgaaacatcattaaaagaatgacagtacattgaatgggtataatttacttttttcaattcaaatttgttattctaggatttgaatttgcttgaagtgaattgtaataattattcaaattcattagtataaattaaggattaataaatctttaagacttttaaa

SEQ ID NO: 73217 - DNA, 918 bp, Homo Sapiens
acagtgagacgattggctcatggaccagcaggtctggtgttccttacggccttctcagggcttttggtggcagggctagatgctgggctggttattaactcctttcccaaaatgggagaatcctggatcccggaggacctctttaccttctcccccatcctgaggaatgtttttgagaatcccaccatggtgcagttgaatcaccggattctgggaatcacttcagtcactgccattacagtgctctacttcctctctcggagaattccccttcctagaaggaccaagatggcagcagtgactctgctggctttggcgtatacacaggtgggcttgggcatcagcacgctgctgatgtatgtcccaactcctctggccgccactcaccagtcaggctccttggctttgctcactggtgctctttggctgatgaatgaactccgaagagtcccaaaatgattcttagaggaccagcctcctgggactgtgactgcttttgagagctcttcagagatcataagaacttgggcttttctacgagatgaccttgacataccaagtggtttccaaatggtcaacttacttaaaaatcttttcctgttttgagatagtcactggatcaagaatgcattaagtgtggttaccctaaatgttcccttttaaatctgcttttcatgttgaaaatcagttttaatgtagagaaagaaatgtctgccatttgctgcttaacaggctttgtgtcaggtttttcagtgttggcaagctcttggttctacgtggatgatttctacgtggatgttctcctgagtccttaattctgcctaaatagaatttctttatgatcttaacttcacttccattaggtgaagattgaaaggataggattgacatacccaaagtagccagctggtcttcagc

SEQ ID NO: 73218 - DNA, 1497 bp, Homo Sapiens
gaagtgaaaagctggttcccttcatttactcacagatgaaaagattaacacgtcagcaaatcaaaatcagagaattcctaaggcactctgtgcaacaggagcgggtggacgtgggggtgggtgcacgactggcgcggctgcctccacacgggccctcctgaagttaccttggcccggctgctggctacgggaacgctgggtcctcgatgccatggtcggggttgcagctgaaggcgatggtgatggcgtaacgggtgccccagtggaccttctccacgcggtgtaggttctcggaccccgaggtgaagaaggagacgcgacctgcttccttaaagcaggactcagcacggcaaccaaggaatcaacaataagcaatgctctcagcttccagaatcgcatgtgtctctcccctctcggacgggtggtgagtccccggaggacacctgactccagccttcgcaccagcagcttcactggctctcggtccattaacttcttggaacccacaagacatcatccggaaacaaaaacatccagctctcggctccaccgtcttgttggcaccctcctccatgaacatgaaccgccctccgccgaagtcctccaggtagttggagaggtacagcagcgaggtgtagtcgaaggagccgtaggtcaccttgtccacgtgcgcatgccagtactcgtcgtgcgccgtccgcgcttccgtgctgtttatgcgggagaagaaggtgggcttggtcagatgcagcgaggatgcgctgatgccaaaagcctcagcaatggtgagctggaccttctgccgcacctcccggtataaccggaagtcctcctctgagaagatgttctgtattttatccccgaagtatctgtacaggttcacaaagtgcttcccgacagacagggcccctgagtgcaagtccagaatggatgcccctccgtcagatcctcccagggagagccccttttcagctacgctgcgaatccgctccgcttcctccctggtgatgacgacatcggtgacacctctgccgcactttcggggagtgcagccttcgaacctgcggtgactgtcgtagtcctcagagcagggcacctcgatgaatctccctgccacgacctcgccacggcgggccaggacctctgcgaccccgtcgtcggcccccaagctgctccagagcaggagtgcggtgagcacaaagccagcccccaggcccgcggtccttagccacggcctctgccacagcctctgcacctcccgcggggctcggtccttcttggtgctgctccggttccggcgctcggccgctccgttgccctcgggcgccttggttgcggccctccgctgaggagccatcggaccaggccgccgcggagccgggccggacgcgggcgccaggcccggggacgaacgccgtaacagggagcgcgaggcaggcacggcgcagggacgcgagtgcgcctcgtgccgaattcgccacccaggcctcgctacct

SEQ ID NO: 73219 - DNA, 1040 bp, Homo Sapiens
  misc_feature (696)..(696): n is a, c, g, or t
gccccggggggcccctcctccgccacagggcccttgagcattgctgcgtttgtttctccagctcctccttcctgcagaagcagttcccagaggggcaatttctccagcctgcctggtcgcgtctccttcttcacctcggggtccgagaacctacaccgcgtggagaaggtccactggggcacccgttacgccattaccatcgccttcagctgcaaccccgaccatggcatcgaggacccagcgttcccgtagccagcagccgggccaaggtaacttcaggagggcccgtgtggaggcagccgcgccagtcgtgcacccacccccacgtccacccgctcttgttgcacagagtgccttaggaattctctgattttgatttgctgacgtgttaatcttttcatctgtgagtaaatgaagggaaccagcttttcacttttccagcatcatgtgtgcttgggctgtaggcctgggagcctgaggtggaggccaggaaagggacccagcaggacggggcacaagtccccatctgtgaatggacgggaatcatccacccaggttcagcaaccccccgggactcgtccaggttcagcaaccccccggcccatcaaagactggctaaagcatcagccataaatggggacaaacgtggggcccagcagcttctgttcggggtctcggcatcagcaaaccgcagcnagctttggagaagggtccgtgagtggcggctctggaggcagcaacggggtcctttggggtgggtgggagctcggctggattcaggtggaggtgaacatctgccgttcccacgagccctgcgtgcacccccaatgctgctggcccacaaatcaacgcgggccacggccccaccacaccaggcttggccctgtcagcggccagcatcccgagggccagggtccgagtgtcctcaccaaggaggctcttggcgtcgctgtgccggctcccatgggccttctgctgggtcgagggtaggtctcctcctccccctttgccctggcattaaactgatggtcaggctggga

SEQ ID NO: 73220 - DNA, 857 bp, Homo Sapiens
ggattcagtcaccgcaggttcgaaggctgcactccccgaaagtgcggcagaggtgtcacccgatgtcgtcatcaccagggaggaagcggagcggattcgcagcgtagctgaaaaggggctctccctgggaggatctgacggaggggcatccattctggacttgcactcaggggccctgtctgtcgggaagcactttgtgaacctgtacagatacttcggggataaaatacagaacatcttctcagaggaggacttccggttataccgggaggtgcggcagaaggtccagctcaccattgctgaggcttttggcatcagcgcatcctcgctgcatctgaccaagcccaccttcttctcccgcataaacagcacggaagcgcggacggcgcacgacgagtactggcatgcgcacgtggacaaggtgacctacggctccttcgactacacctcgctgctgtacctctccaactacctggaggacttcggcggagggcggttcatgttcatggaggagggtgccaacaagacggtggagccgagagctggtcgcgtctccttcttcacctcggggtccgagaacctacaccgcgtggagaaggtccactggggcacccgttacgccatcaccatcgccttcagctgcaaccccgaccatggcatcgaggacccagcgttcccgtagccagcagccgggccaaggtaacttcaggagggcccgtgtggaggcagccgcgccagtcgtgcacccacccccacgtccacccgctcctgttggcacagagtgccttaggaattctctgattttgatttgctgacgtgttaatcttttcatctgtgagtaaatgaagggacccagc

SEQ ID NO: 73221 - DNA, 993 bp, Homo Sapiens
  misc_feature (69)..(69): n is a, c, g, or t
  misc_feature (99)..(99): n is a, c, g, or t
  misc_feature (155)..(156): n is a, c, g, or t
  misc_feature (245)..(245): n is a, c, g, or t
cgtctatctgtcagagacaatcgcgaagacaaagaggtctgtccggtgttttccactgcagagaagctngagaagtttggatcagagtagtgccagccnaccgaagcactgcgcgatgtggcctcacgacgcacagtgaagtgtgtccagaccgnncggatgagtgcgcactccaaaggagcccagcccaaaaggacaaggacaaggaggctggcgagaagccatcaggtggagccccggctgcnggatggcgagccaggacgagaggagccccagccgttctgaaggcgaggctgagagcgagagcagcgactccgagtccctggacatggcccccagcgacacggagcggactgaggggagtgagcgttctctgcaccaaacaacagttattaaggccccggtcactggcgccctcattaccgccagcagtgctgggagtggtgggagcagcggcggcggcggcaatagtttcagcttcagcagcgccagcagtcttagtagcagcagcaccagtgcgggttgcgccagcagccttggcggcggcggcgcctcggagcttctccctgcaacacagcccacagccagcagcgctcccaaaagccccgagccagcccaaggcgcgcttggctgcttatagactgtactagggcggaggggatccgggccttgcgtgcagcctcccaaccatgggctgggttttgtgcttactgtatgttggcgacttggtagggcaggagacgcagcgtggagcctacctcccgacattcacgcttcgccccacgctgctccgactggctgcagcggacactgcccaaagcagaggggagtctcagtgtcctgctagccagccgaacacttctctccggaagcaggctggttcgactgtgaggtgtttgactaaactgtttctctgactcgccccagaggtcgtggctcaaaggcacttaggacgccttaaatttgtaaataaaatgtttactacggtttgta

SEQ ID NO: 73222 - DNA, 1407 bp, Homo Sapiens
ggcacgaggctccacgcgcggcctggcggcggcggccactctaaccagcgcaaaatgtccctggaacaggaggaggaaacgcaacctgggcggctcctaggacgcagagacgccgtccccgccttcattgagcccaacgtgcgcttctggatcaccgagcgccaatcctttattcgacgatttcttcaatggacagaattattagatcctacaaatgtgttcatttcagttgaaagtatagaaaactcgaggcaactattgtgcacaaatgaagatgtttccagccctgcctcggcggaccaaaggatacaggaagcttggaagcggagtcttgcaacagtgcatcccgacagcagcaacctgatccccaagctttttcgacctgcagcgttcctgcctttcatggcgcccacggtatttttgtcaatgacgccactgaaagggatcaagtccgtgattttacctcaggttttcctctgtgcctacatggcagcgttcaacagcatcaatggaaacagaagttacacttgtaagccactagaaagatcattactaatggcgggagccgttgcttcttcaactttcttaggagtaatccctcagtttgtccagatgaagtatggcctgactggcccttggattaaaagactcttacctgtgatcttcctcggtgcaagccagtggaatgaatgtctacatgtcccgaagtcttgaatccattaaggggattgcggtcatggacaaggaaggcaatgtcctgggtcattccagaattgctgggacaaaggctgttagagaaacgctagcatccagaatagtgctgtttgggacctcagctctgattcctgaagtcttcacctacttttttaaaaggacccagtatttcaggaaaaacccagggtcattgtggattttgaaactgtcttgtactgtcctggcaatgggactgatggtgccattttcttttagtatatttccacagattggacagatacagtactgtagtcttgaagagaaaattcagtctccaacagaagaaacagaaatcttttatcacagaggggtgtaggcgtgagttttaggtgaatttatgtggttcctgcttgaaaaccttcccctctccaggttcggtttagagaactttgccacaggtcttctggggaccccagaggtgtctgtgctgacaaggcgacttcagattccatactgagatcgttcccaggctggcgtctctggggtttttaaggctggctggagaagacagtgggagggtgccccgtctgacacccctggggttgctgagggaacggttggagtggggatcggcctgcgaaaggatactgtgaaatcactaattaactaataaacctgtctcaagttgaggatttgaagaagtccaataggtgc

SEQ ID NO: 73223 - DNA, 176 bp, Homo Sapiens
gcggccgcctactactactatacggctgcgagaagacgacagaagggtgccccgtctgacacccctggggttgctgagggaacggttggagtggggatcggcctgcgaaaggatactgtgaaatcactaattaactaataaacctgtctcaagttgaggatttgaagaaagaacac

SEQ ID NO: 73224 - DNA, 1272 bp, Homo Sapiens
aacggctaggtagcgaggcgggtgggaatcggcacgaggccttagcgctgacccccacgcaacccagcgaaactccgcggagcgcgcgcggcacgatggacggtcgggtgcagctgatgaaggccctcctggccgggcccctccggcccgcggcgcgtcgctggaggaacccgattccctttcccgagacgtttgacggagataccgaccgactcccggagttcatcgtgcagacgtgctcctacatgttcgtggacgagaacacgttctccaacgacgccctgaaggtgacgttcctcatcacccgcctcacggggccagccctgcagtgggtgatcccctacatcaggaaggagagccccctgctcaatgattaccggggcttcctggccgagatgaagcgggtctttggatgggaggaggacgaggacttctaggccgggagacccttgggcctgggggcgggtgctctgggaagagttcgctgtgccagtggccaccgctagggtctccacaggcgccctccctccgcgcctccctccccctcgagccgccgcgatgtcccctgcgctcctgtcccctcccgcgtagtgcttgcctttgttccaggaatagcgctccaggctcctgctgcagctcctgggccgcactctagagcgcgctgcctccgccctcttttgccagcccagcccctccatgcacatttggacgctgtcctgcacttcaggtgcaagctgggctcctgttacatactggacagaccacccacagccgctgctgccaacccacctccactcctccagactgccagccaactacatcattctgcccacagacctacgctaccactgccatcgccatccaccgcatctcaccaacagactgtggctcctagtgatgtggactcacctcggaggtatccgagctggacacagcccctggacagtgatccagacagctggccgtcccccaaggagcctgtcaccttcagcgagacccatttcctccccatccccagagacctcttgtgttcctgccacatagctgccagggcttaagtgtgcctggcaaccaaatcgaatctctcattttctcctgtggaccagttagttttgcctagaatcctgttttcttctgaatttgcagctgtctctctgatgggtgccttttgttcaacacagtaagccctgctcccttccctgctctaatacactacctgtacaaaggttttttccttatttttaataaatgtcagacactattaaatagaaa

SEQ ID NO: 73225 - DNA, 1274 bp, Homo Sapiens
cctcgtgtactgacctctgcagagccgggtggagcccattgacgtccagcgaagcgaggagcagcgatggacggtcgggtgcagctgataaaggccctcctggccttgccgatccggcctgcgacgcgtcgctggaggaacccgattccctttcccgagacgtttgacggcgataccgaccgactcccggagttcatcgtgcagacgggctcctacatgttcgtggacgagaacacgttctccagcgacgccctgaaggtgacgttcctcatcacccgcctcacagggcccgccctgcagtgggtgatcccctacatcaagaaggagagccccctcctcaatgattaccggggctttctggccgagatgaagcgagtctttggatgggaggaggacgaggacttctaggccgggagaccctcgggcctgggggcgggtgctctggggagggtccgctgtgttactggccgccgccagggtcgccaccggcgccctccctccgcgcctccctccccctcgagccgccgcgatgtcccctgcgctcctgttccctcccgcgtagtgcttgcctttgttccaggaatagcgctccaggctcctgctgccgcccctgggcctcactctggagcgagccgccgccctctccttccagccagccagcccctcccatgtacatttggacgctgtcctgcgctccagctgcaagctgggctcctgttacacactggacagaccacccactgccgccgctgccaagccctctcctccccaccagactgccagacgactacatcattctgcccacagacctgcgctgccacagccatcgccatccatcgcatcccaccgacagactgctgctcctagtgatctggactcacctcggaggtatctgggctggccacagtccctggacagtgatccagacagctggccgccccccaagggatctgtcaccttcagcgagacctatttcctccccacccccagaaacctcttgtgttcttgcctaggcccaggtgttcctggcagccaaatcgagtctctcattttctcttgtggaccagttagttttgcccataacgcagtattctgagtttgcaactgtctctctgatgtgtgccttttgttcaacacagtaacccctgcattctgctctgctctaatacactacctggagaaagtcttttccttattttcaataaatgtcagacattattgaaaagaaaaaaacctcgtgccgaattcaacacgcagcctcgaacctagcctat

SEQ ID NO: 73226 - DNA, 802 bp, Homo Sapiens
tagagcacatctgtcgtggatcgatgatgcgatgctgtgcagcgcagtctgtggcagaatgatgtagtcgtctgacagtctggtggggaggagaggcttgccagcggcggcagtgggtgtctgtccagtgtgtaacaggagcccagcttgcagctggagcgcaggacagcgtccaaatgtacatgggaggggctggctggctggaaggagagggcggcggctcgctccagagtgaggcccaggggcggcagcaggagcctggagcgctattcctggaacaaaggcaagcactacgcgggagggaacaggagcgcaggggacatcgcggcggctcgagggggagggaggcgcggagggagggcgccggtggcgaccctggcggcggccagtaacacagcggaccctccccagagcacccgcccccaggcccgagggtctcccggcctagaagtcctcgtcctcctcccatccaaagactcgcttcatctcggccagaaagccccggtaatcattgaggagggggctctccttcttgatgtaggggatcacccactgcagggcgggccctgtgaggcgggtgatgaggaacgtcaccttcagggcgtcgctggagaacgtgttctcgtccacgaacatgtaggagcccgtctgcacgatgaactccgggagtcggtcggtatcgccgtcaaacgtctcgggaaagggaatcgggttcctccagcgacgcgtcgcaggccggatcggcaaggccaggaggcctttatcagctgcacccgaccgtccatcgctgctcctcgcttcg

SEQ ID NO: 73227 - DNA, 669 bp, Homo Sapiens
ccttcaatgatcgctcagccatctcccagcacctgaggactcacactggcgctaagccctacaagtgtcaggactgtggaaaagccttccgccagagctcccacctcatcagacatcagaggactcacaccggggagcgcccatatgcatgcaacaaatgtggaaaggccttcacccagagctcacaccttattgggcaccagagaacccacaataggacaaagcgaaagaagaaacagcctacctcatagctctcaagccagttgaagaaaccttgccttttcagcttgaccctgcaatataacatgcacaggcctgcttgtgaatcaggactgaatgtgaaagggaagtattgagtgaggacattcccaaaaccaaaggacaactgaggagactgcccagcacataatgaataaataagaaaatgagtgaggagttattaacatcatttggaaaaaagatttcccattcacttgatattgtttgttcactcatttagtcattaaaagtgagattaataaaatctgaaaatgttatataataactttaaaaagccaggtaattaataatctgcactgatattacatccacagtaccacagtatttatgtgtatgaattaaggattaaaagataatgtggataaataaactattgatctatgtctgtgt

SEQ ID NO: 73228 - DNA, 921 bp, Homo Sapiens
  misc_feature (804)..(838): n is a, c, g, or t
attagaattcaatcatcagcaaatttaaattagatatagccacaatctttaaaatgattgcataaaataaggaagtagttaaagctctcagagacaatgatgttacaattacagatatatttaatcaggcaataggaaattcaataccatttaaacattacatttaaactaattagcagtttcattttgtcattaaaattaataatgcacttcacatccaaacaggtgtggagggctgacattttccaactgagaacagcgttaagtgccttcttgtctgtacttttccatctcatggattctcaggggcacagtggtcacatgttagccccccttctcacttatggaaccaacttttaaaaggctccaaattcaacctaactcttggcagctttactccagtcatagtatagaagaatcaggttatctccctggatttttcagtcccctaatctaacttgcaaaaggctcttaatttgcttctttgctacaaaagatgagggaggaaaattgtcatctaccatgactagaggtaacagtgaactggaaagcactaaggtataaagcaatgtttcattatttggtctcactgctaatgtttatgtgacaccagtaaacctttcacacttaaaaattttgagttgaaatttcctctaaaagactgaaaataggcacagttctcccaggcacagataaaataggctttccttacacccctccatgcaaagtggaggaaatcatttactttattaccccggccgtaatggccgaattcccgggcatatgtccggtaccgtcgactgnnnnnnnnnnnnnnnnnnnnnnnnnnnnnnnnnnncggccgcttcctcgctcactacttcgctgcgctcggtcgttcggctacaccgagctagcgccctatagtgagttaatcagtct

SEQ ID NO: 73229 - DNA, 859 bp, Homo Sapiens
tatacgaaaagttactcacgctcgaacagcgtacccggggaacagtactagccacgtggaaaattcggccattacggccgggggcacttttgcttttgtgttaaatgtagatgtgctaaaatatatagatctatcatattttacctacatatgtatgtcattccagtataaaacattctcctctacccaagaaccatagccatgattgttataaatcaatgaagtgtaaacatacattattaaaaaaccacttctgacattccattatgtgctattcaaagatggactattgaactatagaaaagacagactgtgcatttgttcgttgatcctcatcttattcctgacatgtaaaaatcaattttacgtagagtcaacattgtaggtaggttaaaataccagtggcaaatttggaaattcagaaacttataaaccacgagaaatatataggcttgtctctttggtcttttatttgggctctattggtgggaatctatttcctattccataagtaagtatacctaacatgctgtggaatcttgagtttccaacaccgtgctgcttgatagaatgactttgaggtccttggataaaatgtgatatatgcaagtacagtatgttgctattactattgcaggaatataaataataaaagactgttattagcacttagtaagtcttcatctatgcatgtttttgagttgactgattccaagaatgaaatatgaggtttattgaattattcctttgaaagggatcaaaacttatattcaatgcactttataattaatggtgtctaaatgcctcagtcagtgcctaactgcacatacaaaaataaaccttctttctgtaatctacc

SEQ ID NO: 73230 - DNA, 688 bp, Homo Sapiens
gcatgacatcatgaggccggatgaaacttctcagtccagcagtttccagtcctaacaaatgctcccacctgaatttgtatatgactgcatttgtgggtgtgtgtgtgttttcaagcaaattccagatttgtttccttttggcctcctgcaaagtctccagaagaaaatttgccaatctttcttactttctatttttatgatgacaatcaaagccggcctgagaaacactatttgtgactttttaaacgattagtgatgtccttaaaatgtggtctgccaatctgtacaaaatggtcctatttttgtgaagagggacataagataaaatgatgttatacatcaatatgtatatatgtatttctatatagacttggagaatactgccaaaacatttatgacaagctgtatcactgccttcgtttatatttttttaactgtgataatccccacaggcacattaactgttgcacttttgaatgtccaaaatttatattttagaaataataaaaagaaagatacttacatgttcccaaaacaatggtgtggtgaatgtgtgagaaaaactaacttgatagggtctaccaatacaaaatgtattacgaatgcccctgttcatgtttttgttttaaaacgtgtaaatgaagatctttatatttcaataaatgatatataatttaaagttataaaa

SEQ ID NO: 73231 - DNA, 801 bp, Homo Sapiens
  misc_feature (656)..(708): n is a, c, g, or t
gctccctgcaggagggaggctccagggtaagacagggctggcaggagcagactgcctcagcccatgtgccctgccggccagggcgtgggctcccctcggctgtggtgcctcctctggccccccaggtccacgtcctttaaattggccctttggctcttgcccttggctccctggggcagacagcaggcttaggccattgatatcgcagttcttcctatcagcttcagtgacccagggtctgaactgcctccatcctagggcaacctggggcagacaggcctggtggggggtggggaaacctccttccacctgagcttgcttgaagggacccagagtctttgggcccagatctttaaacctttgtgtcgtgttgcagcagagtgacgatgggggttggggggttatttattttgcctgtccttatccctgcttggacacctgagcatctgattcctgtccccctggtgccatctggcctggctggagccaggaacaggagggacacttccccagaatccgcatgtttccccagtgattacactccactgccaccgtggtgcctggctttaactcccacccctgctatgactcctctctgcagagacgcgactggcggctccagcagggactacctttcttataaacccagggggacnnnnnnnnnnnnnnnnnnnnnnnnnnnnnnnnnnnnnnnnnnnnnnnnnnnnntcttgatcccttgcttccctccccccagtgcgttctgtgatcgccaagttcaaagctgtgcacatgtggacactcaataaatgttcattggtg

SEQ ID NO: 73232 - DNA, 1265 bp, Homo Sapiens
  misc_feature (652)..(660): n is a, c, g, or t
attccagtctgtaaacttctataatgtcacgaatctctagtgtacgaagcaactacatccgttgggctgtggactctgctgaaaaggaacatataattgtatggatggtaggattaagttgttgagtagttttgtaatcaagattttatgtaacatttgtaaagggaaaattagcacttttgtggttcttaagggaaaagaaacagaccttgtggagattataatttccttggtttctgttaccactgttagagggagttgtatcatttaacatatagtaggatagtttaagtgtagggaggacaattattgtctgaagctaaaatgggttatttataggactgatggaaatgatttcatctctgccatctctaaagcacttttcattgaacatgttagcctaggatacgtacagtaaattaacaatgatagcagcagatgcctagctcatcctgggtttgcttctgaccttgtcatgtgtgtgccaccaaacacgttattggcacctttttaaataagctctcatgatcaagatggtgatggtagagaagctgcccggaataaactgaatttcatatgttctaaaatgactagcaatggtttaaaaaggaagaagagtggaagtgaagaaggtggtataaatgctgtcaannnnnnnnnaacccaagtattttggtggggaaaagcaagtatctattgcttagcatatgtaaagttgtagtctatatttatggggccattgcttaaagattataaattatgtaaatacattaataaattctaagtttcatttgacattccattgaatctcgcacccagtcttgcgtatgcctgcccagttttcagcctcttaacgggagactcaagcacattggtattgtataaaggtatagagcacttagcttacaatctttaaaggtttctctgccttcccttctacccacccgcctcccaccagatcccatctggaaatcataataaagacatatgccactttgacaaacctgactagtccttactagcctgagggtaaaagattaagctccaacctcaagtcatttacctggtcttggtaataagtttcttttagcttgtacagcatcctcagaccaactgaggagctttccttgttaacaatttagcttatctttctgtttcctttatttttcccctgcctctgttagtggttaacactcttttccctcagggagcctaatgaggtttttaatatcatctaaaaataaagcattgaagtgaagttggtg

SEQ ID NO: 73233 - DNA, 516 bp, Homo Sapiens
catcaaaccacgccgcgagcaaggaataaacttttactgcatgaaggagatgcgacatctaggtcgacttagtacaccatcacccaccctactctaacacacacagaaatgggttctttgaaatggagtgatgctgtatcagacaggccttagttctacagaatccagctgctgtgaggtccctggtgaagctggtggaagagaaccttctgtatgtacctggggagtgggcttaaaagaatcctgtcaacaacccgcacatcaacatgttttggatgatgctacctgctcagcaggcatagtgaagtggagtgcctttaagatcacttttcactgggggatggttttgttgatgacacaacattactaatcaagcaaatgggaaccaagatacaatattattttgttagctaattcccatagtccagtcagatttttttagcccctttcttattccatttgtcaatttccttttgtgatgcatagttttgaaagtaaataaaaataaattatgtt

SEQ ID NO: 73234 - DNA, 2049 bp, Homo Sapiens
aagggctaggtacgaggctggggttgaattcggcacgaggcggatgttggtttctgctggttgtaggtccttggctggtcgggcctccggtgttctgcttctccccgctgagctgctgcctggtgaagaggaagccatggcgctccgagtcaccaggaactcgaaaattaatgctgaaaataaggcgaagatcaacatggcaggcgcaaagcgcgttcctacggcccctgctgcaacctccaagcccggactgaggccaagaacagctcttggggacattggtaacaaagtcagtgaacaactgcaggccaaaatgcctatgaagaaggaagcaaaaccttcagctactggaaaagtcattgataaaaaactaccaaaacctcttgaaaaggtacctatgctggtgccagtgccagtgtctgagccagtgccagagccagaacctgagccagaacctgagcctgttaaagaagaaaaactttcgcctgagcctattttggttgatactgcctctccaagcccaatggaaacatctggatgtgcccctgcagaagaagacctgtgtcaggctttctctgatgtaattcttgcagtaaatgatgtggatgcagaagatggagctgatccaaacctttgtagtgaatatgtgaaagatatttatgcttatctgagacaacttgaggaagagcaagcagtcagaccaaaatacctactggggtcgggaagtcactggaaacatgagagccatcctaattgactggctagtacaggttcaaatgaaattcaggttgttgcaggagaccatgtacatgactgtctccattattgatcggttcatgcagaataattgtgtgcccaagaagatgctgcagctggttggtgtcactgccatgtttattgcaagcaaatatgaagaaatgtaccctccagaaattggtgactttgcttttgtgactgacaacacttatactaagcaccaaatcagacagatggaaatgaagattctaagagctttaaactttggtctgggtcggcctctacctttgcacttccttcggagagcatctaagattggagaggttgatgtcgagcaacatactttggccaaatacctgatggaactaactatgttggactatgacatggtgcactttcctccttctcaaattgcagcaggagctttttgcttagcactgaaaattctggataatggtgaatggacaccaactctacaacattacctgtcatatactgaagaatctcttcttccagttatgcagcacctggctaagaatgtagtcatggtaaatcaaggacttacaaagcacatgactgtcaagaacaagtatgccacatcgaagcatgctaagatcagcactctaccacagctgaattctgcactagttcaagatttagccaaggctgtggcaaaggtgtaacttgtaaacttgagttggagtactatatttacaaataaaattggcaccatgtgccatctgtacatattactgttgcatttacttttaataaagcttgtggccccttttacttttttatagcttaactaatttgaatgtggttacttcctactgtagggtagcggaaaagttgtcttaaaaggtatggtggggatatttttaaaaactccttttggtttacctggggatccaattgatgtatatgtttatatactgggttcttgttttatatacctggcttttactttattaatatgagttactgaaggtgatggaggtatttgaaaattttacttccataggacatactgcatgtaagccaagtcatggagaatctgctgcatagctctattttaaagtaaaagtctaccaccgaatccctagtccccctgttttctgtttcttcttgtgattgctgccataattctaagttatttacttttaccactatttaagttatcaactttagctagtatcttcaaactttcactttgaaaaatgagaattttatattctaagccagttttcattttggttttgtgttttggttaataaaacaatactcaaatac

SEQ ID NO: 73235 - DNA, 960 bp, Homo Sapiens
aataggctagtacgaggctgggtggtgaattcggcacgaggggtccttggctggtcgggcctccggtgttctgcttctccccgctgagctgctgcctggtgaagaggaagccatggcgctccgagtcaccaggaactcgaaaattaatgctgaaaataaggcgaagatcaacatggcaggcgcaaagcgcgttcctacggcccctgctgcaacctccaagcccggactgaggccaagaacagctcttggggacattggtaacaaagtcagtgaacaactgcaggccaaaatgcctatgaagaaggaagcaaaaccttcagctactggaaaagtcattgataaaaaactaccaaaacctcttgaaaaggtacctatgctggtgccagtgccagtgtctgagccagtgccagagccagaacctgagccagaacctgagcctgttaaagaagaaaaactttcgcctgagcctattttggttgatactgcctctccaagcccaatggaaacatctggatgtgcccctgcagaagaagacctgtgtcaggctttctctgatgtaattcttgcagtaaatgatgtggatgcagaagatggagctgatccaaacctttgtagtgaatatgtgaacagatatttatgcttatctgagacaacttgaggaagagcaaagcagtcagaccaaaatacctactgggtcgggaagtcactgggaaacatgagagccatcctaaattgactggtagtacaggtttcacatgaaattcaggttgttggcaggagaccatgtcacatgactgtcttcattattgatcggttccatgccgaataaattgtgtgcccaagaagaatgtgcagttggttggggtcaactggcaggtttatggagcaatatgagaatggcctccgaaatgggattggtttgggatggattttttaccaatgatggaggagatttaagat

SEQ ID NO: 73236 - DNA, 1032 bp, Homo Sapiens
taggtagcgaggcctgggtggcgaattcggcacgaggggctgttggtttctgctggttgtaggtccttggctggtcgggcctccggtgttctgcttctccccgctgagctgctgcctggtgaagaggaagccatggcgctccgagtcaccaggaactcgaaaattaatgctgaaaataaggcgaagatcaacatggcaggcgcaaagcgcgttcctacggcccctgctgcaacctccaagcccggactgaggccaagaacagctcttggggacattggtaacaaagtcagtgaacaactgcaggccaaaatgcctatgaagaaggaagcaaaaccttcagctactggaaaagtcattgataaaaaactaccaaaacctcttgaaaaggtacctatgctggtgccagtgccagtgtctgagccagtgccagagccagaacctgagccagaacctgagcctgttaaagaagaaaaactttcgcctgagcctattttggttgatactgcctctccaagcccaatggaaacatctggatgtgcccctgcagaagaagacctgtgtcaggctttctctgatgtaattcttgcagtaaatgatgtggatgcagaagatggagctgatccaaaccctttgtagtgaatatgtgaaagatatttatgcttatctgagacaacttgaggaagagcaagcagtcagaccaaaaatacctactgggtcgggaagtcactggaaacatgagagccatcctaattgactggctagtacagggtcaaatgaaattcaggttgttgcaggagaccatgtacatggactgtctccattattgatcgggtcatgcagaataattgtgtgcccaagaaaaatgctgccacctgggtgggtgtcactgcccatggtttattgccaagcaaattatgaaagaaaatgtacccctcccaaaaaatttgggggacttttgcctttttggggaactggacaacccccttttatacctaaggccacccacaaatccagaacaggaatggggaaaac

SEQ ID NO: 73237 - DNA, 908 bp, Homo Sapiens
tttaggtgtgtgtggtggttatgtcatttattagaccatcccagacataagacaatcagggaaatcagaaaactccagcctcaaatgtgtctataatttcctgttctaccattgtcatatcataacatggtattacttcttaaggttttgattaagttgatctagcctcaacttaaattgtaatacatctgcctaattattgtctggaataacttttcaaccatccaatgcccactgctctcacaatgattattgtagagaagtaaaatggtaattattcaagtaaagtcacataatttctggagtcagtttttcataacaagtttatggaatacatcatcattggcttcttcataatatatttattatgagtgaccaaattttgcctggaggagcaaaatgctcaaaacttgttattataggttaatttccagctcactgttgacactgaaagattctgtgttactttaaacccaggataaaaggctggaaaaaaaattaaatgtaagtcataaactagtactcagcttttcctagtttctaaggcttattaacatttgcaaattactcaataaatgtctttcataatggaataacataaaagcttttgatttggcagatagtgatattttatttattttcattctggttgaaaaaaatctcagtggcttctcttcattccacgagaattttgatttttaacagcagtctctctttttctcagcattgcaaatatatatgtatatatacattcatgaccaaagtatcgcttactgaccatgcagctgtaaaccttctgtgcctatcaaacaaatacatagcatgaaactaattttagaagtttcatgggggaattttaggggaaagtataaacctaagagtgagtgaatggagatgattcatggaaa

SEQ ID NO: 73238 - DNA, 1223 bp, Homo Sapiens
  misc_feature (16)..(16): n is a, c, g, or t
  misc_feature (737)..(851): n is a, c, g, or t
  misc_feature (985)..(993): n is a, c, g, or t
  misc_feature (1094)..(1105): n is a, c, g, or t
  misc_feature (1152)..(1176): n is a, c, g, or t
tcaccatatgaagacnggaggtccctggctctgtcactgaatacaaggtcttggcactggactctgccagcatcctcctgatggtaccaggggacagtaatagccagcacacccacaacccagacaccaatccctctgcaacgtggtggcgtgctcttcattggggccaatgagagtgtctcactgaagcttactgagccgaaggacctgctgatattccgtgcctgctgtctgctgtaaaggctgcagcctccccagctctcctctgccagccaccctaaattccagccaacctcacctcctcgggcccagctcaagcccccttccttgctctggaccccttaggtataccctggaagagctggggtgggggaggagggagcgtgaaggtagtgactcctgaacacacccaggtggaaccatctttggggaggagaggcccgtgtgaggggtctgatactccctttgtcttccctctctactcctcgctacacctgagccaggctcttgccaactctgttccagcctatggctttaggctagctgttaaatatgtgacccagcattagctcagcatctgtcagagcaagagaccaggtaatttctaagaacagggttctagcgatgggactgcccatttcctcagctgcagaggaggaaagggaaagggtaggcctgtagactaacgctgtttacacccttgttctgtcaaagcaattaaagatcacttgtgttgnnnnnnnnnnnnnnnnnnnnnnnnnnnnnnnnnnnnnnnnnnnnnnnnnnnnnnnnnnnnnnnnnnnnnnnnnnnnnnnnnnnnnnnnnnnnnnnnnnnnnnnnnnnnnnnnnnnctttgcggcccccctcggccctcaaaaacttttcaaaccctttttttggggcgggggccccagaggtaaaggaaactgggccaacctggttccaaaggaaaccccgggcatggcatagggttggattccccccnnnnnnnnncccccggggggaaccgaagggttttaaaaaatcccaaaggggtttcgggggcctttctgggttttacccagggggtccaaggcaagctcaatttaaatttnnnnnnnnnnnntggccaattattggaaagaaggggtggaattcccttaacacattttnnnnnnnnnnnnnnnnnnnnnnnnnaaaaggggtgtgagtgacaccctaattccgcccccgggcatatacaa

SEQ ID NO: 73239 - DNA, 3080 bp, Homo Sapiens
catttttattcaggcgacgcttaagggagcccggccgcgcccggtgcattgtgggagcggcccgcggcccgttttcgggaggaggcggagggcgcaaagcgagccggtggatccataaagaacccagccaacccgcagagggaggggaggggctgagctgtgaggagagcggggcccaagaaccatgtctacgcgggagtcctttaacccggaaagttacgaattggacaaaagcttccggctaaccagattcactgaactgaagggcacaggctgcaaagtgccccaagatgtcctgcaaaaattgctggaatctttacaggagaaccacttccaagaagatgagcagtttctgggagccgttatgccaaggcttggcattggaatggatacttgtgtcattcctttgaggcacggtgggctttccttggttcaaaccacagattacatttacccgatcgtagacgacccttacatgatgggcaggatagcgtgtgccaatgtcctcagtgacctctatgcaatgggggtcacggaatgtgacaatatgctgatgctccttggagtcagtaataaaatgaccgacagggaaagggataaagtgatgcctctgattatccaaggttttaaagacgcagctgaggaagcaggaacgtctgtaacaggcggccaaacagtactaaacccctggattgtcctgggaggagtggctaccactgtctgccaacccaatgaatttatcatgccagacaatgcagtgccaggggacgtgctggtgctgacaaaacccctggggacacaggtggcagtggctgtgcaccagtggctggatatccctgagaaatggaataagattaaactagtggtcacccaagaagatgtagagctggcctaccaggaggcgatgatgaacatggcgaggctcaacaggacagctgcaggactcatgcacacgttcaatgcccacgccgccactgacatcacgggcttcgggattttgggccatgcgcagaacctggccaagcagcagaggaacgaggtgtcgtttgtaattcacaacctcccggtgctggccaagatggctgcggtgagcaaggcctgcggaaacatgttcggcctcatgcacgggacctgcccggagacttcaggcggccttctgatctgtttaccacgtgagcaagcagctcggttctgtgcagagataaagtcccccaaatatggtgaaggccaccaagcatggattattgggattgtagagaagggcaaccgcacagccagaatcatagacaaaccccggatcatcgaggtcgcaccacaagtggccactcaaaatgtgaatcccacacccggggccacctcttaatctagacagaaatagctgtttggttttgtttttaaatagatctatttcccttatcacttcaattaaagactataaacaacaaaaatctcattgtgtctacacatcggggtgaccttaggtcggtttgtaagtggatacaattaataaaataaaatccattgcctttttttcctgttacattaactgaagatgcacctaatcttgaggcagcttctgagttgagaattatattgttatccaatactgttgattcattttgaatctttagacacttatctcttgccgcataggctttttaaaggtgctttcacatagcacaggcattacccgtagtcgtgtcaaatagcagttggtgtcttcattttatgtatatttatcatataagtctgatttgtctcttgaagcgtcttgaatggttttctggagagacagcattggtaagtggcacatgacggtatcccagtcataagagggttgcatgattcctttgagtgtttgatttgaaaagcctagtcttgtctctcaagagcatctcggacccagaacattctccagtagtgcattcagttcaacacagcaagtgcttcattgcatggaaaacactttgaagacaaaaaagaaatcttatttctttttttgtagccttcctgatatttacagtaataccattaactgttttatcgatagcaaaaaaggatactttttgcaatgttattagatgttctatagtgctacaaggaattgccttccgaatggaggttcatgtataatactcatttacaattcaatatataattacacaaataatttttaaatataatcaatagtaaagactgttctgtggatggtagtgtttaatacattttctattttgtacagtgatttcaggccttttgttttcttaaaatcagcagctgtttggcctaattcttagcattattttgtcctttgcgccagtacttttttgtgcacgctttttgtgatctgtgttaaaaacctgcattgccaacattgcagctcgaacttaaacttgttattcaaataaatatttaattttttaaattgctcttgtataatcagatgccccttttagtattattttagaagcgttgggagggttttgcctaaagtacaatttatcgggaaaaactagattttagttttataaaacttttaagtctttcatgggacctatattttcttgaattaaattttgtagttctagaataaataggcaatctaaaaaggtgttctctgtgttatgtaaagtggaggcttccttatattttaacctactaagcaatgaggagggattcctgtcattaagcacaagggcgctggatcctcaagtgcccatcttcgtgagagaaaaagcagcacatcctgcccatttctggtgctttctgctcacaggcaccaaagctgcacatgtaaactgacttcttgccaaaggaaatgacccctgggaagttcaagctcctggaagaggctttaactcggacgcgccctcctccaggaaccagtgggcagggcagccttcatgcatgtgtaactggacctccagccataagcatggtgtgcagtatggaagagcctgctacggaactgaaagtgattggacattttataggaattgatagagatgttggtcctcaaaagctacaaaccagtggtctgcaaaataaagtgtgttggaaacctctagtgagataaaaaa

SEQ ID NO: 73240 - DNA, 661 bp, Homo Sapiens
ggtgtcataaacctctgagactgtagcctgcttcttagcttctcattgagattcctagaggtgcgttcgagttttcagagtaattttccagaccaaccagcgtcagtgggaaatctgacctcttttggcaaactgcgatcattcattttcctgagtcccctggtggggtggggggaattctgcctcaggaccctgaggggtctttggggcaagatggccttggtaatgcagccactaagaacaggacttcattcaaaggcataatgaagtaaccagggtgaccatcaagtaaaattaaagcacaagatcattgtaggaggcttccttgtcaaagacgtgaacgtgggatttccaacgcaccacggtgtgtccactcatcactgcatgttaggaactgctgtctctttgggacacgagttaaaagaacacactaatttctggagtgtgcctgcagcttcacggccttcattttgttactaagttattttctggaagaacagcaaaaatttcaggttgaaaacagaactttccaagtgctactgaaattccgcagagaattacgctgcgatggtgggtttcttaccctagaaacatcctaacctgtatccacagaagatgtccttttatttttttaaaagatcaataaaatcaagagaaacga

SEQ ID NO: 73241 - DNA, 595 bp, Homo Sapiens
aggggaaatggcagtctgggctggcgtggtaggaagggctttggtgttcatggaatgggcctgctgctctcagaccttcaaaggatggaaccaacgaaggaccaaatgagaaagcagatgctgtgccttgcagagggccatgaatgtcagttattatttttctcccttatacaattattttgtggttattattacaatgtacatggctgttgcatagaagacatgactggtggaggctgaggaaagccatgacattctacaattgccatcaggctaaggccccgtgagcatttctctcccttgtaatattaaccctgtatttctgggatcacatcacggaatattctttgcctttccactttccaggaaatctctcggactgggctaccctccttgtgtgtgatgaaagatgagctatatttcagaacaaagtgctgtgttgtcataatttgcctggactcccagggcgtctcttacccaacttgataacgatgctgttcattagcagcctttgttaactgataaccaagagcggtaatgtgatactcataagcaattttctgtgtgtaggataaaataaaccatcttgtatggg

SEQ ID NO: 73242 - DNA, 1914 bp, Homo Sapiens
  misc_feature (585)..(615): n is a, c, g, or t
  misc_feature (1550)..(1572): n is a, c, g, or t
  misc_feature (1608)..(1610): n is a, c, g, or t
  misc_feature (1614)..(1716): n is a, c, g, or t
  misc_feature (1772)..(1781): n is a, c, g, or t
tggaccggtccggaattcccgggatatcgtcgacccacgcgtccgatccttggctactaacatctggagactgtgagctccttcccattccccttcctggtactgtggagtcagattggcatgaaaccactaacttcattctagaatcattgtagccataagttgtgtgctttttattaatcatgccaaacataatgtaactgggcagagaatggtcctaaccaaggtacctatgaaaagcgctagctatcatgtgtagtagatgcatcattttggctcttcttacatttgtaaaaatgtacagattaggtcatcttaattcatattagtgacacggaacagcacctccactatttgtatgttcaaataagctttcagactaatagcttttttggtgtctaaaatgtaagcaaaaaattcctgctgaaacattccagtcctttcatttagtataaaagaaatactgaacaagccagtgggatggaattgaaagaactaatcatgaggactctgtcctgacacaggtcctcaaagctagcagagatacgcagacattgtggcatctgggtagaagaatactgtatnnnnnnnnnnnnnnnnnnnnnnnnnnnnnnncacactcattccttctgctcttgggcacaggcagtgggtgtagaggtaaccagtagctttgagaagctacatgtagctcaccagtggttttctctaaggaatcacaaaagtaaactacccaaccacatgccacgtaatatttcagccattcagaggaaactggtttctctttatttgcttatatgttaatatggtttttaaattggtaacttttatatagtatggtaacagtatgttaatacacacatacatacgcacacatgctttgggtccttccataatacttttatatttgtaaatcaatgttttggagcaatcccaagtttaagggaaatattttcgtaaatgtaatggttttgaaaatctgagcaatccttttgcttatacatttttaaagcatttgtgctttaaaattgttatgctggtgtttgaaacatgatactcctgtggtgcagatgagaagctataacagtgaatatgtggtttctcttacgtcatccaccttgacatgatgggtcagaaacaaatggaaatccagagcaagtcctccagggttgcaccaggtttacctaaagcttgttgccttttcttgtgctgtttatgcgtgtagagcactcaagaaagttctgaaactgctttgtatctgctttgtactgttggtgccttcttggtattgtaccccaaaattctgcatagattatttagtataatggtaagttaaaaaatgttaaaggaagattttattaagaatctgaatgtttattcattatattgttacaatttaacattaacatttatttgtggtatttgtgatttggttaatctgtataaaaattgtaagtagaaaggtttatatttcatcttaattcttttgatgttgtaaacgtactttttaaaagatggattatttgaatgtttatggcacctgacttgtnnnnnnnnnnnnnnnnnnnnnnntccttagaatcattaaattgtgtccctgtattaccnnnatannnnnnnnnnnnnnnnnnnnnnnnnnnnnnnnnnnnnnnnnnnnnnnnnnnnnnnnnnnnnnnnnnnnnnnnnnnnnnnnnnnnnnnnnnnnnnnnnnnnnnnggggggcgcccctaaaaaatacccccggggggggccaagttttaccgccccccccnnnnnnnnnnaaaaaagggggcccccttagggggggccatttttaaaactaagggcccggggccccctttttataaacccccgggaggggggaaaaaacgttcacctctggggccttttttggagaaaacccctctttctttt

SEQ ID NO: 73243 - DNA, 718 bp, Homo Sapiens
  misc_feature (688)..(689): n is a, c, g, or t
  misc_feature (708)..(708): n is a, c, g, or t
tggggcgcgcgcgacgccattcctggatgcgctggagaacctgaccgccgaggagctcaagaagttcaagctgaagctgctgtcggtgccgctgcgcgagggctacgggcgcatcccgcggggcgcgcatgctgtccatggacgccttggacctcaccgacaagctggtcagcttctacctggagacctacggcgccgagctcaccgctaacgtgctgcgcgacatgggcctgcaggagatggccgggcagctgcaggcggccaccgcaccagggctctggagccgcgccagctgggatccaggcccctcctcagtcggcagccaagccaggcctgcactttatagaccagcaccgggctgcgcttatcgcgagggtcacaaacgttgagtggctgctggatgctctgtacgggaaggtcctgacggatgagcagtaccaggcagtgcgggccgagcccaccaacccaagcaagatgcggaagctcttcagtttcacaccagcctggaactggacctgcaaggacttgctcctccaggccctaagggagtcccagtcctacctggtggaggacctggagcggagctgaggctccttcccagcaacactccggtcagcccctggcaatcccaccaaatcatcctgaatctgatctttttatacacaatatacgaaaagccagcttaacnnagaaagccgcatggagganaaattcattt

SEQ ID NO: 73244 - DNA, 619 bp, Homo Sapiens
  misc_feature (62)..(63): n is a, c, g, or t
aataagcatgtaccattctgtatccattccccttattcctacatcaattgtttttactttcnntgggtgtgagactgagtgagacacacacaaaatgtgttgacactgtgatgccggcaggcagagcagctactgactttgaacatgggcagagaggcccctggatctcatccagcccactccttttccccttccagtacagtgacactctggtgcccattggcagatggcgacttccctgcacccataactgatgctttgtgaattcttcctccttttcagaactactctgtgctaattgttctgccagtatgggcgcatcagctccatcctgacaaacaagacatttaggtaaaactttgtaggcaccttctgcttctctgcttcattgttcctgtgatagtcctgttgttattacagcatgtacccaaaacagcctcacattgttacaggaggcaggccaggacatcaaagtcatcatctttatgtggcatgactcttaagaggccattactgtatctcatggcctcttgatgtggaaagaagttgacagagggttgcagggtttaaaaacatccattaacatgaaagctaataaacctgtcagagaacaagaaaa

SEQ ID NO: 73245 - DNA, 1057 bp, Homo Sapiens
ggtccggaattcccgggatcgcggagtggctgccctgcgcggggacactcagagcccggtgggcgggaggaaggcggcatgccccagacggtgatcctcccgggccctgcgccctggggcttcaggctctcagggggcatagacttcaaccagcctttggtcatcaccaggattacaccaggaagcaaggcggcagctgccaacctgtgtcctggagatgtcatcctggctattgacggctttgggacagagtccatgactcatgctgatgcgcaggacaggattaaagcagcagctcaccagctgtgtctcaaaattgacaggggagaaactcacttatggtctccacaagtatctgaagatgggaaagcccatcctttcaaaatcaacttagaatcagaaccacaggaattcaaacccattggtaccgcgcacaacagaagggcccagccttttgttgcagctgcaaacattgatgacaaaagacaggtagtgagcgcttcctataactcgccaattgggctctattcaactagcaatatacaagatgcgcttcacggacagctgcggggtctcattcctagctcacctcaaaacgagcccacagcctcggtgccccccgagtcggacgtgtaccggatgctccacgacaatcggaatgagcccacacagcctcgccagtcgggctccttcagagtgctccagggaatggtggacgatggctctgatgaccgtccggctggaacgcggagtgtgagagctccggtgacgaaagtccatggcggttcaggcggggcacagaggatgccgctctgtgaccaaatgtgggagtggcataatccgggcctggggtgaaagccccgggataagtacccgcacccggaaagggcttcctggggtgccgactgcaaacctcaaccctcaagcaaaaagggctatttcctttctaaaaaaagggaacctggaactggcaaaaccccacgccagaagccccccacaaaaaccccccaaaaggggctatgaacccgggccacctctggatcccccaaagctttag

SEQ ID NO: 73246 - DNA, 1343 bp, Homo Sapiens
  misc_feature (169)..(169): n is a, c, g, or t
  misc_feature (171)..(171): n is a, c, g, or t
  misc_feature (181)..(181): n is a, c, g, or t
  misc_feature (205)..(205): n is a, c, g, or t
  misc_feature (232)..(232): n is a, c, g, or t
  misc_feature (235)..(235): n is a, c, g, or t
  misc_feature (243)..(243): n is a, c, g, or t
  misc_feature (251)..(253): n is a, c, g, or t
  misc_feature (1068)..(1068): n is a, c, g, or t
  misc_feature (1117)..(1117): n is a, c, g, or t
  misc_feature (1131)..(1131): n is a, c, g, or t
  misc_feature (1158)..(1158): n is a, c, g, or t
  misc_feature (1174)..(1174): n is a, c, g, or t
  misc_feature (1200)..(1200): n is a, c, g, or t
  misc_feature (1239)..(1239): n is a, c, g, or t
  misc_feature (1251)..(1251): n is a, c, g, or t
cccctttccggctgcgatatatcagtgcagacgttccgatgaagcgcatgaccacccatatgggatgctcatcttagcaccccgcttacattttgtcccgctcttgtgtgtgatttgagcgatacaattcacaccagaacagctagactgatacgattataccgactcntntaggaattgnccctcgagccagaaatcgcacgangggttagacagcgctgggatgatgccntgnttgctgangagagcgnnnaaccaggggaaatgaagtgaggccagtggccgggtctgctgagtccgcagcaggtgcaggcccagttgtcacccctccagaacatctccccatggattctggcggtattgactcttcagattcagagtctgatatcctgttgggcattctggacaacttggacccagtcatgttcttcaaatgcccttccccagagcctgccagcctggaggagctcccagaggtctacccagaaggacccagttccttaccagcctccctttctctgtcagtggggacgtcatcagccaagctggaagccattaatgaactaattcgttttgaccacatatataccaagcccctagtcttagagataccctctgagacagagagccaagctaatgtggtagtgaaaatcgaggaagcacctctcagcccctcagagaatgatcaccctgaattcattgtctcagtgaaggaagaacctgtagaagatgacctcgttccggagctgggtatctcaaatctgctttcatccagccactgcccaaagccatcttcctgcctactggatgcttacagtgactgtggatacgggggttccctttccccattcagtgacatgtcctctctgcttggtgtaaaccattcttgggaggacacttttgccaatgaactctttccccagctgattagtgtctaaggaatgatccaatactgttgcccttttccttgactattacactgcctggaggatagcagagaagcctgtctgtacttcattcaaaaagccaaaatagagagtatacagtccctagagattccctctattngttcagatctcatagatgaccccccaggtattgtctttttgacatccangcaggcccaaggtnattgagacatatttactgggaagtaangaaaatattacctatnaattggaggaactacagccttttaanggaatggtacctttttatccttaaaaagggtgggtaagnttttccccctanaaataccttatttatggtaaaggggtccatttagaaccaattggtcctttggaaagtagaaacctgggaaaattttatggaaaaggggttcc

SEQ ID NO: 73247 - DNA, 1678 bp, Homo Sapiens
gtggtaccggtccggaattcccgggatatcgtcgacccacgcgtccgctatggtggtggtggcagccgcgccgaacccggccgacgggacccctaaagttctgcttctgtcggggcagcccgcctccgccgccggagccccggccggccaggccctgccgctcatggtgccagcccagagaggggccagcccggaggcagcgagcggggggctgccccaggcgcgcaagcgacagcgcctcacgcacctgagccccgaggagaaggcgctgaggaggaaactgaaaaacagagtagcagctcagactgccagagatcgaaagaaggctcgaatgagtgagctggaacagcaagtggtagatttagaagaagagaaccaaaaacttttgctagaaaatcagcttttacgagagaaaactcatggccttgtagttgagaaccaggagttaagacagcgcttggggatggatgccctggttgctgaagaggaggcggaagccaaggggaatgaagtgaggccagtggccgggtctgctgagtccgcagcactcagactacgtgcacctctgcagcaggtgcaggcccagttgtcacccctccagaacatctccccatggattctggcggtattgactcttcagattcagagtctgatatcctgttgggcattctggacaacttggacccagtcatgttcttcaaatgcccttccccagagcctgccagcctggaggagctcccagaggtctacccagaaggacccagttccttaccagcctccctttctctgtcagtggggacgtcatcagccaagctggaagccattaatgaactaattcgttttgaccacatatataccaagcccctagtcttagagataccctctgagacagagagccaagctaatgtggtagtgaaaatcgaggaagcacctctcagcccctcagagaatgatcaccctgaattcattgtctcagtgaaggaagaacctgtagaagatgacctcgttccggagctgggtatctcaaatctgctttcatccagccactgcccaaagccatcttcctgcctactggatgcttacagtgactgtggatacgggggttcccctttccccattcagtgacatgtcctctctgcttggtgtaaaccattcttgggaggacacttttgccaatgaactctttccccagctgattagtgtctaaggaatgatccaatactgttgcccttttccttgactattacactgcctggaggatagcagagaagcctgtctgtacttcattcaaaaagccaaaatagagagtatacagtcctagagaattcctctatttgttcagatctcatagatgacccccagggtattgtctttttgacatccagcagtcccaaggtatttgagacatattactggaagtaagaaatattactataattgagaactacagctttttaagattgtactttttatcttaaaaaaggtgggtaagttttcccctaaaatacttatttatggtaaggggtcaattagaacaaatggtcttgaaagtagaacatggaattttatgaaatggcttcttttaataattttctccttcccccccttttttgggaatccctggggtttggccctccagatatttaggggcccctttaagcttggccatttcgggaac

SEQ ID NO: 73248 - DNA, 1912 bp, Homo Sapiens
  misc_feature (61)..(103): n is a, c, g, or t
  misc_feature (107)..(141): n is a, c, g, or t
  misc_feature (1807)..(1807): n is a, c, g, or t
cacaaaaaaacacggaagaaaaaactgtatcgactcactatagggcgctagcgtgttagtnnnnnnnnnnnnnnnnnnnnnnnnnnnnnnnnnnnnnnnnnnnccgnnnnnnnnnnnnnnnnnnnnnnnnnnnnnnnnnnncagtcgacggtaccggacatatgcccgggaattcggccattacggccggggggcattctggacaacttggacccagtcatgttcttcaaatgcccttccccagagcctgccagcctggaggagctcccagaggtctacccagaaggacccagttccttaccagcctccctttctctgtcagtggggacgtcatcagccaagctggaagccattaatgaactaattcgttttgaccacatatataccaagcccctagtcttagagataccctctgagacagagagccaagctaatgtggtagtgaaaatcgaggaagcacctctcagcccctcagagaatgatcaccctgaattcattgtctcagtgaaggaagaacctgtagaagatgacctcgttccggagctgggtatctcaaatctgctttcatccagccactgcccaaagccatcttcctgcctactggatgcttacagtgactgtggatacgggggttccctttccccattcagtgacatgtcctctctgcttggtgtaaaccattcttgggaggacacttttgccaatgaactctttccccagctgattagtgtctaaggaatgatccaatactgttgcccttttccttgactattacactgcctggaggatagcagagaagcctgtctgtacttcattcaaaaagccaaaatagagagtatacagtcctagagaattcctctatttgttcagatctcatagatgacccccaggtattgtcttttgacatccagcagtccaaggtattgagacatattactggaagtaagaaatattactataattgagaactacagcttttaagattgtacttttatcttaaaagggtggtagttttccctaaaatacttattatgtaagggtcattagacaaatgtcttgaagtagacatggaatttatgaatggttctttatcatttctcttccccctttttggcatcctggcttgcctccagttttaggtcctttagtttgcttctgtaagcaacgggaacacctgctgagggggctctttccctcatgtatacttcaagtaagatcaagaatcttttgtgaaattatagaaatttactatgtaaatgcttgatggaattttttcctgctagtgtagcttctgaaaggtgctttctccatttatttaaaactacccatgcaattaaaaggtacaatgcagcatccttgtttgatttcttctagggccgtaagtcttgttttctctccagatgtttatctgtgtgctgtggtaggaattaatccaactgaagtgagcctaacgctttttaaagtgactgaaggcttttccaccttaattactgcctgctttaattctggactgccataagtgatataagctataatttgagcagttactgtctttctgagacagattcttgagcctaactgaccaatatcacagctagtaagtggaagagctagaaccctaaccactatttgctacaccatcttataaatgttaaacaaggacacaccatcacatatcgagattctcttgcccttattatgggaattaagagcattttctagactgaaactccctattttcaactctgccactggtaagctgggtaacccaggggttatatataatcacttatttcctcatctgtanagttggataatggtatctctaaaggttaagattcaaagagacgatgcattataagcatttagtatatgctaggcacccttccctaaaacccttgggaaaatttaa

SEQ ID NO: 73249 - DNA, 662 bp, Homo Sapiens
cttataatctgctggccgaaggctgttaaaaatatggttggaatggtgagtactactttaagtagcaactgttgtcaggtgagcccctcaacccacccacccccgagttcccctgggcaggctctgagctcggggtgcacgtgctgtcaaacggagccacacgggctgcggcgcccccgcgggtgcgcactgctgctggaccggcggcccgtccccttctctgctctgcctcccctcttcctgctccgcccttcttgcgtccttgatttgacctcatgaggtccaccagacagcaggggcagaaccagctttcagtgagtgtcactctgtgaacccacacacagacccctgaggagaggccacagaccctgaaatctgaaaggaaatggacacttgagtgggtaattcctcgagctgtgaggctctaagatgtaaccgggttccacttcgccatccacctcaaggtcctaaagatgacttaagaaagtgggaggtggccggtcccctaactcaccccttctactctccatggcctctcctgtgaggctctcccacgcctgagggaagaacaaggctggaagcagaacccggccccggccccaggaggccacacagcctcttgccccaatgccccatgagcttcccacagagaggcctcgtgc

SEQ ID NO: 73250 - DNA, 1141 bp, Homo Sapiens
  misc_feature (243)..(279): n is a, c, g, or t
  misc_feature (496)..(534): n is a, c, g, or t
gggaattgggcaacaacccctagcagtcaaaagaaagatacaagcagtagtaccgttgtcagcacacagtgttcacaagatcatttccatgtctttgttggtgatctcagcccagaaattacaactgaagatataaaagctgcttttgcaccatttggaagaatatcagtgtctctgaagaatggacagaattgccctggctaactacaagctacggttcacagtggataaatgttggcgtgnnnnnnnnnnnnnnnnnnnnnnnnnnnnnnnnnnnnnatatcttgtagttccaatcaattttatatgaatgctattataaaattcagtgtaaaatcttttcttgtctagcttaaaacttgtgtgtgtctagtatttttcttcaatgatttaacatttctgaaaatgtcaagttctcaaaatttagacaaaaaggggggtataaattgatctgaaaaaattaaatagtttaattagtttagggaagtatacaacnnnnnnnnnnnnnnnnnnnnnnnnnnnnnnnnnnnnnnnaatgattaggtagaatatagtgtcaaataagttataaattgcatggttaaagaaagccattcatctaatgtcctgtgaactttataagtggttaagtagttcatgtgagtagctgctttcaccatgcttaatatttaaaagtttaaaaagttttttgaagagagaggcaatttctgtacaatataaatatacatatatacttaagttattgatttgcatgtctataaaattaagcctcatttcctaatacatgataaattttgtagaataaaaggtgaatttgcattaaaggttcactttaatgaaggtgaaacatgagaatgagttgtgtgtgaaattcttatttgatatccagaggatagtttgcaaacctaaacttctgattgtttctgatttcagagatgcccgagtggtaaaagacatggcaacaggaaagtctaagggatatggctttgtctcctttttcaacaaatgggtgagctcagtgagaagtgcatggataatgcttaaagagtaaagaatggaaacactccgttttaattactaatctttttttcgtctgctgtttattttactgatgattaaaataaaccctcactagaagaaa

SEQ ID NO: 73251 - DNA, 650 bp, Homo Sapiens
  misc_feature (67)..(76): n is a, c, g, or t
  misc_feature (650)..(650): n is a, c, g, or t
gcacgagggtgaaataccttttctcacaaaaaggcaaatattgaagttgtttatcaacttcgctagnnnnnnnnnncacttggcatacaaaatatttaagtgaaggagaagtctaacgctgaactgacaatgaagggaaattgtttatgtgttatgaacatccaagtctttcttcttttttaagttgtcaaagaagcttccacaaaattagaaaggacaacagttctgagctgtaatttcgccttaaactctggacactctatatgtagtgcatttttaaacttgaaatatataatattcagccagcttaaacccatacaatgtatgtacaatacaatgtacaattatgtctcttgagcatcaatcttgttactgctgattcttgtaaatctttttgcttctactttcatcttaaactaatacgtgccagatataactgtcttgtttcagtgagagacgccctatttctatgtcatttttaatgtatctatttgtacaattttaaagttcttattttagtatacatataaatatcagtattctgacatgtaagaaaatgttacggcatcacacttatattttatgaacattgtactgttgctttaatatgagcttcaatataagaagcaatctttgaaataaaaaaagan

SEQ ID NO: 73252 - DNA, 988 bp, Homo Sapiens
  misc_feature (57)..(57): n is a, c, g, or t
  misc_feature (129)..(129): n is a, c, g, or t
  misc_feature (131)..(131): n is a, c, g, or t
  misc_feature (133)..(134): n is a, c, g, or t
  misc_feature (158)..(160): n is a, c, g, or t
  misc_feature (182)..(183): n is a, c, g, or t
  misc_feature (192)..(192): n is a, c, g, or t
  misc_feature (203)..(203): n is a, c, g, or t
  misc_feature (234)..(234): n is a, c, g, or t
  misc_feature (250)..(250): n is a, c, g, or t
cctcagtatcagagagtaagagatgccactaggatggaccgtgcagtgtgtgtctcntgttcatcggagagtgatgaactcccagtaattggtctcggtgcatttttttcttcagtcattaactctatntnanntaaaaagaaaccagcatacatcgnnngatgacacattctcaaaaccanncagcacatntattcccagtnttgagagcaactgcaaataaaccgcgactcnttttgaaaggatcaancgtatcgtccacctgctggccagcttgccgccggcagtgcagcgagcagcaatgccgttcagtgactgcacagagccgtgtcccagacacgctgtcagtgccttcaaacacggagccggtttgttcattcggtgctttgtttcattaaataatagggaaatatccatgtaaaacaggtatatcagtggaaacacagagttattttaagtgacagacaaattacggttgagttctgtggcttcttcacttgaagtgctaacatcagaatcaaacttaaagcttccactatttatgtctttgagaagtatgtagtacctcggtattaacagacctgctgtgatgcagttacactttcacgtatttttgaagtatgtcaagctacacgggtctaagatatgattattttggataaaatgttactttggtcaagagaacttttatccagatgacattacaggttcaagtgggttaaggagacctcctgtacatctacagtgtttccttttaaattgtccagaaaaaaggtgtgttcttcataagcttcagtgcaggatttttcaaagacgagctgttgtgcaatttgctgtatttaatgcatgttctgaaaggattcacttttgactttatatgacagttgatcaagaacaggtactacccctttttttcatttcaaacttgaaactgtgaataaggtaagaaaactattttgaataaataaactatttatttaaaatgtaa

SEQ ID NO: 73253 - DNA, 742 bp, Homo Sapiens
  misc_feature (116)..(116): n is a, c, g, or t
  misc_feature (616)..(675): n is a, c, g, or t
atcaagaaaatatacattttgcatatcttctgtcctgctccagaagggctggctcactcttcactctcgtggaccaccatcctgctggaggtgaagtctcgagtcttagcgcgganttcgttcgacttgagattctgcgatatccgcacgttcctcggcctcctcccagctccttctggataaagctggaatgcgtgctcagttctcaccattatatcaagagccccagatagtgttttcaactttccaacattgctattctgactggtcatctgaaattcagcaaatgctactctctctagctgtactctaagcagttcgcagggagcatctttcagcagctgaaacagctttgcggccttgctgtaatgaagatctgccagcacccggtgttgtttcctaaggtgttcatcaccaacctagaaccaaaccaaaacaagcaacaaatccttcacgagaaagaaagaaaacaactgtgtaagcagacatcagtgtaaaccttagcactgtctcttgatgagataagaggaggatggcagtgacaggagtgtggtggcgagccagtcacctgcagtcaaccacggctcattgctctcaccatgcctgttacatgaannnnnnnnnnnnnnnnnnnnnnnnnnnnnnnnnnnnnnnnnnnnnnnnnnnnnnnnnnnntacaacacttaagtataaccctcttctctattaaccaaatgatattaaaataagcaaagaaaaacaa

SEQ ID NO: 73254 - DNA, 475 bp, Homo Sapiens
  misc_feature (54)..(54): n is a, c, g, or t
  misc_feature (75)..(75): n is a, c, g, or t
ggcacgaaggaacactttggcccagaaagctgcccatgcggtgtgaaatctgcncctcctctccagtgacattcncactttctcattcttagagtgaagaggacaggaagaatgtgctgagattgcaggatctggtggataaactgcaagtgaaagtcaagtcctacaagaggcaggcggaggaggctgatgaacaagccaatgctcatctcaccaaattccgaaaggctcagcatgagctggaggaggccgaggaacgtgcggatatcgcagaatctcaagtcaacaagctccgcgctaagactcgagacttcacctccagcaggatggtggtccacgagagtgaagagtgagccagcccttctggagcaggacagaagatatgcaaaatgtatattttcttgattcctgaccattgatacttaatgtccatgtgactctttttcacatgcaataaactttgctttgtttcaaa

SEQ ID NO: 73255 - DNA, 1210 bp, Homo Sapiens
ggaccggtccggaattcccgggatgtagcatttgctgaatttcagatgaccagtcagaatagcaatgttggaaagttgaaaacactatctggggctcttgatataatggtgagaactgagcacgcattccagcttatccagaaggagcttatagaagaatttggccagcctaagagtggtgacgccgctgcagctgctgatgcttctcctagtctcaatcgagaagaagtgatgaaactcctcagtatatttgagtctcggttgtcatttcttctccttcagtccattaaactgctatcttcaactaaaaagaaaacaagcaataacatcgaagatgacacaattctcaaaaccaacaagcacatttactcccagcttttgagagcaactgcaaataaaaccgcgactcttctggaaagaatcaacgttatcgtccacctgctgggccagcttgccgccggcagtgcagcgagctagcaatgccgttcagtgactgcacagagccatgtcccagacacgctgtcagtgccttcaacacggagccggtttgttcattcggtgctttgtttcattaaataatagggaaatatccatttaaaacaggtatatcagtggaaacacagagttattttaagtgacagacaaattacggttgagttctgtggcttcttcacttgaagtgctaacatcagaatcaaacttaaagcttccactatttatgtctttgagaagtatgtagtacctcggtattaacagacctgctgtgatgcagttacactttcacgtatttttgaagtatgtcaagctacacggggtctaagatatgattattttggataaaatgttactttggccaagagaacttttatccagatgacattacaggttccaagtggcggaaaggagaccctcctgtacatctacagtggtttcccttttaaatgggccaaaaaaaaagggggtggcctctcctaagctcctcgcggcgggattttttccaacaccacaccggttggtggaaccccggttggaccccgaaggccttggccccccaaacagggtttccaccctttcgggagtttcatgacggacagtgtggcaacccaaggaaaggcgggtaacttacccgcccttcttttctacgcccgttggacacaccttctggaacacgcgcgcgagataagatacgcggggcgcacagtgaacacca

SEQ ID NO: 73256 - DNA, 1797 bp, Homo Sapiens
  misc_feature (87)..(121): n is a, c, g, or t
aagtacttgtatagatcactatagggcgctagcgtccgttatagccgaacgacgagcgcagcgagtagtgagcgaggaagcggccgnnnnnnnnnnnnnnnnnnnnnnnnnnnnnnnnnnncagtcgacggtaccggacatatgcccgggaattcggccattacctttagcgagaccaacgagagaacaccgcctgcagctagaacagcctggtcaggagcgtaacggagtggtgcgccaacgtgagaggaaacccgtgcgcggctgcgctttcctgtccccaagccgttctagacgcgggaaaaatgctttctgaaagcagctcctttttgaagggtgtgatgcttggaagcattttctgtgctttgatcactatgctaggacacattaggattggtcatggaaatagaatgcaccaccatgagcatcatcacctacaagctcctaacaaagaagatatcttgaaaatttcagaggatgagcgcatggagctcagtaagagctttcgagtatactgtattatccttgtaaaacccaaagatgtgagtctttgggctgcagtaaaggagacttggaccaaacactgtgacaaagcagagttcttcagttctgaaaatgttaaagtgtttgagtcaattaatatggacacaaatgacatgtggttaatgatgagaaaagcttacaaatacgcctttgataagtatagagaccaatacaactggttcttccttgcacgccccactacgtttgctatcattgaaaacctaaagtattttttgttaaaaaaggatccatcacagcctttctatctaggccacactataaaatctggagaccttgaatatgtgggtatggaaggaggaattgtcttaagtgtagaatcaatgaaaagacttaacagccttctcaatatcccagaaaagtgtcctgaacagggagggatgatttggaagatatctgaagataaacagctagcagtttgcctgaaatatgctggagtatttgcagaaaatgcagaagatgctgatggaaaagatgtatttaataccaaatctgttggggctttctattaaagaggcaatgacttatcaccccaaccaggtagtagaaggctgttgttcagatatggctgttacttttaatggactgactccaaatcagatgcatgtgatgatgtatggggtataccgccttagggcatttgggcatattttcaatgatgcattggttttcttacctccaaatggttctgacaatgactgagaagtggtagaaaagcgtgaatatgatctttgtataggacgtgtgttgtcattatttgtagtagtaactacatatccaatacagctgtatgtttctttttcttttctaatttggtggcactggtataaccacacattaaagtcagtagtacatttttaaatgagggtggtttttttctttaaaacacatgaacattgtaaatgtgttggaaagaagtgttttaagaataataattttgcaaataaactattaataaatattatatgtgataaattctaaattatgaacattagaaatctgtggggcacatatttttgctgattggttaaaaaattttaacaggtctttagcgttctaagatatgcaaatgatatctctagttgtgaatttgtgattaaagtaaaacttttagctgtgtgttccctttacttctaatactgatttatgttctaagcctccccaagttccaatggatttgccttctcaaaatgtacaactaagcaactaaagaaaattaaagtgaaagttgaaaaa

SEQ ID NO: 73257 - DNA, 759 bp, Homo Sapiens
cttaaagatactttccgttgacccaccattgtcaggatgtgtctccagtcctctctgagggtatgtctgggcggaggggccatctgcatggaacttctcaccaaacagggctggagcagtgcctactccatagagtcagtgatcatgcagatcagtgccacactggtgaaggggaaagcacgagtgcagtttggagccaacaaatctcaatacagtctgacaagagcacagcagtcctacaagtccttggtgcagatccacgaaaaaaacggctggtacacacccccaaaagaagacggctaaccctggagtatcacccttcctccctccccaggcaccactggaccaattacctttgaatgctgtatttggatctcacgctgcctctgtggttccctccctcatttttcctggacgtgatagctctgcctattgcaggacaatgatggctattctaaacgctaaggaaaaaaaacaaacacagaactgtttcaagtactcaagactgacttacagaccaaccaaccaccttgctggaacccttgctagcaggcattcttataaaagaaactttcgagcctccttatattgctggaaactcagctgtgctccagactagagcctccttacctatgctatggatttttaatttattttctcttatttcatgtacactgctttttttggttacagtgtatgatggatgtgtatgaaaaaaatgtatctttgggaaaacaattacagtttgttaatttgaaa

SEQ ID NO: 73258 - DNA, 1080 bp, Homo Sapiens
aattgagcgggatatcatggtatagttggacagtattggtccttcacactttggccatattgtataatggagcttttaccaaagatgtatgagaagtgtaagactataaaaaaatgaactattcaaagtaaaactcttaacaaacattttacttaaagcagatgcaaaagggtattctcatgtaggctcctgttggtgcagagggattttttttgatttcaggatacaactaaagtacgaagttctcagtttcactttagtagaaagagctctagaaatgaggctgataaacacatctaagaacactggttgctttctaaaatttccaaagctccaccataaatgtaatttttagtgtttcaaatgattgcattttaaagtatataaatatgggttatccaatatcaatgctatagtaacatcctgaaacaaaacaagcacaaaggtataaatgcctaaactggaggaaacttgaaaccctcatgttaaatcttaaatgtagtatttctaacttgtgaagacagattggtaggcagccatttttttgtgtcttaaaataactgggggcatagttaaaattttatacatcaagtgattgctattattgaatgttgcaggtgagatgtggttatttttagtttatttgaaatgtttgactggaaaggggggagggggaagcaaatatttgaaatttggaaaaccctaaaccttttggtaagaaattgtaattttcacttaaaattttctttaaggatataagaggtttataattgatgtagttaaattgaacaataaccattggtgactggagcaggtaattatagcctgcagaaaaaattatctaagaattttaaaaataagatcctgaagttgtttaattgcatccatttctgtatttatgtgaatttataaactgcagtaagttttgaatgaggttaatcttgtttaatataagtaaatgagtctgtagactgtgatctccccaaactaaaaagtacagtacttggaattgtgttctttatggttgtagtgttggtaaagcactaatatgcagaaaataaaggaattacacagtgaaaa

SEQ ID NO: 73259 - DNA, 1037 bp, Homo Sapiens
  misc_feature (255)..(263): n is a, c, g, or t
tatcgtaataaaaaaatagtgctgagctcactgtcactggaaggatacaagcagaggagagacactcatcagccggcactgctgaggcaggatttctggaccacaaggaaggtggccactaagggttgccctctggccccctgtgactcttctcatcagcatggcccaggatgcagcatcctggcatccaaggaggtgccactaagtagctacaagatgtggggcctggcgagaggaaccacaaaagaacgcagnnnnnnnnngcaacaaaaagccagtgacaaagctgcgtggatggcggaaggcgagcaggagtttggtgatgcagtttgaagaccgggactgagacccccccactggaggggtacgtggggtgcaaaagcagaagtggcaccagtgggcttgactgctccagagaggggcattgctcctcagtgcagcaacaaggcgcctttagcccccttgtcgtttttggccccaaaagtgccacagttacacagggtggccctggagcaaagtgagtgctaatgcgctggggcatacggaaatctggtatttcacacatttgtcatgttaaggagaattaggcgtatcagagtatctaacagattggccttccaatccccatttaaaacgggtaattgagtagctgattttaagcttatgattttaagcagaacaccggaagtggattcagccaagtttgtaagttttgaaatgtttcagagaactaatagtcatcatatttatcagcttattaaatttcaagaactatttaggaacccaggaaagtcctgctttttaggatgagtatttataaacttaagaacactggttatgttaaatttataaagttacatcaagatatttaaagaaatttaattacttaagttataaaccccctacccttgaacatcgacatttaaatggactagattcgtgaggggaataatgaaattggtatgttaaatgcttcaggaaacactaggtttaaaaatttccacttcaatatatattgaatattgagaaaattcaaa

SEQ ID NO: 73260 - DNA, 721 bp, Homo Sapiens
  misc_feature (15)..(15): n is a, c, g, or t
tcacccacgacccantacgccagaaggcaatgtttctgcagagcctggcgcaggaggtagaactgaacatcgtggccggttatgggtctcccaaaagatgtggctgtatacgcggcgctggggctgtccccgagccagacctacatcgtgggccgtgccgtgcggaagctacaggcgcagtgccagttcctgtcagacggctatgtggcccacctgggccagctggaagcgggctcgcactcgcatgcctcctcgggacccccgagagctgccttgggcaagagcagctatggtgtggctgcccccgtggacttcctgcgcaaacagagccagctgcttcgctcgaggggccccagccaggcggagcgtgagggcccgggaacaccacccaccaccctggcacggggcaaagcacggagcatcagcctgaagctggacagcgaggagtgaggcccacaccagcctggacctgggttatttattgacacacccaaggggcccgaggggctgcgtgtgggaggctggggacccagacttttggccccagcgctggcccccccagccccacaccctatatctccgtgtgctcctcggtgttacttccctttcatatgaggggacccagcgccggggggagggaggagggcgtgggcatgggcgcagaggcttttcccagtgtgtataaatccatgaaaataaacgccacctgcaccccacccac

SEQ ID NO: 73261 - DNA, 344 bp, Homo Sapiens
aattttaaggactgaaattctgttacatgatgtatgacaatataaaaacatacttagttttatactaaatctttttttaaggtcttggcatttaatataaagcaaattcacacgttttctaactttccataagttccaaaaagggaaagaagaaacctcagtcttgaaattttgatttttaaaaatcatgacactgttttaccatgaaattgagtagctaacttttggtaacaccttttgtttctttgtatgtttgtaataatggacattttaaaacacaggaatgttttggtttgtacagactttgacaaatgtgtgttaataaaaattcatattgactcaaa

SEQ ID NO: 73262 - DNA, 1327 bp, Homo Sapiens
  misc_feature (1059)..(1059): n is a, c, g, or t
  misc_feature (1096)..(1096): n is a, c, g, or t
  misc_feature (1150)..(1151): n is a, c, g, or t
  misc_feature (1188)..(1188): n is a, c, g, or t
  misc_feature (1205)..(1206): n is a, c, g, or t
  misc_feature (1272)..(1272): n is a, c, g, or t
  misc_feature (1274)..(1274): n is a, c, g, or t
tctctgctcaaataccacatcctcagtgtgatcttgttccttgactgctccaggcatgctcctgcatcaggatctatctgcctggagctcttcccctaggtatccctcactgctcaaacttccccattgagaagcctccccggacccccactaccattgtcctcagcactccccgcctccctcactctgctttttccccacagcatttgcaaccatctgctctgtattccctcccctgtgcctcttacccagcagatgtcagcacatgtggacgccacacagcagggactctgctctttcgttcagttcactgacatatccccaggacctaaacagtgcttgacatatagtagatacccagtaaatatgtgataggagcatgctgctatgtggaatgttcagctttaacccagaagggattgaagactgtttttgatgaggctatcatagccattttaactccaaagaaacacactgtaaaaaaaagaataggatcaagatgtataaactgttgtttaattacgtgagaaacatcttcagtggccaaggaaactgtccatttctctcagaaagcaaatgaaatgctacagctatacccagaccttttataggtaatgaagcagttcaaaacttgaaagaaaacaaaacctgtcctcagaattctataaagtgtattaagaatgttccttaaaggtttaagaagcagtaagcagcatctgaagccacaatctattataaatactttatttcaactagaaggtacaatctctcaggggtttcatagtttaaaaagctacaatcacatcatgttgtaactacgtaaaaaacagagctgtaaatggaactgcttggctttgaccatacacatttctgcccagcccttacagaatctgcacaaagaaatatctccctttgctccagttaattgttcttgtatgtaagttgctttctattccagtatatccagagtggtgaaataacaaggccagccacgtagccaaaggtcgctccaagcgtacaggagatgggccatacctgaggagagaatgtatgagatcnaaaaagaacaaatgttttattattacttgagcacaangtgtacctaaatatttctatattaaagcttaatgtgctttccttaagaatgcannaagtgtataaggtcatactgcattatcatgacactanaatgtcacattttagtnnatgtgcataactggtacaggctctggcaatgtaatttagttgacctcccaagtgatgaacacagcnanatacaataaattttggtcaacttgcatatgaaaccattagtcctgacagtgga

SEQ ID NO: 73263 - DNA, 540 bp, Homo Sapiens
cggacccccactaccattgtcctcagcactcgccgcctccctcactctgctttttccccacagcatttgcaaccatctgctctgtattccctcccctgtgcctcttacccagcagatgtcagcacatgtggacgccacacagcagggactctgctctttcgttcagttcactgacatatccccaggacctaaacagtgcttgacatatagtagatacccagtaaatatgtggtgagtgaaataatttttcatagaaagtctggaaggacatatactagtattttaaaatcccctctggggttatgaacatggatgatgaatgtattctttttgcatagctgtattttataattttcttcataatgatgtgtttatgtcatgccaattgtataaacatgatcttatatatttgtgattttttttctccctcccagataggagcatgctgctatgtggaatgttcagctttaacccagaagggattgaagactgtttttgatgaggctatcatagccattttaactccaaagaaacacactg

SEQ ID NO: 73264 - DNA, 1329 bp, Homo Sapiens
cagtcgaggtaccggacatatgcccgggaattcggccattacggccgggggggcaagcagtacctcctaggactctatgacacggccggacaggaagactatgaccgtctgaggcctttatcttacccaatgaacgatgtcttccttatatgcttctcggtggtaaatccagcctcatttcaacaatgtgaaagaggagtgggtaccggaacttaaaggaatacgcacccaaatgtaaccttttcattaataggaactcaagattgatctccgagatgaccccaaaaatttagcaagacttgacatgatatgaaagaaaaacctatatgtgtggaacaaggacagaaactagcaaaagagataggagcatgctgctatgtggaatgttcagctttaacccagaagggattgaagactgtttttgatgaggctatcatagccattttaactccaaagaaacacactgtaacaaaacagaataggatcacgatgtataaacgtgtggttacttacgtgagaaacatcttcagtggccaaggaaacgtgtccatttcatctcaagaaagcacaatgacaatgctacagctataccccagacctttataggtaatgaaggcagttccaaacttggagagaaaaacaaaacctggtcctccagaactcctctccacggtgtcttccgcacatggttccttacagggtttcacgaaggcagccacgcagcatctggaagccgacatctaattcatcacaccttccatgtccacctacgaaagggtcacaaacctcacaccggcggcttaacaaaggtatacacacggctcacagatgcccgctcacagggtggtcaaccacacggtcaccgaacacgacggctgcaaagggacacggatgacgcttcgcaacaacaacacaattcgcggccacaccacttcacgaagatcctggccacgaagcacacatcccccactgggcgccgagtaactcgggccgacacgaaacgctgccggcatcgacacagccatccccccgcggtgcgtcaaccacacaacaaggggcacagaaccgctcgcaaaccgagggctcccacgctcagaacaaccggacccaccaagagagacaaaagtcagccacacaaacgcaaaccagatgctacaacgtcagacacaacgacgaacaactatctccacgcaacgcggtgctcaacaaaacaaaacacaagccgccaccgcaacagacacacacccatgcaccaacaaccaagaacacaccacagacgaaggacgaccaacaaaacaccgaagcaacacagacaagcagcaccagaaa

SEQ ID NO: 73265 - DNA, 1187 bp, Homo Sapiens
  misc_feature (867)..(885): n is a, c, g, or t
  misc_feature (1074)..(1108): n is a, c, g, or t
aattcccgggatatcgtcgacccacgcgtccgcccacgcgtccgttcaagttggaaatgtgtaatagtttactgttgtaattcgtttataccatgtgttggacaactcagctaatatgttaattgatttatacaattcctttcaattttatctaaaaataagcagaccaaaattaaataagaaagttacataagattccatttgagcatacataaggccatgatactttaatgtgaaccaccatttcttggaagaaagaagacatccaaatgtccgattcagagagaaagttcctggccagtcatccagtagactctctccactcttcaatgggaaggtgatgcttatatttttaaaaatctctacaaagctcacatacaacaagacagtacatcctagatttgtgactgatatgagcatttaaggctgtcattttcaagtataaaagtttagtgttccattacccaatctgtgcagtagacatagctataagctcaagtcatgtgaattaacagaagcccaccaaagacatttaaaaaattataatttgggcaacagcaagtttaaatgtaggaaaggctagaaaaaatgtgatgagattgtttctctaaaatgcattaggttgttcacaatgaagctttgtctaacaccattatctgatgcatccattatctgatgcatggcatatgcaataaggcagatccacagcagaccaaacaaggaagctgaattaggtaatagaactagtaattaagatggttcacctctaacacagttctgtggcctgttccccccagagaaagattagaaatggctccagtgtaccaaataagcttcacagaagaacatgaaaattttcctccaacnnnnnnnnnnnnnnnnnnncaagcagagcctttcacttagggaccaactgcttgtagatgaaataaatcaacattaattacttctagcctgatgtaatatggctggagaaaaggggtctctggaagccggtattttgtttaacttacattctaggtgcccggccgtaatggccgaattcccgggcatatgtccggtaccgtcgactgnnnnnnnnnnnnnnnnnnnnnnnnnnnnnnnnnnncggccgcttcctcgctcactacttcgctgcgctcgtcgttcggctgcaaaacgagctagcgccctatagtgatttatca

SEQ ID NO: 73266 - DNA, 1059 bp, Homo Sapiens
ggggcctgggccgcccgtcgtacctgatggtaggaggcagtagttccccgcttcccttccgcgggagggagagttagctagccatccaagaaaacaccatgaaagataacgatatcaagagactactgtatacccatcttttatgcatattttcaattatcctaagtgtcttcattccatcactcttcttggagaacttctcaatattggaaacacacttgacatggttgtgcatctgttctggttttgtaactgctgtcaatctagtactatatttagtagtgaaaccaaatacatcctctaaaagaagttcattatcacacaaggtaactggatttttgaaatgctgtatctactttcttatgtcttgtttctcctttcatgtaatttttgttctgtatggagcaccactgatagagttggcattggaaacatttttatttgcagttattttgtctacttttactactgtgccttgcttatgtttgttaggaccaaacctcaaagcatggctaagagtgttcagtagaaatggagttacatccatatgggagaatagtctccagatcactacaatttctagctttgtaggagcatggcttggagcacttcctattccactggattgggaaagaccatggcagatgacagtagaaagaaaacgtagcacttatagatctctccatgtaccctgcagggggcttggtactgtgaaatgagtaacttaatcctgacaaccgtactgcaaggtatggcccatctcctgtacgcttggagcgacctttggctacgtggctggccttgttatttcaccactctggatatactggaatagaaagcaacttacatacaagaacaattaactggagcaaagggagatatttctttgtgcagattctgtaagggctgggcagaaatgtgtatggtcaaagccaagcagttccatttacagctctgttttttacgtagttacaacatgatgtgattgtagctttttaaactatgaaacccctgagagattgtaccttctagttgaaataaagtatttataatagaaaa

SEQ ID NO: 73267 - DNA, 931 bp, Homo Sapiens
tgcggccgcccgtcgtacctgatggtaggaggcagtagttccccgcttcccttccgcgggagggagagttaggtaactggatttttgaaatgctgtatctactttcttatgtcttgtttctcctttcatgtaatttttgttctgtatggagcaccactgatagagttggcattggaaacatttttatttgcagttattttgtctacttttactactgtgccttgcttatgtttgttaggaccaaacctcaaagcatggctaagagtgttcagtagaaatggagttacatccatatgggagaatagtctccagatcactacaatttctagctttgtaggagcatggcttggagcacttcctattccactggattgggaaagaccatggcaggtatggcccatctcctgtacgcttggagcgacctttggctacgtggctggccttgttatttcaccactctggatatactggaatagaaagcaacttacatacaagaacaattaactggagcaaagggagatatttctttgtgcagattctgtaagggctgggcagaaatgtgtatggtcaaagccaagcagttccatttacagctctgttttttacgtagttacaacatgatgtgattgtagctttttaaactatgaaacccctgagagattgtaccttctagttgaaataaagtatttataatagattgtggcttcagatgctgctttctgctttttaaacctttaaggaacattcttaataccctttatagaattttgaggacaggttttgttttctttcaagttttgaactgcttcattacctataaaaggtctgggtatagccgtagcatttcatttgctttttgagagaaaaggacagtttccttggcccctgaagatgtttttcacgtaattaaacaacagtttattcctcttgg

SEQ ID NO: 73268 - DNA, 1339 bp, Homo Sapiens
  misc_feature (51)..(62): n is a, c, g, or t
gtgtctaatatgctcacagaagacatgaaaattcctccaactattatttcnnnnnnnnnnnncaagcagagcctttcacttagggaccaactgcttgtagatgaaataaatcaacattaattacttctagcctgatgtaatatggctggagaaaaggggtctctggaagccggtattttgtttaacttacattctaggtgtgtatataagttgtcgctctataacttctgctgtggttccaacatctatatctgaaaggtggaagcagctgctctgttacaattttcatgtaacacgcttggattctaggtctttcctctttaacacaacttaaagaaagtttcttgtggtttggtcagcatacacacttctcatttcatttgatgtacacagccaaagtgggaattaaaaaacaaaatttaccaactagttcagagagctaaattgagtctatcattatggcaaagtctgacccaaaattttaatttgtaattttagcatgtgtctcatgcactttggggagcgtcaaactaaatctacaattgccagaagccttgttacagtttaatgcacattaaataaaatgtgtacatttttagtgttcatgataaatgcagttatgaccttattacacttttggcattctttaagaaagcacattaagctttaatatagaaatatttaggttacacttgtgctcaagtaataataaaacatttgttcttttttgatctcatacattctctcctcaggtatggcccatctcctgtacgcttggagcgacctttggctacgtggctggccttgttatttcaccactctggatatactggaatagaaagcaacttacatacaagaacaattaactggagcaaagggagatatttctttgtgcagattctgtaagggctgggcagaaatgtgtatggtcaaagccaagcagttccatttacagctctgttttttacgtagttacaacatgatgtgattgtagctttttaaactatgaaacccctgagagattgtaccttctagttgaaataaagtatttataatagattgtggcttcagatgctgcttactgcttcttaaacctttaaggaacattcttaatacactttatagaattctgaggacaggttttgttttctttcaagttttgaactgcttcattacctataaaaggtctgggtatagctgtagcatttcatttgctttctgagagaaatggacagttcttggccactgaagatgtttctcacgtaattaaacaacagtttatacatcttgacggacgcgtgggtcgacgatatcccaggaattccggaccggtaccagc

SEQ ID NO: 73269 - DNA, 1188 bp, Homo Sapiens
  misc_feature (150)..(254): n is a, c, g, or t
aaaaagcaacccccatgtatgcctatatgtgtattgtatactttttttacataattggagtcatactgtaaacagttttataagtagatctttttcattgcaaaattgccacattttcttatggcattaaaaattttacaaaaacataannnnnnnnnnnnnnnnnnnnnnnnnnnnnnnnnnnnnnnnnnnnnnnnnnnnnnnnnnnnnnnnnnnnnnnnnnnnnnnnnnnnnnnnnnnnnnnnnnnnnnnnngttgcagaaatttggtgtacataaaactgtctccatataattgattattaggatatattcccatgaaggattctttttttaaaaaaatgtgaaatatcatcttgtacttacacctttcatgaaaagggatttcctgcttttgtactgcatgggtggcagttgtgaggaaaagccagtcaaatgacctttttacaaaagaaatgcagtggtcacttcagttgagagtgactttttaatacaacaagatcaactagaagaattcaactgtctcaagaatcaaggtaccccaatatatctcgcaattccaaactttgtttgagggactcgttatccagctcttggtagccacacctgcaatgtaaaatggaagaaaatgcaaagaaaccaaatgtgccgagtgaataaaggattgtcatatcaattagtgtgggtccatctgtagcaaatgggttgagtgtgtcactatgtggttggttactgtgtactcgccaggaatcaccccgataggctgccaccctattaggtgatacctgtttaatatgttgtccaggtagactagtagttgcatcagtttgctgtaacaagtaaccagtgaggtaacacagtggtgaagcaggtcaggggaggtcaggaggatgtctgagagaaagaagtccgggagatgaatggctgtctaggaaggaggatgtcagtgcacggttagtgtttgagcagagggcagacttgtaaagtacctgtagtgaaaagaatgtggggacccgattagcagaaaggtgtttgcacatactttatacaaaatacagaatactttatattggaagtgaaagaaatgaacgtggacttttacacatgtgcatatttttctggaggctatatggattatttgaaatgaaaagcatactaattggactttaataaatcattttcaatcaga

SEQ ID NO: 73270 - DNA, 1467 bp, Homo Sapiens
  misc_feature (38)..(38): n is a, c, g, or t
  misc_feature (772)..(801): n is a, c, g, or t
  misc_feature (834)..(1225): n is a, c, g, or t
  misc_feature (1261)..(1262): n is a, c, g, or t
  misc_feature (1264)..(1264): n is a, c, g, or t
  misc_feature (1289)..(1289): n is a, c, g, or t
  misc_feature (1313)..(1313): n is a, c, g, or t
  misc_feature (1366)..(1366): n is a, c, g, or t
cagtgggaaaatcccacagaaatcagtaagtttacatntcaattctatcttatttgactaagtggaaagagattctttaaaatgtataacctgccattatgtaatttggtttcattttattctacctgttgtgtgagtttagtatatttaatttactttttgttactctttacatactgtttatttttgttagtttttaattgaagatggactgttgaaattgtataggaccagtgtcttattaatatgattaatatatttagaagagccacgtgaaacccatgacaaaatgaatgtgaatattctttctaaaaatttagaaaatgttatctttttgcatttattatgtaaaactgttttacagtatcaaaatttttcacttaaagaaaaaaaatgccatgaaacatttgaactgatgagccacagaacttcagttgaaatttttttcactttttagcatgctaaatatacatctgagtttaaatgttctgtttaatggccattcataaattcaagcactaccactggtcagttttgtgtgatagaataaaaatatgttacctgcagtgtaagtacagcacactgtcaaattcttttccttaaggtgcacagtaaatgtacagatagttataggccactgttttgtaatgtagtacatttctaatctattattcctaacctattataactgtttgcagaaagaaaagaatttttctaataatctgtaaaattatgctaacttctacaagtaggcttctaaataaaatttttnnnnnnnnnnnnnnnnnnnnnnnnnnnnnngcctacagccgcggccctcgtgccgaattcttnnnnnnnnnnnnnnnnnnnnnnnnnnnnnnnnnnnnnnnnnnnnnnnnnnnnnnnnnnnnnnnnnnnnnnnnnnnnnnnnnnnnnnnnnnnnnnnnnnnnnnnnnnnnnnnnnnnnnnnnnnnnnnnnnnnnnnnnnnnnnnnnnnnnnnnnnnnnnnnnnnnnnnnnnnnnnnnnnnnnnnnnnnnnnnnnnnnnnnnnnnnnnnnnnnnnnnnnnnnnnnnnnnnnnnnnnnnnnnnnnnnnnnnnnnnnnnnnnnnnnnnnnnnnnnnnnnnnnnnnnnnnnnnnnnnnnnnnnnnnnnnnnnnnnnnnnnnnnnnnnnnnnnnnnnnnnnnnnnnnnnnnnnnnnnnnnnnnnnnnnnnnnnnnnnnnnnnnnnnnnnnnnnnnnnnncatgtgagcaaagggcagcaaaggccaggaacgtannanggcgcgttgctggcgtttttcatangctcgccccctgacgagatcacanaatcagctaagtcagagtgcgaaccgacagactatagatacagcgtcccctgnagtcctcgtggcctctgttcgacctgcgctacgaactgtcgcttctcctcgggagctgggctttcaagtcagcgtagtaccagtcggtagtctcgtcagcg

SEQ ID NO: 73271 - DNA, 582 bp, Homo Sapiens
  misc_feature (21)..(21): n is a, c, g, or t
  misc_feature (37)..(37): n is a, c, g, or t
aggatagaaatagcatggatntcaacatcacttattnatctgtataattggaaataaaacaccgatatgatagagaatcattccggcattacctaacctcttctgcagttggatctatgtattttcattggtctactgaaaacaaacaatacaattaaaagcactaaagattattatattaattcaactttgatctgatatatcacttaaactaaaggggtgtgtgtggtgtatgcttgtttcctatttctgctctttaaagatactttgaatcaataaaaccattagtctacaaatcaaattgtgaacttaatctctagaaagagaatataactcagccatttataggaatttaggttcaagtacaggatatatgaaatcttttcccagtatttcagaatgtacttaattcacaggcaggatgcttcaatgcaaaatcatgaatatttttaattcaaaactaaaatgtcattaatatgtatgtatgcaaatgttttatcttattttctgaaatgcatctactttcatgggctttgtacgtttctgagatttctcagtgtaataaaaagagctcccaaactt

SEQ ID NO: 73272 - DNA, 734 bp, Homo Sapiens
  misc_feature (47)..(47): n is a, c, g, or t
  misc_feature (613)..(622): n is a, c, g, or t
ttcctgtcacaaggacatactgttttagtgaactccttagttttttntggttgaggtaatgaatgtgaagcccctttgatttttctgcccgatctaactgaactcctgctacatttgtagcaacataagttctgtaggcatacatcagtcatgacaaaaacagtacatctgtatacagtggcaagtggatgcaccctgaaaaatctgtagttaataattctctgctaagaaacagtatttttatctaattctggaaactcattaattgctaggaatctttaaaacaaagacaaagctaataaaatgtcaatatatagccaattaaatgttttcaatagttacagcacattattggcctgccattttcccccaatgttatagccccttcaaatatttctacagctagctttcatgaatctaagtgggtgttaatcattttaattaatggtttaaatataatggtttaataccttagtacaggttaaaagcttcattaattgtgttagttttgatgaaaaatgtaagttataatcttatttaaaaaacagacaaaccacagacttgcacttttatttgccctgggctgaaaatgtgccaaagtcccacttaaaannnnnnnnnnaatgcttgaagcttttctgaccatttgatcttgtgttggattgtgttttgtaataatctaagcaagattgctttatgctcttccccaattaaaaacaagaatgatgaccttc

SEQ ID NO: 73273 - DNA, 1188 bp, Homo Sapiens
  misc_feature (24)..(24): n is a, c, g, or t
  misc_feature (58)..(58): n is a, c, g, or t
  misc_feature (95)..(95): n is a, c, g, or t
  misc_feature (192)..(192): n is a, c, g, or t
  misc_feature (246)..(246): n is a, c, g, or t
  misc_feature (258)..(259): n is a, c, g, or t
aattgccctcgagccaagaatcgncacgagcaaatgagcacaaagtgagaaagtagcntggaaaggagaagatgcttctcctattaacatggganaggagaggaggagggtcaagtaccagtgatctaggggtgagatgaaagtgagttgagagaactcaactctggactctgaaatccctaggatggggtntggggggctttgagatatgtaagagtttaaagtcagttgttctagcaatatggntttggaattatnntgtgatgcttaaaaatattgctgaacagaagtgaagtctatcctagagttggatggtgagattatttagtggaactaccagatccatgttgtgattctttccagtatcattcagcagcccttgggcagttgcgaggcaagtcatcaatggggtatggagattttccaggtgggtgtggttgaaggcagggaagaacgagttcaggagcacattacaagaagaaggtgactgtaaggtccaggctgagcaggaaggtaaagcaagaaggaaacatgaggttgtgaagagaagtttagagggatgaggaggcaggagagatgaacagttgcaggatgtagctagagtggcgatgttagatcttggggccagagaactttacaatgattatgaagatcaaagggcattagaatcaagctataaagagccactgtttgatgttgggatgtgaggatgctgcaggtggatgtctgcacgttgatggtgagaacatggtcaccctggccctgctgggtctttgctaaagagactgtgctctgttcttggggccgttttcatcacctgattagagcagtggtccccacatggtgttctttggaccatctgtataaaatgttcataggtcaaggataaaatggaaaaacagagaaaatgtcacagaaatgtgcccattggtgaaagaccaccagctgtcctttttggaggattgttctttattccaaaaatgtatatattctattctattaaaacatttttgtatttacatttttttctcttatgaaatgccattgggtagaaatttgtaatgtatccaattctcctgtctccatgcattgcagtgtggtgggggaggggatgtggcaagtactggccaacaggctgggggcagaggtgcagtgtgagacttctagcctggagcatttaattcttag

SEQ ID NO: 73274 - DNA, 716 bp, Homo Sapiens
  misc_feature (36)..(36): n is a, c, g, or t
  misc_feature (72)..(72): n is a, c, g, or t
  misc_feature (81)..(81): n is a, c, g, or t
  misc_feature (493)..(536): n is a, c, g, or t
aaagcaattctctatatataaatatgtgaaatatantgatctgaacttagcacacatgaagcaacatttctntgctacacnagaggtgtcttggaaagatttcattcccaattcatttttcatagatctataatcaggcaatttctgcaagcaatgtatgaccccacctgagcaaccacaaataggctctccatgaaactgcaaaggaactgatgtgtggcatccatgctggttttgtctgtctataatatgaattcaagtatctgttcatatttccaattgtctcctgctagcaatatgtgccacaacatgacagtcttgtgacatcttaaggaaaagaagagttcctgttaaatgaatagctttagcttttacaggggattatgattaaaagtgatttagtacatcttacatgatatctcatttctacgtgaaaagaagttatagaatcttcatagagttccatgagaaaaatatacttgctatttatagnnnnnnnnnnnnnnnnnnnnnnnnnnnnnnnnnnnnnnnnnnnncctttcctaggcttttccttgatcttcagaggcacacagggtttaatggttccttaggttattattttgaggttttgttctttcttttgccttaagtaatgacagaagatatatatggccagacacatatgtataaacttttcagcagcattttaataataaaatatcacactattttct

SEQ ID NO: 73275 - DNA, 662 bp, Homo Sapiens
  misc_feature (137)..(202): n is a, c, g, or t
  misc_feature (367)..(430): n is a, c, g, or t
tttttacagacaaacattctcttttattgagctacacaggaattttccattagtcagagaagtagactggcagtgtgtaagatatcacagaaacctcaccgattgggaatagaaaggcttacaaagacccgtgggcnnnnnnnnnnnnnnnnnnnnnnnnnnnnnnnnnnnnnnnnnnnnnnnnnnnnnnnnnnnnnnnnnngcctcctctttatttgaaatggctgtgactggtcttcttcagcaaagattaagtcttaaaagtgaaaccgtgaagaggtttagggtttgggtattagtcaaagtagaaatgacataggattggtcatgaaaacggcggctttaatgtaaacactacattccatcnnnnnnnnnnnnnnnnnnnnnnnnnnnnnnnnnnnnnnnnnnnnnnnnnnnnnnnnnnnnnnnngtctgcagcacaaacatccccacatgagagagcggacacagggcaccgaaacaaaggcaggggtggggaggggcgcacacacgaagggaggtgtcagccgggaccggaaatccaacacggcaaaggaaaaaaaacacaacccgtttcccaaagactaggaaaactgatctgtggggtggggggctggtaatacatagtactcggcgggacaaaagtaaaaacaaaaacctga

SEQ ID NO: 73276 - DNA, 1645 bp, Homo Sapiens
  misc_feature (97)..(131): n is a, c, g, or t
  misc_feature (1317)..(1321): n is a, c, g, or t
  misc_feature (1323)..(1323): n is a, c, g, or t
  misc_feature (1325)..(1330): n is a, c, g, or t
  misc_feature (1332)..(1334): n is a, c, g, or t
  misc_feature (1337)..(1348): n is a, c, g, or t
  misc_feature (1350)..(1350): n is a, c, g, or t
  misc_feature (1352)..(1378): n is a, c, g, or t
  misc_feature (1386)..(1386): n is a, c, g, or t
  misc_feature (1433)..(1433): n is a, c, g, or t
  misc_feature (1435)..(1437): n is a, c, g, or t
  misc_feature (1470)..(1575): n is a, c, g, or t
accacacgtattactacccataaataggagacgaccaaattcgccgttgttatcgaaacggacgagcgcagcgagtagtgagcgaggaagcggccgnnnnnnnnnnnnnnnnnnnnnnnnnnnnnnnnnnncagtcgacggtaccggacatatgcccgggaattcggccattacggccgggcaacagcgaggcagaaacactttaccctttcacgatatactaacggcctgacactgcacactgctacgacgcgccttctccgagcaactactcactgcaacaggccttcagcaacccttctctccgactgctggcttctactctgaacacctgcctacgctttattgacgctggactgatgaaacgatggcactacctttctagctatttgagaagtataataaggatggagctacgctctttgcgaccgtaggctacatgacagtctataattactatgtgtacccagacaaaacccggccacgtgtaagtcagatgctgattttgactccatttcaaggtcaaggccatggtgctcaacttcttgaaacagttcatagatactacactgaatttcctacagttcttgatattacagcggaagatccatccaaaagctatgtgaaattacgagactttgtgcttgtgaagctttgtcaagatttgccctgtttttcccgggaaaaattaatgcaaggattcaatgaagatatggcgatagaggcacaacagaagttcaaaataaataagcaacacgctagaagggtttatgaaattcttcgactactggtaactgacatgagtgatgccgaacaatacagaagctacagactggatattaaaagaagactaattagcccatataagaaaaagcagagagatcttgctaagatgagaaaatgtctcagaccagaagaactgacaaaccagatgaaccaaatagaaataagcatgcaacatgaacagctggaagagagttttcaggaactagtggaagattaccggcgtgttattgaacgacttgctcaagagtaaagattatactgctctgtacaggaagcttgcaaattttctgtacaatgtgctgtgaaaaatctgatgactttaattttaaaatcttgtgacattttgcttatactaaaagttatctatctttagttgaatattttcttttggagagattgtatattttaaaatactgtttagagtttatgagcatatattgcatttaaagaaagataaagcttctgaaatactactgcaattgcttcccttcttaaacagtataataaatgcttagttgtgatatgttaaannnnnanannnnnnannnaannnnnnnnnnnnancnnnnnnnnnnnnnnnnnnnnnnnnnnncaaacaanaccaacccccacccaaggtaaaaaaccccaacccccaaccccaaaanannnctctttgtgggggccgccttcgggcccccttgnnnnnnnnnnnnnnnnnnnnnnnnnnnnnnnnnnnnnnnnnnnnnnnnnnnnnnnnnnnnnnnnnnnnnnnnnnnnnnnnnnnnnnnnnnnnnnnnnnnnnnnnnntttcttcccacaaaaggagaaaaccccccgggggccataagaaaacaaaaagggggcctggtggggattt

SEQ ID NO: 73277 - DNA, 2423 bp, Homo Sapiens
  misc_feature (1793)..(1807): n is a, c, g, or t
ccgtttgcgggggctgtggcggttacacggccgggcgcgccggagcgttcaggcttcccgtttttaaggggataaaaacattcagatggcagatcacagtttttcagatggggttccttcagattccgtggaagctgctaaaaatgcaagtaacacagaaaagctcacagatcaggtgatgcagaatcctcgagttctggcagctttacaggagcgacttgacaatgtccctcacaccccttccagctacatcgaaactttacctaaagcagtaaaaagaagaattaatgcattgaaacaacttcaggtgagatgtgctcacatagaagccaagttctatgaagaggtacatgacttggaaagaaagtatgcagcgctataccagcctctctttgacaagagaagagaatttatcaccggcgatgttgaaccaacagatgcggaatcggaatggcacagtgaaaatgaagaggaagagaaattggctggagacatgaaaagtaaagtagtcgtcacagaaaaagcagcggcaacggctgaagagccagatcccaaaggaattccagagttctggtttaccatcttcagaaatgtggacatgctgagtgaattagtccaggaatatgatgaaccaatcttgaaacacctgcaggatattaaagtgaaattttctgaccctggacagcctatgtcttttgtgttagagttccactttgaacccaacgactactttaccaactcagtcctgacaaaaacctacaagatgaaatcagaaccagataaggctgatcccttttcctttgaaggtcctgagattgtggactgtgacgggtgtactattgactggaagaaaggaaagaatgttactgtcaaaaccatcaagaaaaagcagaagcataagggtcgaggcactgttagaacaattacgaaacaagtacccaatgagtcctttttcaacttcttcaatccattgaaagcatccggggatggagaatcactggatgaagattctgaattcacattagcctctgattttgaaattggacactttttccgtgagcggatagtcccgcgggctgtgctgtacttcactggggaggccatagaagatgatgacaattttgaagaaggtgaagaaggagaagaggaggaattagaaggtgacgaggagggagaagacgaggatgatgcggaaattaaccccaagaaggaacccagccagccggcggaatgcaagcagcagtaggaagcggaggcgggtgcctggcagaccggctgtcgggactccaggcctgtgggcggggcctcggtccttgccgcagcacaatcccgtggacagagcttactccatctaactcgttttcaagtgcatgattttcactttcacttttcctttttccttattattttgcttaacttgtacagtggcaactgaaatgcatttcagaaataggaggtttcgtccagcaccctctgcagccttggtgcctgtagctctggacttccctgggcctttccctgtgggagggccctgtagaccacatcagggtggggtgggggtcacttggcaaaaagggccgaggtctggtgatgtggttcccaggatctggaacctctcccacccctcctgcagttggactgaattcttccctttcatccgaagaaacccacttgctgtttccagccgctgaatctgctgagtgtgcagcctgcatcacctgctgtatgccgatcatctcaaaaagggctgtgtagagtagggccctgttctccttaggatgttgcttcttgannnnnnnnnnnnnnnaggggtgggtcagggttgtgacacaccagcccaggtgagagctgctgcgggtcacctcatatttatttatcccttcttgcctgtgaggactgcggcttttcgctgtggctcgtccttaacgtttctgaaccaccttggtgccctgagcaggaagatgtgccacttcctagcaggcgcaaggcctgtgcggaagaaacgccgctccctgccaccagggctgaagatgcgagcccgtcctcatgacgcaggcgccaccctgctgccggagccgggcttcggcagtcttctccactgagggactgggctgggaagtcctgcgtttcagtggagcgtatgagcgtcaagtcctgctttctcagtagccccattgcggggccccaccattcatcctgtctgaaggtcctgggtttggtgtgaccgcttggcggctggtgggtggggttttcaagtgggtgacggcgctctccggcagccggggatggccgtgtccgcactgaccaggcctgtggagagtgctcggcctaaccttagaacacatttgtaactgaatacagtgttttcaatttgtacagaatagttagaatattctattaaagtggtgaaacattgaaaaaaa

SEQ ID NO: 73278 - DNA, 971 bp, Homo Sapiens
ggggcagcctgtcttgctcgcggagagaggagctaggagcctcggccaatgggagccggcgttgttggaggccacggcggcgcagccccaaagcgagcgaagctagggtcgccgccactgccgcaggaggcgtgaggggataaaaacattcagatggcagatcacagtttttcagatggggttccttcagattccgtggaagctgctaaaaatgcaagtaacacagaaaagctcacagatcaggtgatgcagaatcctcgagttctggcagctttacaggagcgacttgacaatgtccctcacaccccttccagctacatcgaaactttacctaaagcagtaaaaagaagaattaatgcattgaaacaacttcaggtgagatgtgctcacatagaagccaagttctatgaagaggtacatgacttggaaagaaagtatgcagcgctataccagcctctctttgacaagagaagagaatttatcaccggcgatgttgaaccaacagatgcggaatcggaatggcacagtgaaaatgaagaggaagagaaattggctggagacatgaaaagtaaagtagtcgtcacagaaaaagcagcggcaacggctgaagagccagatcccaaaggaattccagagttctggtttaccatcttcagaaatgtggacatgctgagtgaattagtccaggaatatgatgaaccaatcttgaaacacctgcaggatattaaagtgaaattttctgaccctggacagcctatgtcttttgtgttagagttccactttgaacccaacgactactttaccaactcagtcctgacaaaaacctacaagatgaaatcagaaccagataaggctgatcccttttcctttgaaggtcctgagattgtggactgtgacgggtgtactattgactggaagaaaggaaagaatgttactgtcaaaaccatcaagaaaaagcagaagcataaggg

SEQ ID NO: 73279 - DNA, 1012 bp, Homo Sapiens
aagagatggatacagatctgaattggtaaaagttgacttaatgaaactctctgaaaaagctgtagtgacttgaattgcactcagaattagagcgctcattttgtcagaaccatcatctccagaaagaaccaagacttctaagggattcaaacttgggaagcacaagcatgagacctttataacgtcaagtggaaaatctgaatacattgaacctgccaaaagagctcatgttgtgccaccaccaagaggaaggggcaggggaggatttggacagggtatacgacctcatgatattttcgtcagagaaaacagaacacaagtagaccaccatctatgcatgtggatgactttgttgctgctgaaagtaaagaagtggttcctcaagatggaatacctccaccaaaacggccactcaaagtatcacagaagatttcttcccgtggtgggttttcaggcaatagaggaggacggggtgctttccacagtcagaataggtttttcacaccacctgcttcaaaaggaaactacagtcgtcgggaaggaacaagaggctccagttggagtgctcagaatactcctcgaggaaattacaatgaaagtcgtggaggccagagcaattttaacagaggccctcttccaccattacgaccccttagttctacaggttaccgcccaagtcctcgggaccgtgcttctagaggtcgtgggggacttggaccttcctgggctagtgcaaatagcggcagtggaggctcaagaggaaagtttgttagtggaggcagtggtagaggtcgtcatgtacgctcctttacacgataaaaatccttttgggaacatcttaactgtatatgaacatttcacgaggacaataaaaataagacattgaaggaccaatttagacttagcagttatctggagacatctgagagaatatttttatctgaagaaagcagaatttgtttgatacctaacaagatttcaataaaaatccaaactttgtatgtacgtttgt

SEQ ID NO: 73280 - DNA, 1339 bp, Homo Sapiens
  misc_feature (505)..(505): n is a, c, g, or t
  misc_feature (743)..(815): n is a, c, g, or t
ggccactggggtcaccccttgcacagggcaaggatgcctatgaactagaggtcttattgcgggtaaaggaatcggaaatacagtacctgaaacaggagattagctccctcaaggatgagctgcagacggcactgcgggacaagaagtacgcaagtgacaagtacaaagacatctacacagagctcagcatcgcgaaggctaaggctgactgtgacatcagcaggttgaaggagcagctcaaggctgcaacggaagcactgggggagaagtcccctgacagtgccacggtgtccggatatgatataatgaaatctaaaagcaaccctgacttcttgaagaaagacagatcctgtgtcacccggcaactcagaaacatcaggtccaagtgtacgacacctgttctacctgggaatgcaaaccctgagctgcaaataagaacacagacgtgggagacaccacggcctgaagctgctctcctcttccccgctctcctctcctccggtcncgtgatgggttacgctgagccagcaatgtgcacgcactaactccacaggtgttaaagacactttctgctgaaccatttgaaagcaagctgtagggccctcgacatggcagcacccaggagaataagggcatctccacagctgagaccatgactgcagccaggagtgcctggacggacgcatctgacatccagccgtgtgcacaagcccagggctgctgcctgcttgacggctgctgtnnnnnnnnnnnnnnnnnnnnnnnnnnnnnnnnnnnnnnnnnnnnnnnnnnnnnnnnnnnnnnnnnnnnnnnnncagcctcgtccccacaccccacctgttattaacttccatgacattgacaccttaggagagtccagcctgctgtctcacggcttctaagaagccaaacccagctttgaaacacaacataagagagaggccacaatactatgtctcaccaaaccccaacagcctcaaagtagtcccacctccagaggaattccagaccccttccaaccttcatcaacataagcaacggacaaggaaggtttcagccaaatgcaggattttgatggaatgggtgtttacatccagaagccccaaggacatctgccatgaaatcagtctcactccattttcaaaaacaaataactctcttctaatgaatcagtgctcattggaaaaattcatgcagaagaattttataagaaggcagcctgcccttgtaatccagcaacccacacccctctctcccggcatctgactcgatgtaactggagacaacactgttagattttgtcgtgtctggcaggcacacatgtacatacatcaccctg

SEQ ID NO: 73281 - DNA, 1245 bp, Homo Sapiens
  misc_feature (746)..(765): n is a, c, g, or t
  misc_feature (974)..(974): n is a, c, g, or t
  misc_feature (985)..(985): n is a, c, g, or t
  misc_feature (1001)..(1001): n is a, c, g, or t
  misc_feature (1035)..(1035): n is a, c, g, or t
  misc_feature (1046)..(1046): n is a, c, g, or t
  misc_feature (1207)..(1207): n is a, c, g, or t
attgggggaggaatgccaacgcccctaggtcatgggccagggtttttccttgggaaaccagcttatggcccatgttcaccttacctacgggggcccgcggcgcccaaacgaaatggttttagaaagctttcttgaggggccgagggcggccgacaaggctttttcttctcactttgggcttccgctagtgcaagatttaataaaaaacaaacaaaaataggaatggttgctttcaacattttccaggttgtgaaaggtttgccacgactctcaggggtgtggttctaagctgcatcagtggaacaaatacaaaatgctgtcctcctcctgggctggaaggcagtgcactttctcctcttaacagccagactagcgggtgaggagtcagtgctgtgacccaggccaagctggagtgtccgcatagctttttctctgaccagtggggattccatctaccttgaggcgtgctggctgggccccgtttccacaccagcacatggtgagacagggtagcttatcaacaggctgctgggccttaatactgacagtgagtgtggcgggtcacagccaggaaaggactaacacagatgccctcccagcccccactgctggcctaattttagaataccacggaaaaaagctttgatgaagacaacaggaagtcaacacagcagagagtggtgtggacaacccagaagccagcctcacgcattccatgcccacagttaacgatgacaacaacagcnnnnnnnnnnnnnnnnnnnnaacaaaggtacaggtgaaaagcagcgcttggggtgtgctgctgcaagctggggaaggcgcgtgctcaacttggatgggacacacctagtctttcttcaagtccctggattcaaagagcttcaaccgttcttgcaccgtcagggcttccttcagactcctggacctgatgtttctgagttgccgggtgaacaggatctgtctttcttcangaagtcagggntgcttttagatttcantatatcatatccggacaccgtggcactgtcaggngacttctcccncagtgcttccgttgcagcttgagctgtccttcaactgctgagtcacatcagcttaccttcgcatgcgactcgttaaatgtcttgactgtactgcgtatctgtccgcatgcgtcgcatcactgaagacatcctgctgtgcgatctggctcaggcaatctaangatctatatcgacagtaacgtccggtgatgtacgcaat

SEQ ID NO: 73282 - DNA, 1905 bp, Homo Sapiens
tggaccggtccggaattcccgggatatcgtcgacccacgcgtccgagaagaccaaacaggacttgaaggctgaagaacagcagctgccccccgccgctctcccctcccagccccagcacccccaaccacaggaggtcccaggtgattgaaaagtttgaggccttggacattgagaaggcagagcacatggagaccaatgcagtggggccctcaccatccagcgacacacgccagggccgcagcgagaagagggcgttccctaggaagcgggacttcaccaatgaagcccccccagctcctctcccagacgcctcggcttcccccctgtctccacaccgaagagccaagtcactggacaggaggtccacggagccctccgtgacgcccgacctgctgaatttcaagaaaggctggctgactaagcagtatgaggacggccagtggaagaaacactggtttgtcctcgccgatcaaagcctgagatactacagggattcagtggctgaggaggcagccgacttggatggagaaattgacttgtccgcatgttacgatgtcacagagtatccagttcagagaaactatggcttccagatacatacaaaggagggcgagtttaccctgtcggccatgacatctgggattcggcggaactggatccagaccatcatgaagcacgtgcacccgaccactgccccggatgtgaccagctcgttgccagaggaaaaaaacaagagcagctgctcttttgagacctgcccgaggcctactgagaagcaagaggcagagctgggggagccggaccctgagcagaagaggagccgcgcacgggagcggaggcgagagggccgctccaagacctttgactgggctgagttccgtcccatccagcaggccctggctcaggagcgggtgggcggcgtggggcctgctgacacccacgagcccctgcgccctgaggcggagcctggggagctggagcgggagcgtgcacggaggcgggaggagcgccgcaagcgcttcgggatgctcgacgccacagacgggccaggcactgaggatgcagccctgccgcatggaaggtggaccggagcccagggctgcctatgagcgacctcaaaacgcataacgtccacgtgggagaatgagcagcggtgggcatcaggtgggaaaccacacctctccgggaaagagaagccaggtgcccatcgcccccgtccacctgtcttctgaagatgggggtgaccggctctccacacacgagctgacctctctgctcgagaaggagctggagcagagccagaaggaggcctcagaccttctggagcagaaccggctcctgcaggaccagctgagggtggccctgggccgggagcagagcgcccgtgagggctacgtgcttgcaggccacgtgcgagcgagggtttgcagcaatggaagaaacgcaccagaagaagattgaagatctccagaggcagcaccagcgggagctagagaaacttcgagaagagaaagaccgcctcctagccgaggagacagcggccaccatctcagccatcgaagccatgaagaacgcccaccgggaggaaatggagcgggagctggagaagagccagcggtcccagatcagcagcgtcaactcggatgttgaggccctgcggcgccagtacctgtcttattgcgggtaaaggaatcggaaatacagtacctgaaacaggagattagctccctcaaggatgagctgcagacggcactgcgggacaagaagtacgcaagtgacaagtacaaagacatctacacagagctcagcatcgcgaaggctaaggctgactgtgacatcagcaggttgaaggagcagctcaaggctgcaacggaagcactgggggagaagtcccctgacagtgc

SEQ ID NO: 73283 - DNA, 1428 bp, Homo Sapiens
  misc_feature (843)..(862): n is a, c, g, or t
aaagacgcgaggcctgggtggcgatttcggcacgaggcccagatcagcagtactcgcagaagtgcctgggagaatgcccatctggcccaggcgctggaggccgagcggcaggccctgcggcagtgccagcgtgagaaccaggagctcaatgcccacaaccaggagctgaacaaccgcctggctgcagagatcacacggttgcggacgctgctgactggggacggcggtggggaggccactgggtcaccccttgcacagggcaaggatgcctatgaactagaggtcttattgcgggtaaaggaatcggaaatacagtacctgaaacaggagattagctccctcaaggatgagctgcagacggcactgcgggacaagaagtacgcaagtgacaagtacaaagacatctacacagagctcagcatcgcgaaggctaaggctgactgtgacatcagcaggttgaaggagcagctcaaggctgcaacggaagcactgggggagaagtcccctgacagtgccacggtgtccggatatgatatactgaaatccaaaagcaacccctgacttcttgaagaaagacagatccttgtgtccccccggcaactcataaaactccggtcccaacccccgtaattgagcaggtctcgtgggatacctgaaatgcacccgcttcccggcccatgcaggagagtctgaaggaaggcctgacggtgcaagaacggttgaagctctttgaatccagggacttgaagaaagactaggtgtgtcccatccaagttgagcacgcgccttccccagcttgcagcagcacaccccaagcgctgcttttcacctgtacctttgttnnnnnnnnnnnnnnnnnnnngctgttgttgtcatcgttaactgtgggcatggaatgcgtgaggctggcttctgggttgtccacaccactctctgctgtgttgacttcctgttgtcttcatcaaagcttttttccgtggtattctaaaattaggccagcagtgggggctgggagggcatctgtgttagtcctttcctggctgtgacccgccacactcactgtcagtattaaggcccagcagcctgttgataagctaccctgtctcaccatgtgctggtgtggaaacggggcccagccagcacgcctcaaggtagatggaatccccactggtcagagaaaaagctatgcggacactccagcttggcctgggtcacagcactgactcctcacccgctagtctggctgttaagaggagaaagtgcactgcccttccagcccaggaggaggacagcatttttgtatttgttccactgatgcagcttagaacccacacccctgagagtcgtgggcaaacctttcacaacctggaaaatggttgaaagcaaccattcctaattttgggttgttttttaataaaatccttcccc

SEQ ID NO: 73284 - DNA, 991 bp, Homo Sapiens
ctcatctcagagctgggtgccaggctgaaggatcactgaggaaggggaagtgggcaaagcagaccctcaaactgacacaagacctacagagaaaaccctttgccaaatctgctctcagcaagtggacagtgataccgttaacagcttaacacctttgtgaatcccacgccattttcctaacccagcagagactgttaatggccccttaccctgggtgaagcacttacccttggaacagaactctaaaaagtatgcaaaatcttccttgtacagggtggtgagccgcctgccagtggaggacagcacccctcagcaccacccaccctcattcagagcacaccgtgagcccccgtcggccattctgtggtgttttaatattgcgatggtttatgggacgttttaagtgttgttcttgtgtttgttttcctttgactttctgagtttttcacatgcattaacttgcggtatttttctgttaaaatgttaaccgtccttcccctagcaaatttaaaaacagaaagaaaatgttgtaccagttaccattccgggttcgagcatcacaagcttttgagcgcatggaactccataaactaacaaattacataaactaaagggggattttctttcttcttttgtttggtagaaaattatccttttctaaaaactgaacaatggcacaattgtttgctatgtgcacccgtccaggacagaaccgtgcataggcaaaaggagtggagcacagcgtccggcccagtgtgtttccggttctgagtcagggtgatctgtggacgggaccccagcaccaagtctacgggtgccagatcagtagggcctgtgatttcctgtcagtgtcctcagctaatgtgaacagtgttggtctgctggttagaaactagaatattgatattttcaggaaagaaatcagctcagctctccactcattgccaaatgtcactaaagggtttagttttaaggagaaagaaaaggaaaa

SEQ ID NO: 73285 - DNA, 746 bp, Homo Sapiens
aagggcctacttaccaagtgtaaatcacaacataggctaccaaaatatttcttatttgctaggagaacaaagctgtcacggtgcatgatagttggacagagatggctaaaaaagaggcaaattcagatttggaaacagggtggcctcttcattatttattgccaagatctgaaaatcttcaacatcttataagacaacaatgaagtagcccctgaacagcatggagttgctgtgagtttgttcgttgcagacctttgtgttgggtcctgggaatctgagctttgttccctgtgcatggtggataattgaaaccaagaggacatgggatagaccttgtgacagaccaattctgtgacccctgtcttctgggtcacattattcattgttgatttaaatacaggactaccaaacagtacaaatctatcatgagtctggtagaaaagtaaaagtaaaagctgcacacgttacatactgtttattgttctaatgtacaactaactatttgcatataatgtgatttaatttattgctgttttgtgtagaaaaggagaactaatgactgtggatataacccatgttttgtataatatattttatttcttgtgcgaactggtcatttaaaatatctacttcatttgatgtttggatataaatgtgtatgtgtccttgtaaatgtttctatcaagcaagaatgccacgtactcagagtataacaatgtgttctcattaaaaaatacatcccacgg

SEQ ID NO: 73286 - DNA, 745 bp, Homo Sapiens
atacataaaatacagcgtccaaaagtgtgtcatcttctttctcttcacaattttactaataagggggtaaaatgcctgtgagtctattcattatggaaaataaaaaagaaacaaccatttaaggctgaggcattttggttttctgctggcttttagattattaactgcattaagcccctcactacaacttcaccagtatcctagaaacaatttgggtttccttttaggcagggacaggaagtattcaaaggacagacatatggacagagttaggcccttcagggttgaagtctgtggtttcttgtgtctcaagactcaatgtcttgagaagttggtggaccctgtcctccatccaagaagtgctgccaaggaaaccaggggacctagcaaagagtcaggagaaaatggccaaaggaattctgacattccatacctgaatgaactgttttcgtgagtgctttgatcaccctatcccctatcaaggcgctgaacaggtggcccgcaggaaatctgctgtcgcaagaggagggctttgacttacttcccctaattgttgagtaaaaagtgattctcttaatttctgtattctgtttttcatatcaccagtagaagggtcctgtggatctaaatagagcacattttaaggctacagagtagtagaaattgatgtttagacaaggcagcttgttcaaaatctgaaaggcacacccagaagctttctctaaacattttggctcccattaaa

SEQ ID NO: 73287 - DNA, 1943 bp, Homo Sapiens
caatataggctaggtacgaggcgtgggtggtgaattccggcacgaggggaagccggggccggggctgcggggcgagttgtcggccctgggccgggagctggagtcccagactcataggtcccggcccagcccccgaagagccgcctcagccggggggagttgctcggactcaaacgtccagtcctcgtgcgaccgcgctgggtcggaagtgagcaggctgaggccaccatggagcagtgtgcgtgcgtggagagagagctggacaaggtcctgcagaagttcctgacctacgggcagcactgtgagcggagcctggaggagctgctgcactacgtgggccagctgcgggctgagctggccagcgcagccctccaggggacccctctctcagccaccctctctctggtgatgtcacagtgctgccggaagatcaaagatacggtgcagaaactggcttcggaccataaggacattcacagcagtgtatcccgagtgggcaaagccattgacaggaacttcgactctgagatctgtggtgttgtgtcagatgcggtgtgggacgcgcgggaacagcagcagcagatcctgcagatggccatcgtggaacacctgtatcagcagggcatgctcagcgtggccgaggagctgtgccaggaatcaacgctgaatgtggacttggatttcaagcagcctttcctagagttgaatcgaatcctggaagccctgcacgaacaagacctgggtcctgcgttggaatgggccgtctcccacaggcagcgcctgctggaactcaacagctccctggagttcaagctgcaccgactgcacttcatccgcctcttggcaggaggccccgcgaagcagctggaggccctcagctatgctcggcacttccagccctttgctcggctgcaccagcgggagatccaggtgatgatgggcaacctggtgtacctgcggctgggcttggagaagtcaccctactgccacctgctggacagcagccactgggcagagatctgtgagacctttacccgggacgcctgttccctgctggggctttctgtggagtccccccttagcgtcagctttgcctctggctgtgtggcgctgcctgtgttgatgaacatcaaggctgtgattgagcagcggcagtgcactggggtctggaatcacaaggacgagttaccgattgagattgaactaggcatgaagtgctggtaccactccgtgttcgcttgccccatcctccgccagcagacgtcagattccaaccctcccatcaagctcatctgtggccatgttatctcccgagatgcactcaataagctcattaatggaggaaagctgaagtgtccctactgtcccatggagcagaacccggcagatgggaaacgcatcatattctgattcctacctggaaggaattttgttgaaaggggttttcacctgtgagccttggtctgtctcggtagggtggtcaacttcagtggactgtggttggtttcagagcgcctggctgaggagttccactgaggggagcactggagcagccctttggcagaggctgaggagggagatggaccagcccacgcctggcacctggctccatggcataaggaaagggagatgctggcctctgtgctcctgctgtcttttcctgtttctgtttgcgtttgacttagtagcaaccgacagagtggcaagggatttggtcttcagcagtagacatccttccacccctgccctcagccaagtctcttgctgccatgccaatgctatgtccacccttgcccctcggcccaagagtgtccagcggtggcccacctcttcctcccactacagcctcaacagtatgtaccatctcccactgtaaatagtcccagttagaacggaatgccgttgttttataactttgaacaaatgtatttactgcccttctc

SEQ ID NO: 73288 - DNA, 502 bp, Homo Sapiens
ctgccgaaaaaccaatatatatatgtatgatcccaattaaaagacaaaagcaaatgagccccaaactgcctgtcttcagctttgcctgggagctgctacctttgctcttctagcatcttctaggtaccaaggatattagccacttgagggtgttgggcatatttgtttcattgtaggcaaaatcctcttgtggtttcccctccccaggtattgttgagtctgttcaaagctgggtgtgttgaaacactgcacaaatcctgccactcttgatgtgccgcttgtctcagccttggcagaggctgagtctgttcctgtgcccacctgtccagcaggttttgatgttggctcctgaaagagtttgtatttattttattttgcactagtcacagttgttgttaaactgtatcaaatgttttgggagattatttgcctgagatggaaagagagatggatgatttattgcttcaattgttttaaattaaaagctattctcacaaaaaaa

SEQ ID NO: 73289 - DNA, 702 bp, Homo Sapiens
  misc_feature (23)..(24): n is a, c, g, or t
gccccggaagggcttgtactttnntacgtcaacgaaatgccctcctgtactctgtcttcagcagccaactcctggagctgccaagtgaggggttaaagaagaggtggcgaggcagtgtggctccctgcgaaaagtctgttgctttggttctcagtcctgggtattctaggagcttggacacgcgattgcgtttcctgtgctaaaattctctctcctggctgggctccggtaaactgaagctgctcgagaaatcacctgggaactctcatagccgtttgtcacccagggtgtacttgccaggacctctccttgctactcttcccaaagtcgggaggcaaagcggctgggtcaccagagcctgaccatactgacgctccagggggaagacgcagaggccgggaagagacaccccctcccaaacacataaaacttgccccttcctagcctcggctcccctcactggggccttgggcaggaccgacccgcatccaactaggcctaaggggtaggctctgagcctcttacccctaagaggcggagatgcgcccaaggcgggcgcccggcctgttccccagccctgcctggaagccccgcagccactgcattttgtttaaacacagatagcacgggcctttctcttattgctacagtgttttgtacacggttaaaacactagtaaagctttttcgttattaaaaaaaa

SEQ ID NO: 73290 - DNA, 813 bp, Homo Sapiens
  misc_feature (1)..(1): n is a, c, g, or t
ncagtcgacggtaccggacatatgcccgggaattcggccattacggccggggcttcccactcgggtttgacctacagccgcccgggagaagatggctgccccagcagtgtccgggctctcccggcaggtgcgatgcttcagtacctctgtggtcagaccatttgccaagcttgtgaggcctcctgttcaggtatacggtattgaaggtcgctatgccacagctctttattctgctgcatcaaaacagaataagctggagcaagtagaaaaggagttgttgagagtagcacaaatcctgaaggaacccaaagtggctgcttctgttttgaatccctatgtgaagcgttccattaaagtgaaaagcctaaatgacatcacagcaaaagagaggttctctcccctcactaccaacctgatcaatttgcttgctgaaaatggtcgattaagcaatacccaaggagtcgtttctgccttttctaccatgatgagtgtccatcgcggagaggtaccttgcacagtgacctctgcatctcctttagaagaagccacactctctgaattaaaaactgtcctcaagagcttcctaagtcaaggccaagtattgaaattggaggctaagactgatccgtcaatcttgggtggaatgattgtgcgcattggcgagaaatatgttgacatgtctgtcaagaccaagattcagaagctgggcagggctatgcgggagattgtctaaaagtgttggttttctgccatcagtgaaaattcttaaacttggagcaacaataaaaagctttccagaaacagatcctaaaa

SEQ ID NO: 73291 - DNA, 1306 bp, Homo Sapiens
  misc_feature (767)..(906): n is a, c, g, or t
  misc_feature (909)..(972): n is a, c, g, or t
  misc_feature (1052)..(1082): n is a, c, g, or t
taaaggctaggtacgaggctgggtggtgaattcggcacgagggagaagatggctgcccagcagtgtccgggctctcccggcaggtgcgatgcttcagtacctctgtggtcagaccatttgccaagcttgtgaggcctcctgttcaggtatacggtattgaaggtcgctatgccacagctctttattctgctgcatcaaaacagaataagctggagcaagtagaaaaggagttgttgagagtagcacaaatcctgaaggaacccaaagtggctgcttctgttttgaatccctatgtgaagcgttccattaaagtgaaaagcctaaatgacatcacagcaaaagagaggttctctcccctcactaccaacctgatcaatttgcttgctgaaaatggtcgattaagcaatacccaaggagtcgtttctgccttttctaccatgatgagtgtccatcgcggagaggtaccttgcacagtgacctctgcatctcctttagaagaagccacactctctgaattaaaaactgtcctcaagagcttcctaagtcaaggccaagtattgaaattggaggctaagactgatccgtcaatcttgggtggaatgattgtgcgcattggcgagaaatatgttgacatgtctgtcaagaccaagattcagaagctgggcagggctatgcgggagattgtctaaaagtgttggttttctgccatcagtgaaaattcttaaacttggagccaacaataaaaagcttccagaacagatcataannnnnnnnnnnnnnnnnnnnnnnnnnnnnnnnnnnnnnnnnnnnnnnnnnnnnnnnnnnnnnnnnnnnnnnnnnnnnnnnnnnnnnnnnnnnnnnnnnnnnnnnnnnnnnnnnnnnnnnnnnnnnnnnnnnnnnnnnnnnggnnnnnnnnnnnnnnnnnnnnnnnnnnnnnnnnnnnnnnnnnnnnnnnnnnnnnnnnnnnnnnnnaaaggttatcaaaaaagtttttgtgggggcgccggcgtgccccatgggagaggaataaaagggaatatatatctgtttgnnnnnnnnnnnnnnnnnnnnnnnnnnnnnnnttgatggcccctgccccccgacaaaaaaaacaaccgcgggcgggggggcaaactccctttttttcaaacaccccccccaccaagggagatccccttcggccatatttgtgttgtgtttaaaccttggaaaggcgcgccccccgggggatgccccccacatttggataattctttgccgcccctccttgttttgctccccagtgggagaaaaagaggggggagag

SEQ ID NO: 73292 - DNA, 677 bp, Homo Sapiens
ggaagatggacagcgtgggggcacacctggccctcccggaagctgtggacgaaagggagagcggtcctccagggcaaggggaacgggaaataggtctcctaggtgcctgaagcgctgagcaacctgggtaccctggtggggatgcagggaaggccggggcagagaaagcgaaggtcgacccagggctgtaggaagccataggagagtgaccacgggattccctgagaaacagggccggccccccaacttcagggacccaccgcccattccccgagagctgtcggaaccagatgcaacccggcagcccagagaactctcctgggaggctgtgggtgagccaggccaacattggtgtccctgtccccagagggaggagcaggcaggagagagaggggaaggaggtatgaatcccagtccccaggaacctagctctttaaactctggggagtcggattcaggaaacacccccaggaggccaagcctgaaaacagaggggagggaggaaggaaggagtcccagcaggagcacagccctggtttcctgtcactcagagctgattcacaggaggaggggaggttggggggcgggagacaaaaaccacacctctttttatataaggtttcatatttaatttggtcatggattcataaatacataagtattttgtacacaaaaaa

SEQ ID NO: 73293 - DNA, 1448 bp, Homo Sapiens
gggagggccggctgaggagccggcgtgcggcgcggcgggacgggacgtgcggcccagcgagttggtcggtcccggggtcacccgctacgggaagcaggcctcgccacagactaagaaaaatggctttgtcagcccaacagatacccagatggtttaactcagttaagttgaggagcctcattaatgctgcacaactcacaaaacgttttactagaccagcaagaacactgttacatggcttttctgctcagcctcagatatcctctgacaattgctttctccagtggggatttaagacttacaggacttcctccttatggaatagttcccagtctactagctcaagtagtcaggagaataattctgcccaaagcagtctgcttccttccatgaatgaacagtcacagaagacacaaaatatatccagctttgattctgagctgtttctagaagaactggatgaattgcctccattgtctccaatgcagccaatttcagaggaagaggctattcagattattgcagaccctccattgccaccagcttcattcacacttcgagactatgtggatcattctgagactctgcagaagttggttcttctaggcgtggatttgtccaagatagaaaaacatccagaagcagcaaacctccttctgagactggattttgaaaaagacattaagcaaatgcttctgtttcttaaagatgtgggtatagaggataaccaactgggagcattcctgacaaaaaatcatgcaattttctctgaagaccttgaaaatctgaagaccagggtggcttatctgcattcaaaaaatttcagtaaagcagatgttgcacagatggtcagaaaagcaccatttttgctgaacttttcagtggaaagactggataacagattgggattttttcagaaagaacttgaacttagtgtgaagaagactagagatctggtagttcgtctcccaaggctgctaactggaagtctggaacccgtgaaagaaaatatgaaggtttatcgtcttgaacttggttttaaacataacgaaattcaacatatgatcaccagaatcccaaagatgttaactgcaaataaaatgaaacttaccgagacgtttgattttgtgcacaatgtgatgagcattccccaccacatcattgtcaagttcccacaggtatttaatacaaggctgtttaaggtcaaagaaagacacttgtttcttacctatttaggaagagcacagtatgatccagcaaaacctaactacatctctttggacaaactagtatctattcctgatgaaatattttgtgaagagattgccaaagcatcagtacaggactttgaaaaattcttaaaaacgctttagatttttatgtatgttaaaatgcagtattgtaaagtgaatatatatatgaataaatgaatatatttttaaatgcaa

SEQ ID NO: 73294 - DNA, 1640 bp, Homo Sapiens
ggatactcatctaggctgtgtgaaccagcccaagatgaccaacatccccacacctccacatctctgtcccctgtatctcttcctttctaccactaaagtgttccctgctaccatcctggcttgtccacatggtgctctccatcttcctccacatcatggaccacaggtgtgcctgtctaggcctggccaccactcccaacttgacctagccacattcatctagagatggttcctgatgctgggcacagactgtgctcatggcacccattagaaatgcctctagcatctttgtatgcatcttgatttttaaaccaagtcattgtacagagcattcagttttggctgtggtaccaagagaaaaactaatcaagaatataaaccacattccaggctgctgttttctctccatctacaggccacacttttactgtatttcttcatacttgaaattcattctgctattttcatatcagggtacagacttataagggtgcatgttccttaaaggtgcataattattcttattccgtttgcttatattgctacagaatgctctgttttggtgctttgagttctgcagacccaagaagcagtgtggaaattcactgcctgggacacagtcttataagaatgttggcaggtgactttgtatcagatgttgcttctcttttctctgtacacagattgagagttaccacagtggcctgtcgggtccaccctgtgggtgcagcacagctctctgaaagcaagaaccttcctacctattctaacgtttttgccctctaagaaaaatggcctcaggtatggtatagacatagcaagaggggaagggctgtctcactctagcaaccatccctccattacacacagaaagccctcttgaagcaaaagaagaagaaagaaagaaagcttatctctaaggctactgtcttcagaatgctctgagctgaatgctcttgctcctttcccaagaggcagatgaaaatatagccagtttatctatacccttcctatctgaggaggagaatagaaaagtagggtaaatatgtaacgtaaaatatgtcattcaaggaccaccaaaactttaagtaccctatcattaaaaatctggttttaaaagtagctcaagtaagggatgctttgtgacccagggtttctgaagtcagatagccattcttacctgccccttactctgacttattgggaaagggagaactgcagtggtgtttctgttgcagtggcaaaggtaacatgtcagaaaattcagagggttgcataccaataatcctttggaaactggatgtcttactgggtgctagaatgaaaatgtaggtatttattgtcagatgatgaagttcattgtttttttcaaaattggtgttgaaatatcactgtccaatgtgttcacttatgtgaaagctaaattgaatgaggcaaaaagagcaaatagtttgtatatttgtaataccttttgtatttcttacaataaaaatattggtagcaaataaaaataataaaaacaataactttaaactgctttctggagatgaattactctcctggctattttcttttttactttaatgtaaaatgagtataactgtagtgagtaaaattcattaaattccaagttttagcag

SEQ ID NO: 73295 - DNA, 549 bp, Homo Sapiens
aagcgcctccgaggacctcatcgtggcccaggaccgcaagccaaggccaccccagtgtccttaccatcctgggaatgagaggagtcaggcccagccttgtcctgtctgcccccctggaagccttccctgagcactggcctcttatttacccgtctttgtctctggcttgttggtatctgtcccttgtctgattagggaacgcctgaggtcaggatctttgcctccccaatcagattgtcaggcaggagtgggggtagtgcagatgctgggtcatttctacatgtgagaccaaatagtggtcctgtttaagttgatccccttgaaagaaaattctggaaaagctcctcagatgcacagatacacagaatcagaccttgggcaaagtgtgtagttgtgcttttgaagctgtgcaaccttggacaaactacttgacttctctgtgcctcagtttccttatttgtgaaatgaggggtagtcatgataccttccccatgaggttgatgggaggattgagttaatatttataaagcatttcagacagtgccagag

SEQ ID NO: 73296 - DNA, 673 bp, Homo Sapiens
  misc_feature (212)..(239): n is a, c, g, or t
cttgagaacattgacagaaatatgcaatgttgttgagtacggattgatggtgctgtttaatcagtttgcttccaaagtggcctactcaagaggccctaagactggtagaaattaaaaggatttcaaaaactttctattcctttcttaaacctaccagcaaactaggattgtgatagcaatgaatggtatgatgaagaaagtttgaccaaaannnnnnnnnnnnnnnnnnnnnnnnnnnnaatttgaaatcattcttattccctttaagaatgtttatgtatgagtgtgaagatgctagcgaacctatgctcagatattcatcgtaagtctcccttcacctgttacagagtttcagatcggtcactgatagtatgtatttctttagtaagaatgtgttaaaattacaatgatcttttaaaaagatgatgcagttctgtatttattgtgctgtgtctggtcctaagtggagccaattaaacaagtttcatatgtatttttccagtgttgaatctcacacactgtactttgaaaatttccttccatcctgaataacgaatagaagaggccatatatattgcctccttatccttgagatttcactacctttatgttaaaagttgtgtataattgttaaaatctgtgaaagaataaaaagtggatttaaattaaaaaa

SEQ ID NO: 73297 - DNA, 437 bp, Homo Sapiens
  misc_feature (140)..(152): n is a, c, g, or t
  misc_feature (220)..(247): n is a, c, g, or t
aacctttgagaacattgacagaaattatgcaatggtttgttgagatacggacttgatggtgctgtttaatcagtttgcttccaaagtggcctactcaagaggccctaagactggtagaaattaaaaggatttcaaaaacnnnnnnnnnnnnncttaaacctaccagcaaactaggattgtgatagcaatgaatggtatgatgaagaaagtttgaccaaannnnnnnnnnnnnnnnnnnnnnnnnnnnaatttgaaatcattcttattccctttaagaatgtttatgtatgagtgtgaagatgctagcgaacctatgctcagatattcatcgtaagtctcccttcacctgttacagagtttcagatcggtcactgatagtatgtattttcttagtaagaatgtgttaaaattacaatgatcttttaaaaagatgatgc

SEQ ID NO: 73298 - DNA, 888 bp, Homo Sapiens
  misc_feature (808)..(835): n is a, c, g, or t
cagtcgacggtaccggacatatgcccgggaattcggccattacggccgggggaaacccacgaggggacgcggccgaggagggtcgctgtccacccgggggcgtgggagtgaggtaccagattcagcccatttggccccgacgcctctgttctcggaatccgggtgctgcggattgaggtcccggttcctaacggactgcaagatggaggaaggcgggaacctaggaggcctgattaagatggtccatctactggtcttgtcaggtgcctggggcatgcaaatgtgggtgaccttcgtctcaggcttcctgcttttccgaagccttccccgacataccttcggactagtgcagagcaaactcttccccttctacttccacatctccatgggctgtgccttcatcaacctctgcatcttggcttcacagcatgcttgggctcagctcacattctgggaggccagccagctttacctgctgttcctgagccttacgctggccactgtcaacgcccgctggctggaaccccgcaccacagctgccatgtgggccctgcaaaccgtggagaaggagcgaggcctgggtggggaggtaccaggcagccaccagggtcccgatccctaccgccagctgcgagagaaggaccccaagtacagtgctctccgccagaatttcttccgctaccatgggctgtcctctctttgcaatctgggctgcgtcctgagcaatgggctctgtctcgctggccttgccctggaaataaggagcctctagcatgggccctgcatgctaataaatgcttcttcagannnnnnnnnnnnnnnnnnnnnnnnnnnnaaaaaggggcggcccgctctagaatattccctcgaagggggcccaagccttac

SEQ ID NO: 73299 - DNA, 899 bp, Homo Sapiens
aggctggaccggtccggattcccgggatcacgaggggacgcggccgaggagggtcgctgtccacccgggggcgtgggagtgaggtaccagattcagcccatttggccccgacgcctctgttctcggaatccgggtgctgcggattgaggtcccggttcctaacgaatctctgctggattggccgtaaccctgtccccgagcgggctcacagggtctgaaggccacgcatgaggcaaaggtaaagttctgagccacccggtgcctccttcccaggactgcaagatggaggaaggcgggaacctaggaggcctgattaagatggtccatctactggtcttgtcaggtgcctggggcatgcaaatgtgggtgaccttcgtctcaggcttcctgcttttccgaagccttccccgacataccttcggactagtgcagagcaaactcttccccttctacttccacatctccatgggctgtgccttcatcaacctctgcatcttggcttcacagcatgcttgggctcagctcacattctgggaggccagccagctttacctgctgttcctgagccttacgctggccactgtcaacgcccgctggctggaaccccgcaccacagctgccatgtgggccctgcaaaccgtggagaaggagcgaggcctgggtgggggaggtaccaggcagcccacaggggtcccgatccctaccgccagctgcgagagaaagaccccaagtacagtgcttctccgccagaatttcttcccgctacatggggctgtcctctctttggcaatctgggctgcgtcctgaacaatgggcttctggtctcgctggccctgcccctggaaaataaggaacccttctacatgggcccctgcaggcttataaatgcctccttccgg

SEQ ID NO: 73300 - DNA, 1544 bp, Homo Sapiens
  misc_feature (36)..(36): n is a, c, g, or t
  misc_feature (1057)..(1129): n is a, c, g, or t
  misc_feature (1328)..(1339): n is a, c, g, or t
cgggggggagagggagggagagctatagtactatgnacagtggtaaaaaaagcaggctggtacggtccggaatcccgggatatcgtcgaccacgcgtcggtgcctctgtgttcatccccttcctgatctaaccggctccctcgccagtcccgggggcctgccctgctcccaccaggagagagggcaaagggatgagcctgggtttggactctaaaatctcagcactgccccatgggtcctagacttcccagggcaagaggaagaccctgccattccacagccccttcctctgccaggtgcttggctctctgagagcaaacaggaacactagagaccaaaaaggggacaaaggagaagggctgagcccaccttcttgctcctacccttggtgcctaatgctgtgtgatgcacctgcagggtgtgtgctagcctctgtgccccgtccttgtgccaggtcaaggtgggggcaggctgggccctgcatttctggggcaggaacagagggtgaaagggacagatagatgcaggtccattctgcacctcttggctcgggtgcagagttcaccctgtgccctccgttataagtccctcccccagccctgtcatgtgccttgggctcctcctgccctccatctcagccattggggcagggaccctcctacactacagaggggccaggggatccctctctccctagtgccttccaccctttactccccagagcagcttggcccagggaggggggatgctgcttagctgatcccgccctgacccagaggaagcctctatttatttattagcttttgtttacaccgtggaattgaccccttcctccaggggtcttgggtgggggagcccagggcccctgtgacccctcctttcttcctccaatccccagtttgtatttagctgccaaataagattcccattggctccctgtgttctcttggggggtcagggtgctgtcccctcccctctgtttacatctcccctctaccccgctgtatcgcatattgctgagttttctatttttgcaaaataaagtgatggaaactcnnnnnnnnnnnnnnnnnnnnnnnnnnnnnnnnnnnnnnnnnnnnnnnnnnnnnnnnnnnnnnnnnnnnnnnnnttccccgggggggccccaaaatttagggcggtccccagttttttttgtgaaaaaagggggccccaattgagggggggtggtttatataaaaagaaaggagggggcgcggggtttaaaaaaggtcgcgtgacggggaaaacaatcgggtaacccacgcggcaactcttggggagagacgagcaccccctaatactctgcnnnnnnnnnnnnacaactagtgtgtgcggacacacaacaaaccccacagagaattatttaaacgtccctaaggggaaaagatttaacattttgacacgcgttatacgtgtcggtcaaacagcacacgcatattacagcggcggtcaaaaagtttgcgcacacggcgaatataattctcacgagcaacaattttatcgcgaagtgagtacaataaaag

SEQ ID NO: 73301 - DNA, 1292 bp, Homo Sapiens
  misc_feature (414)..(454): n is a, c, g, or t
gctatattctctttaataatacatacagaaggattactcaataaattttaaatacataaaatgcaacaatttaaatgtacatgtttttaaatagatgtatatcgatgtacataagtaaaactatcacccacatcaagatctggaacatatattttatatattaatgtcatattatttaccatatagtttgttaaatgttacatcctatattgtatgttttacataaaatgtcttatgtttagattttaagaaaaatgttgctatttctatgatttatagtttccattatctttaaactctttgatcatttgttttatacaaatgtatctcaggttagagattgatttttgacccaatttcaattgtaatagggctatttaaccagtttataggtcatctgtactgtcaatctannnnnnnnnnnnnnnnnnnnnnnnnnnnnnnnnnnnnnnnnaccacttcttttccaaacattggaatgtatatattctatttttgtagttaacacttatttccatgtcaaatttacttggaactatatgatttacttggaactatatgatgcagtaactactgtttttccccatgcatcatgtacagaaaatgaggatgtatccacccccctcccaaacccagtgatttggaagtttctttacagtatcagtagtaacatggacaaacttgttatttttttcctgctatacttaaaaataagggaaataaaactgtactgttttccaattgtcagatttgacatttagaatgttatttgtcaaatctacagtgacaaagcccttttacttaggtttagcttaagaacatgcgtatttgtatctacaatactacatgctaaaaataaaacagtatttgtccaatatattgaacatgtggtatgcccttccagtttaaacgtaaactgaaattttacacccagcttatgtttctatttttgtatttagttttaatgccctatacataacaatttaaacttaatgctccttaactagttttaatgcataccatcaggttctttcatacaattgcctccctattcttattttaattcaggttctctgttagctgcaggtaaatccttcagcaaaattttcagggaaagttcttggttgatatactttcctaacccctgtatatctaagaatgtcttccaggtttcctttgtaaagaaatgataacttggcagagtatataattcttggctcaaaattattttcccttaacactctagatattgttccactgtcttctggcatttagaattgcaggagaaaaat

SEQ ID NO: 73302 - DNA, 1089 bp, Homo Sapiens
  misc_feature (58)..(58): n is a, c, g, or t
  misc_feature (70)..(70): n is a, c, g, or t
  misc_feature (73)..(74): n is a, c, g, or t
  misc_feature (82)..(82): n is a, c, g, or t
  misc_feature (92)..(92): n is a, c, g, or t
  misc_feature (107)..(107): n is a, c, g, or t
  misc_feature (149)..(149): n is a, c, g, or t
  misc_feature (159)..(160): n is a, c, g, or t
  misc_feature (173)..(173): n is a, c, g, or t
  misc_feature (181)..(181): n is a, c, g, or t
  misc_feature (192)..(192): n is a, c, g, or t
  misc_feature (231)..(231): n is a, c, g, or t
  misc_feature (246)..(246): n is a, c, g, or t
  misc_feature (251)..(251): n is a, c, g, or t
  misc_feature (339)..(339): n is a, c, g, or t
cctggtctgaagatctgctgcgagagtgtgcctgcaacaaggatgcgagatatgctgnaatgatgtctcncanntccgcacngatctccacncaggaggagagcagntcgagcccaggcagcacagatattcttgagcagtgtgacagnatcgatctcnntgagaaagcgttntgatgagnaaggaaattcntgtccctcccgagaatccatcacaaaaatggccacgctntgcacgcccacgacnccgtntcaagagcatcacacactcctcaaagtgcagaccttgccagaagtctgggtctccagatgcccgtggtgtgcagagcatgtacatctntaagtctcccctcatcaggacgcctccttcctgtacacggagcccttgggccgggtgctgggcgtgtggatcgcagtggaggatgccacgctggagaacggctgtctctggttcatccctggctcccacaccagtggtgtgtcaagaaggatggtccgggcccctgttggctcagcgcctggtaccagcttccttgggtcagagccagcccgggataacagcctctttgtgcccaccccagtgcagagaggggccctggtcctcatccatggagaagtggtacacaagagcaagcagaacctctctgaccgctcgcgccaggcctacactttccacctcatggaggcctctggcaccacctggagcccggagaactggctccagccaacagctgaactgccctttccccaactgtacacctaaaggctctcgcagggcaggagccctcgcccctcccgggtgaagctgtgggctgtaaacaccagtgccttgctcagcctcctggttgcaacagggaggtcttgtctcccctcctgggctttcctcctgccctgtgggcagcagcctaggctgggtcaggggcttccctaagatcttcacctctctgcctccctactgccccaacatagccttgaggaggcttctcagccaccaaagggttctggccccttctcactctcctctcctctcagatggaactctggttattatggtgttagttatcgaataaaaacgacttcagaatgcaaa

SEQ ID NO: 73303 - DNA, 770 bp, Homo Sapiens
cagagcatgtacatctttaagcaacctcactttggcggtgaagtctcccctcatcaggacgcctccttcctgtacacggagcccctgggccgggtgctgggcgtgtggatcgcagtggaggatgccacgctggagaacggctgtctctggttcatccctggctcccacaccagggccctggtcctcatccatggagaagtggtacacaagagcaagcagaacctctctgaccgctcgcgccaggcctacactttccacctcatggaggcctctggcaccacctggagcccggagaactggtaggtgacagggtgggtgtgtgtgcccgacagtcccctggaggctgggaacagtgaccctgcacctcaaggttgtttctcctctatcctctgcaggctccagccaacagctgaactgccctttccccaactgtacacctaaaggctctcgcagggcaggagccctcgcccctcccgggtgaagctgtgggctgtaaacaccagtgccttgctcagcctcctggttgcaacagggaggtcttgtctcccctcctgggctttcctcctgccctgtgggcagcagcctaggctgggtcaggggcttccctaagatcttcacctctctgcctccctactgccccaacatagccttgaggaggcttctcagccacccaaagggttctggccccttctcactctcctctcctctcagatggaactctggttattatggtgttagttatcgaataaaaacgacttcagaatgcataa

SEQ ID NO: 73304 - DNA, 813 bp, Homo Sapiens
ccatggcctgcctgagcccctcgcagctccagaagttccaacaggatggattcctggtgctggaaggattcttgtctgcggaagagtgtgtggccatgcaacaaaggattggcgagatagtggctgaaatggatgttcctctccactgccgcacagaattctccacccaggaagaggagcagcttcgagcccagggcagcacagactatttcttgagcagtggtgacaagattcgattcttctttgagaaaggcgtttttgatgagaaaggaaatttcctggtccctccggagaaatccatcaacaaaattggccacgctctgcacgcccacgaccccgtcttcaagagcatcacacactccttcaaggtgcagaccttggccagaagtctgggcctccagatgcccgtggtggtgcagagcatgtacatctttaagcaacctcactttggcggtgaagtctcccctcatcaggacgcctccttcctgtacacggagcccctgggccgggtgctgggcgtgtggatcgcagtggaggatgccacgctggagaacggctgtctctggttcatccctggctcccacaccagtggtgtgtcaagaaggatggtccgggcccctgttggctcagcgcctggtaccagcttccttgggtcagagccagcccgggataacagcctctttgtgcccaccccagtgcagagaggggccctggtcctcatccatggagaagtggtacacaagagcaagcagaacctctctgaccgtcgcgcaggcctacactttccacctcatggaggcctctggaccaccg

SEQ ID NO: 73305 - DNA, 1464 bp, Homo Sapiens
  misc_feature (1363)..(1393): n is a, c, g, or t
ctatcactaccagctgacatccggctgcctgagggctacctggagaagctgaccctcaatagccccatctttgacaagcccctcagccgccgcctccgtcgtgtcagcctatctgagattggctttgggaaactggagacctacattaagctggacaaactgggcgagggtacctatgccaccgtctacaaaggcaaaagcaagctcacagacaaccttgtggcactcaaggagatcagactggaacatgaagagggggcaccctgcaccgccatccgggaagtgtccctgctcaaggacctcaaacacgccaacatcgttacgctacatgacattatccacacggagaagtccctcacccttgtctttgagtacctggacaaggacctgaagcagtacctggatgactgtgggaacatcatcaacatgcacaacgtgaaactgttcctgttccagctgctccgtggcctggcctactgccaccggcagaaggtgctacaccgagacctcaagccccagaacctgctcatcaacgagaggggagagctcaagctggctgactttggcctggcccgagccaagtcaatcccaacaaagacatactccaatgaggtggtgacactgtggtaccggccccctgacatcctgcttgggtccacggactactccactcagattgacatgtggggtgtgggctgcatcttctatgagatggccacaggccgtcccctctttccgggctccacggtggaggaacagctacacttcatcttccgtatcttaggaaccccaactgaggagacgtggccaggcatcctgtccaacgaggagttcaagacatacaactaccccaagtaccgagccgaggcccttttgagccacgcaccccgacttgatagcgacggggccgacctcctcaccaagctgttgcagtttgagggtcgaaatcggatctccgcagaggatgccatgaaacatccattcttcctcagtctgggggagcggatccacaaacttcctgacactacttccatatttgcactaaaggagattcagctacaaaaggaggccagccttcggtcttcgtcgatgcctgactcaggcaggccagctttccgcgtggtggacaccgagttctaagccacagaccgaggccccagcaggcagcggctggagggatgccacacccctcacagggcagcccccaactacatcttccctgcttactctctgcctacctgcctgagccatgttcacctgcccacttgtcccctgctgcctgcccaaacaccccaccattggcctgtcaacccacccattggcctgtctgctgggtgctaacaaagctctcatcactccttcnnnnnnnnnnnnnnnnnnnnnnnnnnnnnnncctgagcaggcggccgcaagcttattccctttagtgagggtattttgagcatggcactggccgtcgttaaa

SEQ ID NO: 73306 - DNA, 1031 bp, Homo Sapiens
gcagtttgagggtcgaaatcggatctccgcagaggatgccatgaaacatccattcttcctcagtctgggggagcggatccacaaacttcctgacactacttccatatttgcactaaaggagattcagctacaaaaggaggccagccttcggtcttcgtcgatgcctgactcaggcaggccagctttccgcgtggtggacaccgagttctaagccacagaccgaggccccagcaggcagcggctggagggatgccacacccctcacagggcagcccccaactacatcttccctgcttactctctgcctacctgcctgagccatgttcacctgcccacttgtcccctgctgcctgcccaaacaccccaccattggcctgtcaacccacccattggcctgtctgctgggtgctaacaaagctctcatcactccttcacttggtctgtctgtctctgtcttggtagttgccggtggacagcatggccgtgccagcctcccacactgaggccaggtctaccaccccatcataccagcccccaggaccactaccccacggacagccaggggtccagagcatagcccaggctggggatctcgactcagacaacatggtgacaatgccttgagtctgaggcatcctctgcctgctattcctgcctgacccacactgcactcatagtgtgtgggcctatttattagtatgttatcacttcattgtattaattataaattaaaattatctttataaactgagactaaaaggaaattattacacagtggcaaaaatcagctgaaatcacaagcacagggggtggggcacacaaccacatggcattgtggacactcccaacaggacagtacggtgcaatggaagaccatgctccacagcactattagcaggactggggaccaagcaccatattgggaacctggaccacaacaaaccagagagtgatagggaagcatgcaggaggaagacaacaccacgagacccagatagagagactcgagcacagagagacacgaagacgcc

SEQ ID NO: 73307 - DNA, 916 bp, Homo Sapiens
tcaggaagtttctatgaacattgctattcaagttacagaatacgtatatgcctaataaaatggctttccgatactcatgaaccctgaagacaaggccaacatatcgttaaagaaaagaacaatggcgggagtgaatatgattccctgtctgcctagatgtgtatgaatggccagaatctgcatcaagccctcctgtgataacagaatagaagcactcccctgataaatactttctgtgctccagggaaccccttttttcagacaagaagagataatgtcttcagttttatggtgttttctgtgttttgttctccctgaccactttggttgatgtattttttccatgcgtctccacatctgttggggtagacgtgttgattgattgcattgcccaccagcaccctacaatcagatagttgtgatgctttaattctaacatacagcccgtaccacatccaggagatgtaaaaagtgtgtttgtgaatgtcttcacttgtactctaattcagacttgccaaagtatttgctatttactattatgggtaatactcttctctggcctagttcttacagagctactaaaatagaaatttacttttatggatagaagtacagaattttgagaagaaactaaattttcaccaaattttaaggaaaaattgtcattatctaaaaatgttcttatatatctgcttcatcttaccttcatactctgaaattccctatagcagacagagctagggaaatattaaaaatttaccctatttattttctggaactaaatcaagccttaactataacattatgagagtaatgggaactactgctggctttaagtaaataaaagtcattgttttcaacagtgtataaaaatcatagtgtaacctttttatttaataaatatcttacatttaaa

SEQ ID NO: 73308 - DNA, 740 bp, Homo Sapiens
  misc_feature (250)..(250): n is a, c, g, or t
ggcaggcagcagccatcaatccaagaatgagccatggcggcaagcactgtgtggagaaaggaacccagccgaggtctgagtttcagacagaaactggggagttgggacatcttctctgtgccaggcttcattgacaccatcgctccccacagcagctccttggggcagtgggctcacctgtgcagccacccttactcacagtagcatcccattcttcacactgcaaccccccagcactgtggacccttcncagggaggtgacaggagccagcagacacatgacattcccagaaagccccatcttatccagacaggcttccctccatacttctttccacagttttaccctcagaaaaatgttggctgcagtcttcccttccttcacctccaccctggggaagggtcagtaaccaatgccgagggtcggggaaggaggagtcacaggcaagacagggactcagcgcagtgctcccgccatcatcggggacaggtgccagggtcagctgcagctctccttccgggagcagggtgtggtggccctggatggtcccagggagcagagggaggcaggcagctgtcacagccacagcggctctgaatggcttgagcttttagtatgtgttcaagtgcaggatactacaaactggtaaagacttccaccatgtgaagaatgtatgtaaattaaagtttattgtaatgaaggtttttactttttgcaattaaaagtgttggttgataag

SEQ ID NO: 73309 - DNA, 891 bp, Homo Sapiens
gaataagccactgtgcccggccctttttctcttctgtaacagagtttattactgcctagctagcaggttatttggccctcacatgtgttgaggcaaactctatactatattcttactctccagagttccaaaatcctttatttttaaagaaaaataaacaaacatacttcattctgcccagtatattctcttgatctgtacaagctacgattttaattctctttggagaggaggcatctgttaagttcgaatgggggatatttcctcataacggtcatggctgagaggccaggacaattatcacttaacgaaggtcctttggtgctccctgtgcatcagcttcattcactggggtcaggttcttaaggggtctcttccaccagtgtgctagggaagggctgccatcacctctgtttaacacatagctactttcttaaacacaataagcttaaaaagatgactatggatttacaatggagggcactataagcctctcatacttaaaacagattcaatataaaacaagtaaacatgaaaacacccaaaacacagcagcaaaaagatttagcaatcaatgtttcctttcctgcaaaatgcaaaattaacttatttagcagtagaggactaaaaaggaaatcagttataccaaggggagacacgtgcccttggtactatgaccactaggacagcattcatattacaccacagtgactgctttcaaagctcaaatgattgtcaagccacttctcaaatgacagataatttctgttgttcttttttatacaaaatgttaagacaacaggcttgaatatacagcctaagcaccaattatgataaatgcatattggtaaaatgtgacttctggctttaaaagacattattgacctccct

SEQ ID NO: 73310 - DNA, 790 bp, Homo Sapiens
ccattggccctgctctcagtcctggattaactctcgaccgagcccagcttctgccgcttctgggctccccccggttggccgaggcccaggcccaacgcctctggtgctgttcccctgcagtcccagccccgcgtggctcgcgctcgtctgtgaggaagacacctccagaccttggggtccccgcgcttcctcttgctcctcgctgctcccattagctggtgcaggcttccgttaaggggtccctcccttggcctggcttcccggcgcacctcagcttccctgctggtggggggatccccaggagaccagcatgtgctgaacctctctgtgcctctgcctccgcaccctagacacccacctccagtttgaaggtggcgggccaggggctttcttgctgaattgacgactccgagagccctgactcccgccttgccactcacggctctgtccactagggctcagccctgctgagaaaggacctccgatgcttgggagacgctgctccggcaggtgcagccccggaagtttgtccatgggggtccccgcggctggggctcatggaactgcgagacccgggaccctcctgccctgcgggtccccgagccaccagcagccaggactggaggctgtggggcatggcgtgacttctcgtgcacagggctggtttggttatgagacgatctcgctgggaccgcccctgcccgtggaaagccacaaggacaaagggagcggccacctcgacccccagacaggccggcccgtattaaagttggccctgcacgcccaaaaa

SEQ ID NO: 73311 - DNA, 708 bp, Homo Sapiens
  misc_feature (84)..(84): n is a, c, g, or t
agaagaagattccagcggctctagtgccagcctggactcgagcatcgagagcctgggtgtgtgcatcctagaggagcctctgcntgtccccgaagagctgtgcccaggccttacagcccccattctcatccaggctcagctgcccccaggctcctctgtcctgtgttttaccgagaactcagaccacccaactgcctcaacggtgaacagcccatcctacttgaacagtgggcccctggtctattatcaagtggagcagaggccagtcttgggagtgaaaggagagcctggtacggaagaaggctcagcctctttcccaaaggagaaggatctgaatgtcttctctctccctgttacctcactcgtggcttgtagctccacagacccagctgccctctgtaaatcagaggtggggaaaacacccaccctagaagctctattgcccgaagattgtaaccctgaggagcctgaaaatgaagacttccacccttcctggtccccctcaagcctccccttccgcacggacaatgaagagggctgtgggatggtgaagacctcccagcagaatgaggatcggccccctgaagattcttccttagaactccctctggcagtgtgacaggcgctagaggtcctgcctcttacccattctctatttattcccttattttatctaacaccatttcaaaacaaaactgtagaagcaaa

SEQ ID NO: 73312 - DNA, 557 bp, Homo Sapiens
tagagaactgagttaaattattgccacttaaaaacacaaagtgatatagccactttgtgaattaatcagtcagcagtggctaggttatgcttagtggtttataaccaaatcttagtttataacaacaaatgtgtattgttaattcccactacaagtttataacgacattgctggatgctacactccatgtctctttgtgggacccaggctcatgggacttctgttatctgcattagagagagagaagacaacaaaatatgcactggttcttgaagctttggcccagaagtaaaatatgtcttttacctgttcacattgcattgggccagggcaattatcatggctgcaagtaacttcaaaaggatggggaagtgcgatcttggcatgtgtcagaagaaatgaaaacatttggtgaagagcattaatgactgtctttacaggaaaaaagcaatcaaatagacatgatttcttgtttcagtttcatcatttcctactgtgttacctaaactttctgagccccagtttcttattactaaaataaaataatgataaagatg

SEQ ID NO: 73313 - DNA, 1175 bp, Homo Sapiens
  misc_feature (130)..(130): n is a, c, g, or t
ctctgtccaaccatgagcatgaggggcttcttggtgtcatttccactccccttgccaatatttatttggaaacatttcaaactacagaaaagttatgcaaattacatcaggaacacacacatcccctgtngcggagatctgtgctttatgtctttgaaagtaagttgtcgagatcacagcactccacccctccacaccgaagcccgcagcttctcaggaaagggcagtcttgtgtgatcagtgcatatcatcacacacaggatgtctgacactggcaccacgctgccatctcagagtccatttcaatgctgggggtcatcggttttcagcaggttcttccctgggttcaacgcgtcttcccgccagagggatggaatcttgggtgagtgttgaaatgcgtcagaaacaaaaacgcaaagtggaactggagcacgtcacagaccttggaccagaagtggcctgtgaggcactggaagagacgccaccgtgcgagctgatggtcacacagcttgaggaccacaaagcccaggcaagagagcacccccaaagctaagtaggtagccgaggtggtgctgccatagtgcctgtgggtgcgcagcgcctgccccacagcggccaccacgtgagcacccagtgcgacctcgaagccctggggatgcagcagagcgaggccataactggccagggagacgcactcaagagagaggaacagccagggcccccagccgcggtctaggtagaggcaccaggccacgggccatgcaaagatgggcagtgtgagccactggtccagcaccgaggcacggcgccactgcgtccacaggcgcagccactgcacggggccatagagcagggccatggctgcgaacacgtccttcaggtagcggggacccagccccatcgcgccgcccctgtgcagccacgacagccccagcagcgtgtaggccatgttcacgagtgagttgaacggcatggccaggaaggcagggaggccggccacgggcgcctcggcgtagtgctcatagcccacttgcacggaaacactgtcgaaaatgcccgtgaacacagccacggcacagaggccaccggccacggccacgtgcacgaaggcctgcccccactctggattcatctggaaccggcggcgtgacctggggcagggagcttcagagagc

SEQ ID NO: 73314 - DNA, 914 bp, Homo Sapiens
gggccccccccaaagttaagtagggtagcccaaggtggtgcctccatatttccctgggggtgtgcaggtgcttggcccccccggggcccaccacgggagccccccagtgcgaccctcgaagcccctggggatgcagcagagcgagggcccataaatgcgccaggggagacgccactcaaagagaagaggaacagccagggcccgccagccgcggtctaggtagaggcaccaggccacggggccatgcaaagatgggcagtgtgagccactggtccagcaccgcggcaccggcgccactgcgtccacaggcgcagccactgcacggggccatagagcagggccatggctgcgaacacgtccttcaggtagcggggacccagccccatcgcgccgcccctgtgcagccacgacagccccagcagcgtgtaggccatgttcacgagtgagttgaacggcatggccaggaaggcagggaggccggccacgggcgcctcggcgtagtgctcatagcccacttgcacggaaacactgtcgaaaatgcccgtgaacacagccacggcacagaggccaccggccacggccacgtgcacgaaggcctgcccccactctggattcatctggaaccggcggcgtgacctggggcagggagcttcagagagcagccttcaatacgcagcctctgcagaacactctgggcctcccggctgagccagcagaaagaagccccgtgatttcgtgatttccgaggcagatgctgcgaccttgccccgaaggaaggcaggagtcctgctgattggctggcgccagcggaggaacgttctgcctttttcagtattggcgcgaaaaggccagctatcaccatacgggtatttcgcctcactcgcctcgctgggggaaattcaaatctccgaaaa

SEQ ID NO: 73315 - DNA, 665 bp, Homo Sapiens
  misc_feature (166)..(174): n is a, c, g, or t
  misc_feature (568)..(568): n is a, c, g, or t
aatttacaaacatacataaggagaacccctaagtaccactgggggttcacccatcttattttataactttcactgcctctgaactttttctttgttatttgaaagcaaatgcaaccattatatcatttcagcatgcacccctaccagataagaataataagaaacnnnnnnnnngtatcattatcacacaaaactaacaatatttgtaacacaaaattaacaataactccttgataatctagtagtcagtccatacgctctattctcagctgcacagtttttgagcctcttcccaagcaatagcatattttcctgatcagcttctccaggggctcaggttcactcctttttgctgaacatcttctgtttctgtgctccttggccctggggctgagtacatgggtgtattcctcctacaatcatattttatggcctgccaatttccttctggggtagggggggcggggaacaggacgactctgtttagtaatacacaatgctttagaataaggcaaaagccttagaatcatgccttttgagtctgagccctaccttcctgggtctctcnccagtcctttagccttaaggctaggacagtaaacaacaacctggacatgacgcccggattatcagccctgcctccagttggcagcccaggtggcctt

SEQ ID NO: 73316 - DNA, 603 bp, Homo Sapiens
agacccaacaccacccggccctgcaacacccacccctgcacgcagtgggtggtggggccctggggccagtgctcagccccctgtggtggtggtgtccagcggcgcctggtcaagtgtgtcaacacccagacagggctgcccgaggaagacagtgaccagtgtggccacgaggcctggcctgagagctcccggccgtgtggcaccgaggattgtgagcccgtcgagcctccccgctgtgagcgggaccgcctgtccttcgggttctgcgagacgctgcgcctactgggccgctgccagctgcccaccatccgcacccagtgctgccgctcgtgctctccgcccagccacggcgccccctcccgaggccatcagcgggttgcccgccgctgactgcgccaggatgcacagaccgaccgacagacctcagtgcccaccacgggctgtggcggagctcccgccccctgcgccctaatggtgctaaccccctctcactacccagcagcaggctggggacctcctccccctcaaaaaaggtatttttttattctaacagtttgtgtaacatttattatgattttacataaatgagcatctaccattcca

SEQ ID NO: 73317 - DNA, 1495 bp, Homo Sapiens
  misc_feature (15)..(15): n is a, c, g, or t
  misc_feature (1073)..(1086): n is a, c, g, or t
taagagcgagcctgngtggcgaattctccacgagggcactctgtggtggtcagccctcagagctgtttctaggcatctcgcagatcagacagcaaagaatctacccagatctgggctgggtggaggtgtggctgggctgggggccattctgagcctgcagtgagagtttggcccagcctcagtccttgctcttctctggctacctctgcagggagctgcaggggcaagcactctctccagcactcaggaagcccggccgagggtacctcctcgtggaaagaatgcactttaaagctctgctgaggagttcggagcccaggctttcaggcgacctctgccctccctgcctctcctcaccctccctctcttcctgcagggcctgggaagggctttgagggagcctgggagccatgtgaagaggggcacgcctgggctgtcccacagtttagatccagttggaggttctccctggctcctgcaggcctgcggggatctctccccacttcaggcctccggccagctgcctgccctcttgtctgtgcttcagccctgcacaaaagcagcttggtgacaccactcagccacccagagtacgtgtttacaggctttccagatcaccttcctgtggggtgaacgtaatgaggcggggctggtccttggaatttcccctggaaaatggtaacagactccatccttgacccggggatgagcatgaaggcattgtcccaaaggcagaggccaccgtggtaggaattccaccaaggccagaagggaaaaaggaagaacccaccgtgtctggctgtgcgggccctggggagggtcgtgagtgcagcccctctctacttccgtgcctttgtaaaacgtgtagataaccgcagtggttggctgagccaagaactctcctaaatcagtggctttctccccaccccttgctggggagtcatttttaaaaaaatctgtgggatataaaattggcctcctgctgcttcagcctacctctccctctgctgacttaatgtcgtgattctgtttcttcagatatttaaggctgttaggttgtgtgagccttgaannnnnnnnnnnnnncccagcgactgtccactgtccaggagatgcatgtctttgtattggagatatttctgttactcattctcttggtgctcacgattgccatggccatagggccacagtgccgtatctgctgcagacatgattgtttcttgttctagaggttttcttgttttcgaatcttgcctgatgaatccagccagaccaaggggcctagatttgacctctgtcctgggctcctgggccaggtgcaggaacatctgaggccactctgctggccacctccagtgggtgctgaccacaggatgggctttgtttacactcattttcaccctgattcttgcccccactttcataaaagaaacttcaaaatgctgacgctttggagagtaagaaaatcaatcttggctgggcacggtgctcctgc

SEQ ID NO: 73318 - DNA, 578 bp, Homo Sapiens
  misc_feature (24)..(24): n is a, c, g, or t
  misc_feature (111)..(151): n is a, c, g, or t
gaaaatctaatgtctgcaatattnttctcctcacaacttggaaacgttcccagttcattttcagtcctgttgtgagcacagttctgaagggtttattattgtcaaaataannnnnnnnnnnnnnnnnnnnnnnnnnnnnnnnnnnnnnnnntcttgacccttaatgctcaggttcttgtgggagttaatcagccacatccaatgttaccttgagggggaagaagagggtgatgctcagaagctaaacaagacaggggccacatgaccctctattgattagccccaagtagaaagtcctgtggttttatgtttaatggtaatagttgatcatatatggcataattttctatcagcttcctactcagtcactataaacacagacttgaaatagtactttaaatgtccaaatacctaaatgtgctaaactggaggtaactatttctaggtagttgaatttttgaaagtcatgatcagccacacaactgttttgtacatacttattttctcatgcacttttctgtatgcaaataaagctataaatttactcatttcaataaactggagtggcagaaaaaaaa

SEQ ID NO: 73319 - DNA, 664 bp, Homo Sapiens
aaacagaagtttgagaaggtaaaaattaagttgtagtatctgagttgttctattttcttcctttggtgtttatgaaggtattcataagaactttaatttcaggggaaaaaatgcctgatttgctatttttgacatttcctcgtctcttaagaagtcagttaaatatgttttcatagtttatattcctgtttcatagattactgtgaaacatgtatttaaacctatgaattataaaatagtatttagattctagcgtgagttaaatagattagtcatatatcttttagatttgtggatttgacatgtaaattatgtgttgtgtataagtaagttagttactaaacatatggcatggttattgataaacttgttgctatttttttccaaatgctatcagtgtttgtggacttttaaaaattagtttgaattttggaatgttctgtgataaaatataatttcaactattttgtacatttaaatatgccatgttgtatatgtctgtatttaaaaatgttgtaaatatctgcattttaagaattatgaaagattttcctcaaaaatgacagaactctccatacttaattgtgacacattataagatatctgattttaagcttttggattttgttctaaaaattaagtttaaacatgctgaaaattccat

SEQ ID NO: 73320 - DNA, 940 bp, Homo Sapiens
gagacactgtaactgcatttctttaattaaacaatccaaagtatctgctgatgatcgttgcaaagttcttattagttctttgcaagattgccttcatggaattgagtccaagtcttatggttctggatcaagacgtgaacgatcaagagagagggaccatagtagatcacgagaaaagagtcgacgtcataaatcccgtagtagagaccgtcatgacgattattacagagagagaagcagagaacgagagaggcaccgggatcgtgaccgagaccgtgaccgagagcgtgaccgagagcgcgaatatcgtcatcgttagaagctgaaggaagaggatcaccttccaagacaaaacagtcttcatgggggaaaaatgacgcttgtccagcagtttgcttcttgtgattgaactgaacctgtaaggattcatggataaaatgaacaggaatagatctgaataaagcaaatctgcataaatggtaaccagtagctctacttttattttttatgttgcttaactgttttatttgaaggaaacctgtgtgatttaaaaagttatagcttttgcaactttattactggttatatacatttggccattatgatgtgcaagcaattggaaaaaaagtcaagtaaatgcttgtttttgtagtagtttgttcttgttaaaaatgtttatatgataatgtctgtaaacagcatcactttgattacaatagatgtagtgttgtaataaactgtttaatggggctgatgtgtaaagctgttcaagttatttgatgtttacacctcagggaaagtcttgtgttcagcaatatctaaagataatgttactatgacaacatttttactgtcctttaaagcattgcaatagcgtttttggcatatgcctcaatctaatcttgcgttcagtgaattaaacatagtaattaagtgacaa

SEQ ID NO: 73321 - DNA, 679 bp, Homo Sapiens
  misc_feature (468)..(526): n is a, c, g, or t
caacctgttgtatacactccacaataaaaataaatggatccacacagtagcaaaatatgtgtacaaaacctaccaggaagaccagggacagacccctaccctccggtcaacatgagacaaggagagggaaggaaggctgagaatggggcaggagcccttgcagcaccagcctgtgtctgcagccctgggtcctgaggtaccactgggggatggaagaactccaaggagagccccagctgggtcctaataccccaggagccttctggcttcttcactttgggcctgcagggtctcgcttgcatacttctggaggagttccattttcttccttcgcaccagtgcctcctcaatctcttgctgcgagggaacagggacgtgagcaatgaacttctgctggctgtcgtcccctcctttctcctggctgccttcctcgtccgactcctcctcggtgactgcatagatgttgannnnnnnnnnnnnnnnnnnnnnnnnnnnnnnnnnnnnnnnnnnnnnnnnnnnnnnnnnntctgctttccacttttccactaactcggctctgagtttcttttcatattcctgttccaaaggcacaataacaccatcatcttcatctaggtaaccatagtactcaaaatcgattgccttcatgagctcagcacgtgtctttctgggaggagga

SEQ ID NO: 73322 - DNA, 1245 bp, Homo Sapiens
  misc_feature (730)..(768): n is a, c, g, or t
gctggtaccggtccggaattcccgggatatcgtcgacccacgcgtccggttcctgtgagcgtcggcgtcttctgggcctgtggagtttcttggacaggggccgcggggctccaggacggcgcccttagcgacaccatggcccgaaatgcagaaaaggccatgacggccttagcaagatttcgccaggctcagctggaagagggaaaagtgaaggaacgaagaccctttctggcctcagaatgtactgaactgcctaaagctgagaagtggagacgacagatcattggagagatctctaaaaaagtggctcagattcagaatgctggtttaggtgaatttcgaattcgtgacctgaatgatgaaattaacaagctgctaagggagaaaggacactgggaggtccggataaaggagctgggaggtcctgattatggaaaagttggccctaaaatgctggatcatgaaggaaaagaagtcccaggaaaccgaggttacaagtactttggagcagcaaaagatttgcctggtgttagagagctgtttgaaaaagaacctcttcctcctcccagaaagacacgtgctgagctcatgaaggcaatcgattttgagtactatggttacctagatgaagatgatggtgttattgtgcctttggaacaggaatatgaaaagaaactcagagccgagttagtggaaaagtggaaagcagagagagaggctcggctggcannnnnnnnnnnnnnnnnnnnnnnnnnnnnnnnnnnnnnnatcaacatctatgcagtcaccgaggaggagtcggacgaggaaggcagccaggagaaaggaggggacgacagccagcagaagttcattgctcacgtccctgttccctcgcagcaagagattgaggaggcactggtgcgaaggaagaaaatggaactcctccagaagtatgcaagcgagaccctgcaggcccaaagtgaagaagccagaaggctcctggggtattaggacccagctggggctctccttggagttcttccatcccccagtggtacctcaggacccagggctgcagacacaggctggtgctgcaagggctcctgccccattctcagccttccttccctctccttgtctcatgttgaccggagggtaggggtctgtccctggtcttcctggtaggttttgtacacatattttgctactgtgtggatccatttatttttattgtggagtgtatacaacaggttgcgaactggc

SEQ ID NO: 73323 - DNA, 1528 bp, Homo Sapiens
ggaccggtccggaattcccgggatatcgggagcgggagcgggagcgagctggcggcgccgtcgggcgccgggccgggccatggagctgtggccgtgtctggccgcggcgctgctgttgctgctgctgctggtgcagctgagccgcgcggccgagttctacgccaaggtcgccctgtactgcgcgctgtgcttcacggtgtccgccgtggcctcgctcgtctgcctgctgcgccacggcggccggacggtggagaacatgagcatcatcggctggttcgtgcgaagcttcaagtacttttacgggctccgcttcgaggtgcgggacccgcgcaggctgcaggaggcccgtccctgtgtcatcgtctccaaccaccagagcatcctggacatgatgggcctcatggaggtccttccggagcgctgcgtgcagatcgccaagcgggagctgctcttcctggggcccgtgggcctcatcatgtacctcgggggcgtcttcttcatcaaccggcagcgctctagcactgccatgacagtgatggccgacctgggcgagcgcatggtcagggagaacctcaaagtgtggatctatcccgagggtactcgcaacgacaatggggacctgctgccttttaagaagggcgccttctacctggcagtccaggcacaggtgcccatcgtcccccgtggtgtactcttccttctcctccttctacaacaccaagaagaagttcttcacttcaggaacagtcacagtgcaaggtgctggaagccatccccaccagcggcctcactgcggcggacgtccctgcgctcgtggacacctgccaccgggccatgaggaccaccttcctccacatctccaagaccccccaggagaacggggccactgcggggtctggcgtgcagccggcccagtagcccagaccacggcagggcatgacctggggagggcaggtggaagccgatggctggaggatgggcagagggactcctcccggcttccaaataccactctgtccggctcccccagctctcactcagcccgggaagcaggaagccccttctgtcactggtctcagacacaggcccctggtgtcccctgcagggggctcagctggaccctccccgggctcgagggcagggactcgcgcccacggcacctctgggagctgggatgataaagatgaggcttgcggctgtggcccgctggtgggctgagccacaaggcccccgatggcccaggagcagatgggaggaccccgaggccagacgcacactgtccgagccctctgctcagccgcctgggacccaccagggtgcagctgggctccagggtccagcccacaagctgcatcagggtctctgggagaggaggggcctggagggccaggagtcccagactcacgcaccctgggccacagggagccgggaatcggggcctgctgctcctgctggcctggaagactctgtggggtcagcactgtactccgttgctgtttttttataaacacactcttggaagtggcaa

SEQ ID NO: 73324 - DNA, 1169 bp, Homo Sapiens
  misc_feature (364)..(382): n is a, c, g, or t
  misc_feature (424)..(998): n is a, c, g, or t
  misc_feature (1010)..(1010): n is a, c, g, or t
  misc_feature (1052)..(1052): n is a, c, g, or t
  misc_feature (1143)..(1143): n is a, c, g, or t
gccttgttttctttttagattttgtacattccatctttataggtctgtttcatatgttttatgtatagaacactaagtcttgcactctctgacattgatactgatatattctcgtcatttgttcttttatgaatcaaaatgttgactgcctatttaaagaaaagaatgaacgctgtgcatcaaagtgtttgtatgttcgtagctacatacgtaccacagtattttggatgctttagtctacaatgaaactttcaattaattctgtcttgaaacataggagaaacaggattcatgtgtatctctttaccatgcacaaaatctcaaatcattataataaagcttgttttctccatttgcagagtgnnnnnnnnnnnnnnnnnnngcctacagccgcggccgctccaaccctcgtgccgaattcttnnnnnnnnnnnnnnnnnnnnnnnnnnnnnnnnnnnnnnnnnnnnnnnnnnnnnnnnnnnnnnnnnnnnnnnnnnnnnnnnnnnnnnnnnnnnnnnnnnnnnnnnnnnnnnnnnnnnnnnnnnnnnnnnnnnnnnnnnnnnnnnnnnnnnnnnnnnnnnnnnnnnnnnnnnnnnnnnnnnnnnnnnnnnnnnnnnnnnnnnnnnnnnnnnnnnnnnnnnnnnnnnnnnnnnnnnnnnnnnnnnnnnnnnnnnnnnnnnnnnnnnnnnnnnnnnnnnnnnnnnnnnnnnnnnnnnnnnnnnnnnnnnnnnnnnnnnnnnnnnnnnnnnnnnnnnnnnnnnnnnnnnnnnnnnnnnnnnnnnnnnnnnnnnnnnnnnnnnnnnnnnnnnnnnnnnnnnnnnnnnnnnnnnnnnnnnnnnnnnnnnnnnnnnnnnnnnnnnnnnnnnnnnnnnnnnnnnnnnnnnnnnnnnnnnnnnnnnnnnnnnnnnnnnnnnnnnnnnnnnnnnnnnnnnnnnnnnnnnnnnnnnnnnnnnnnnnnnnnnnnnnnnnnnnnnnnnnnnnnnnnnnnnnnnnnnnnntgtttcgacctngcgcttacggatactgtccgccttctccttcgggaacgtggngctctcaagctcacgctgtagatccatttcggtgtagtcttcgccagctgggtgttgcacaccccgtaagccgacgctggcttatcggtantacgtctgatcaccggtagaccattg

SEQ ID NO: 73325 - DNA, 2789 bp, Homo Sapiens
  misc_feature (2632)..(2634): n is a, c, g, or t
tgcggccgcgggagcttcccgggcctggccgtggaaccaggcagcaacctggacatggaagatgaggaggaggaagagctgaccatggagatgtttgggaacagctccatcaagtttgagctggacatcgagcccaaggtgttcaagccgccgagtagcacagaggccctgaatgacagccaggagttccccttccccgagacgcccaccaaagtgtggccgcaggacgagtacatcgtggagtactcactagagtatggcttccttcgcctgtcgcaggccacccgccagcgcctgagcatccccgtcatggtggtcaccctggaccccacgcgggaccagtgcttcggggaccgcttcagccgcctgctgctggatgagttcctgggctacgatgacatcctcatgtccagcgtgaagggcctggccgagaacgaggagaacaagggcttcctgcggaatgtggtgtcgggcgagcactaccgctttgtgagcatgtggatggcgcggacgtcctacctggccgccttcgccatcatggtcatcttcacgctgagcgtgtccatgctgctgcggtactcacaccaccagatcttcgtcttcatcgtggacctgctgcagatgctggagatgaacatggccatcgccttccccgcagcgcccctgctgaccgtcatcctggccctcgtcgggatggaggccatcatgtcggagttcttcaacgacaccaccaccgccttctacatcatcctcatcgtgtggctcgcggaccagtatgacgccatctgctgccacaccagcaccagcaagcggcattggctgcggttcttctatctctaccacttcgccttctatgcctatcactaccgcttcaatgggcagtatagcagcctggccctggtcacctcctggctcttcatccagcattccatgatctacttcttccaccactacgagctgcctgccattcctgcagcaagtccgcatcccaggagatgctgcttcagcgcgccgccactgggccccgggacccccacggcgctgcccgatgacatgaacaacaactcgggcgccccggctacagcccctgactctgccggccagccccccgccctgggccccgtctcgcccggggccagcgggagtcccgggcctgtggcagcggcgcccagctccctggtggccgcggcagcctcagtggcagcagctgccggtggtgacctgggttggatggcagagaccgctgccatcatcacagacgcctccttcctgtccggcctgagcgcctccctcctggagcggcgtccagccagcccgctgggccctgctgggggcctcccccacgccccccaggacagtgtccccccgagtgactccgcagcttctgacacaactcccctgggggctgcggtaggcgggcctagcccggcctccatggccccaacggaggcgccctcggaggtggggtcctgagccgcacagctgagccgcctctgacccctgctggctgggcctgaccttcccgagcccgtgggggtgggggaggccagccacctccttcctctgggactgcccagcctgtgtcgggggctttcagggtttcgtggggtttgcccggaaggcggctttcctccccctggtgtgaggtcgcgcccgaggcttgtacccgctagtgaggtgtttgagctggtcagcaaggagagggggtggggttccgcggaaggttctggaggggtcttggtaggtctgcagtgaaccgtcctgaggatggagtggggtcccatggtgcaggtctctgaacaaggcggaggtgtggaggagaggccggcttggggtggggcctcgcgccctagtgccggccggcctcagcccggctctgcctggtgctccctgcagtgccttctccatggccccgccctccccgcgtgtgcgccaggcctggggtccccgggagagcagagcttgcgcctcgggcatagggacgtggggtgcaggcgccaacatcagtggcagcagccagggccgtggtccagtcccactcggggatggagtgggccggcggccaaaccagtcactcggggaggaatgcggaggagcgctcattccattctatttaattgcagtgtacaaaattgtgtttgtatatagaataaactgtctgttgacagcggctcactgcgctgtgtgtgtgtcttgagcccaaacggcccggctgccgcctcattcctggctccccggtcggccagagtgtggtggggcctccgcgggggccgctctggcctgaagcaagcgccgaggccggtgacgtgcgctgtccccgagctgtgccaggagctggccgcgccgcaccagggcctggcggagccgctcacgcgcgacttcgatgcggcgctccagctcctgcagctccccgggctggggggcccccgtgggccttgcggcgggcgggcggccgtaggagcacagccagacggggccctctcgcggcgcagcctccgcctccgcgtccgcttcgggtgccacaaccacggcgggctccagcaggaagcgcacgcggcgctccttgtccacggcccggcgcgcccgtttccagccctccggagccgttggctggtcctgctgctgctgctgnnnctccacctcggggccgctgggctccgcctctgccgtctcctccttcgacccctctggtggctccgtgttgagggcgcggtggattttctggctggtgtgcagccagtactgcagcctgctccccttgcggatgcgcggcagcgccaggcggaaga

SEQ ID NO: 73326 - DNA, 1897 bp, Homo Sapiens
  misc_feature (543)..(543): n is a, c, g, or t
  misc_feature (1116)..(1174): n is a, c, g, or t
  misc_feature (1231)..(1271): n is a, c, g, or t
  misc_feature (1282)..(1292): n is a, c, g, or t
  misc_feature (1378)..(1435): n is a, c, g, or t
  misc_feature (1634)..(1667): n is a, c, g, or t
  misc_feature (1698)..(1760): n is a, c, g, or t
  misc_feature (1783)..(1808): n is a, c, g, or t
gcggccgcgggagcttcccgggcctggccgtggaaccaggcagcaacctggacatggaagatgaggaggaggaagagctgaccatggagatgtttgggaacagctccatcaagtttgagctggacatcgagcccaaggtgttcaagccgccgagtagcacagaggccctgaatgacagccaggagttccccttccccgagacgcccaccaaagtgtggccgcaggacgagtacatcgtggagtactcactagagtatggcttccttcgcctgtcgcaggccacccgccagcgcctgagcatccccgtcatggtggtcaccctgggtgagtctgagctgctgggcttggggagctccatggcggggcctcccctcctccctcgggtctcctcctgctggtgcggggccgggggctgtgcaggaagcactggggtctgccccgccccaagcacgcttcccagggctggggtcctggatgggtttcctaagaatgggcagggccaggaagcaggccaggcctcagcaatggagccagctggggcangggcccagggggtggcctgggcggggctccccgctacctgattcacccacccgcagactccacgcgggaccagtgcttcggggaccgcttcagccgactgctgctggacgagttctctgggctacgatgacatcctcatgcccagcgtgaaacggccggccgagaaacaagagaacaagggctctcccgcgcaatgtggtgtcccgccagtcttaccgctttgcgacgatcgcggatggtccgtatgtcctcttcgtcttccctcttcatcctggccattcttcccgtctgatcctggtccctgtttgccgcgtttactctcacccatcctatattacattcttcacttacggcaccatgcctacattacggctgactgaatcaaccctatgagtaccttccgcccccgcccttatacgacaacgttctccctggacttgtacattgcgctaatcccatcgtggcctcctttgctttccgttgcacctgttcccgttcccctatttatttgacccccgcgttacgctcccatttttatgtgccctccctctcttatattcctcacccttccgnnnnnnnnnnnnnnnnnnnnnnnnnnnnnnnnnnnnnnnnnnnnnnnnnnnnnnnnnnngtccgctcatctgagcgtcatgatctctccacacacctaacaacgctcttttttgannnnnnnnnnnnnnnnnnnnnnnnnnnnnnnnnnnnnnnnnaccacctttgnnnnnnnnnnnccccacccccccgccactcgccattctttataccaaccacatggtgtgagtgatgtttccaatcccaccaccgcttgaaccaaccnnnnnnnnnnnnnnnnnnnnnnnnnnnnnnnnnnnnnnnnnnnnnnnnnnnnnnnnnntgtcgtgtaacaccgcattttttgttgtcccacacccccccctccttttttctccttcttcttcccacttgttcctacaaattgcgtcaaccaactcctccttttttccaagcttcctttgtccacctcctttgtgtcatagcctctctttttccaccccacacttgcgagcagacggacaacacctttatttgtatcnnnnnnnnnnnnnnnnnnnnnnnnnnnnnnnnnnacttcgtagtgccccgctacgacggttcctnnnnnnnnnnnnnnnnnnnnnnnnnnnnnnnnnnnnnnnnnnnnnnnnnnnnnnnnnnnnnnnccgtttttccatccacttttccnnnnnnnnnnnnnnnnnnnnnnnnnngtacgtactcaataccgtttttttcttgacgcgacgccccccttcttctttttccccaccccgtcgaacaacaccattaaaacatataa

SEQ ID NO: 73327 - DNA, 1676 bp, Homo Sapiens
  misc_feature (160)..(266): n is a, c, g, or t
gtgccatcttactttaagggtttttcttgatgatcccatctggacaaggcaggagttgccctaggtgagtcacagagccctaggattcctcacggaaatctccagggtgcatggactaggaccctggaggcagaaatagttaccgaggggaagttacagnnnnnnnnnnnnnnnnnnnnnnnnnnnnnnnnnnnnnnnnnnnnnnnnnnnnnnnnnnnnnnnnnnnnnnnnnnnnnnnnnnnnnnnnnnnnnnnnnnnnnnnnnnnctagaacactcctctcagggatcatatccacaagtgctcgtgctgtgcgaggatctcactggttgtttattgaaaggctaagcaagtaggttgaggtccctgggaagcaggggtggatcctgtgtcaccagggctgccccttaccctaaaccttggccccgacaacccaaccacctgcccagacagtgctgatctgggacgatgccctgggagggcaaggactccaaggagaacgctggtgctggagttcaccttcaccaagccagtgcttactgtgcgcatgcgccatgacaacgatcgtgatcgtgctgaagaaccgcatctatgtgtactccttccccgacaatccccgaaagctgttgagtttgatacccgggacaaccccaaggggctctgtgacctctgccccagcctggagaagcaactgctagtgttcccgggacacaagtgtgggagtctgcaacttgtggacctggcgagcacaaagcctggcacctcgtctgctccattcacgatcaatgcacatcagagtgacatagcctgtgtgtctctaaaccagccaggcactgtagtggcctcagcctcccagaagggtacccttattcgcctctttgacacacaatccaaggagaaactggtggagctgcgccgaggcactgaccctgccaccctctactgcattaacttcagccacgactcctccttcctctgcgcttccagtgataagggtactgtccatatctttgctctcaaggatacccgcctcaaccgccgctccgcgctggctcgcgtgggcaaggtggggcctatgattgggcagtacgtggactctcagtggagcctggcgagcttcactgtgcctgctgagtcagcttgcatctgcgccttcggtcgcaatacttccaagaacgtcaactctgtcattgccatctgcgtagatgggaccttccacaaatatgtcttcactcctgatggaaactgcaacagagaggctttcgacgtgtaccttgacatctgtgatgatgatgacttttaaggaccctgggggctgtgctagggacctgcagtggcagaactgcagagctgagccttggcagtggggcgtgcttggaagccaccagccagcaagcattaatggggctggtgcccactttccactcagcagagctatgtctaaataaagagctcacttccccccagcacttcttgatgactgtgtgccccaagggccaggccagagacccaggaaggcagcgaccccttgggatccctaacctggaggaaattgccagggacccagagggagtgccctaatccaacctggggattttttaaaagcttcctaggaagagatgatctccgatgtgatgaatacgaataaaaggcccttaatggcatttacggcttgaa

SEQ ID NO: 73328 - DNA, 1026 bp, Homo Sapiens
  misc_feature (882)..(882): n is a, c, g, or t
  misc_feature (968)..(968): n is a, c, g, or t
  misc_feature (971)..(973): n is a, c, g, or t
ggctaggtagcgaggctgggtgtgaattcggcacgaggagggcctgatgtaaacacccgagccgggctccaaggcccgggaggtcagaaaaccgggccgcgggcggcaccgacagctggggcccgggtcagggacacgcggaggtcaggccggtgaaggcggcaggaagctggagcacgatcccaggaggaacaatcctgcaccatgactcaacagccacttcgaggagtgaccagcctgcgtttcaaccaagaccaaagctgcttttgctgcgccatggagacaggtgtgcgcatctacaacgtggagcccttgatggagaaggggcatctggaccacgagcaggtgggcagcatgggcttggtggagatgctgcaccgctccaaccttctggccttggtgggcggtggtagtagtcccaagttctcagagatctcagtgctgatctgggacgatgcccgggagggcaaggactccaaggagaagctggtgctggagttcaccttcaccaagccagtgctttctgtgcgcatgcgccatgacaagatcgtgatcgtgctgaagaaccgcatctatgtgtactccttccccgacaatccccgaaagctgtttgagtttgatacccgggacaaccccaaggggctctgtgacctctgccccagcctggagaagcaactgctagtgttcccgggacacaagtgtgggagtctgcaacttgtggacctggcgagcacaaagcctggcacctcgtctgctccattcacgatcaatgcacatcagagtgacatagcctgtgtgtctctaaaccagccaggcactgtagtggcctcagccctcccagaaggggaccctttattcgcctctttgacacacaatcaaggnagaacctgggtggagctgcgccgaggcactgaccctgccaccctctactgcattaacttcagccacgactcctccttctctggctntcnnnggggaaaaggggactggtcatatcttttgctctcaaggatacccgcctcaacg

SEQ ID NO: 73329 - DNA, 1052 bp, Homo Sapiens
  misc_feature (875)..(875): n is a, c, g, or t
aaatccaactaagccctttagaaagtactccagactacatgaggaggaagtgcaggagaactgacttcctattgtgccttgcataaaacattttgctaaaattaaaagcagctccaagtgcaaaagtaaatatttgtgcaaaaaggcacactgccaggtgcaatcttaaaacatcgtcaacttactcattttatagtgtttgactcttttaaataccagtcttttaaattatgaaacctagcaagtaaggggaaggaagttcacatcagaaaatacactttagaaaaggtacaagacattttgctggcaatttgctacttatttcataacatagatcaagtaagtgtttgttaaatattcacagtaatttcagagagaaacatatctccaaaacttcaacctattgcatttttaactatttttctgtacaatttataaaacatctgtcagtgtttttctgaataattccttcttgtcagtccttccctctctggatccagttataccttcaaggtgggttgtaggattcctttctcaatgagatgagtcttcagggttttatatatatttaactgctgttcaggttgaagcaccaacaactgctgtagcactttgctgggatttgggccccttataaaacttgtgatgtacacatgtacaaaagttgccatcaaatactgacaatcaaatctgtccattatcccaccatgtccaggaatggtatttgcaaaatccttgattttgaaggctcttttgaatccactagcaaagaagcctccaaatgggccaattaaagatgcaaagggtgacagtgcaatgctgtggatctggaaagggtacaagctcactctttcctgtctcaagactgcctttanaaagggtggaagtgagtaagtctgaagctggaaaagttctgagggctcacattctgtcacgaaggagtttacatcacttcggtattccactgggcagacaagtactggtatttggatacacataggcagcaatgaatccaacacaactgtggaaaagaaccacaatgaatccttcca

SEQ ID NO: 73330 - DNA, 1462 bp, Homo Sapiens
  misc_feature (532)..(547): n is a, c, g, or t
aaatccaactaagccctttagaaagtactccagactacatgagagggaaggactgacaagaaggaattattcagaaaaacactgacagatgttttataaattgtacagaaaaatagttaaaaatgcaataggttgaagttttggagatatgtttctctctgaaattactgtgaatatttaacaaacacttacttgatctatgttatgaaataagtagcaaattgccagcaaaatgtcttgtaccttttctaaagtgtattttctgatgtgaacttccttccccttacttgctaggtttcataatttaaaagactggtatttaaaagagtcaaacactataaaatgagtaagttgacgatgttttaagattgcacctggcagtgtgcctttttgcacaaatatttacttttgcacttggagctgcttttaattttagcaaaatgttttatgcaaggcacaataggaagtcagttctcctgcacttcctcctcatgtagtctggagtactttctaaagggcttagttggatttnnnnnnnnnnnnnnnngattgtctacttttcaaagaagtaaccatttgccaggggaaaacattctgcttttaggtagtttcaaaattcaggggagggagcctgaaatttttgccatgattggtttgttagaaagagcaggcatcagactacttctgataaaattgtttggaaggtcacgacctcgcaaaaacttttcaagagcaacaaggaagaattctgctgtgaagaacacagtgtacggatcctccgcatattatctcaacagaggacagtagctcaggaggcagcttcaaacggtgacctgtggcctgggccatctcttcgtcatgtgcttcacttttccctgtttccctgtgaactggcttccatggttctgtagggtagtgagtcggggttgtggctgcagcagagcaggagatgcttgcccgagtgggagcaacccacccccgtgtccccaatgcctcactcctggcttctagtgcagccctttgtagactcacctcgcaagaaggaagatctgcctggagacctgatcccagtccagctttttgaccataggtcatctttgtccccttgctcctttgcatcatgtcataaaatttgaggatatcagctgattattttttcttccaagaatgaaaatcaagcagaattgattcctacacgaaaaaaaagcacacgaatgccaaacctttcctttggtggactggacactaaccagatgagagtaaatttcttatccgtggacgtatgtaagctactgctgctgtgtgctctccacagccatatttattgtattaaacaatcagcactaaaccttcaaaaattgcccagtgttcctagttaaatgttcagaggggagaaatagatatattttaaataatgttttgctaatgaaaagagtaaatatttttgtttaaatcagcaaaa

SEQ ID NO: 73331 - DNA, 775 bp, Homo Sapiens
  misc_feature (67)..(76): n is a, c, g, or t
tgcggccgccaaccttttaatatgcagataataccccccaacttttttagagacagcctgtctcttnnnnnnnnnnttaatttggtagtgagagcttgtgtcactgccactctgttttatccctgaaattaaaggataacataaggaggacttgggcctttctgacatcatcctgaagagacaggactttgcgtttttcctctgggacctacagtgatgagaatttaatgattatctcctccactataatcctctttagggtgattttttaaatcaaaacccagtgaatctcattactcctaagaaacgaaagattccttcaaagccttttcaggcacatggtttcaacaaagcctggctttgacattccttgtcctgaggagcactttccaggcatagttacagcttccccactgtatttacaagccagaattgtgcaactcttctggatcattaataaagtagcaagatcctcaaaaaacccaaaaacaccattctctaatagtcatgacaaatggcttcagtatggcttgttttttattttccagatggctttttctcttattttttgaagccccagtctttgattttacaggtaactttcaaaacatcatgatgctgccaaatgtacttttgtaaacttaaacattatgattcctgtattatttcagtgagagctacagtgtgatatttcagagtctattaaataaaaatgtgagtttgaattacaccatctgtgccaattacaaagcaattaaaagatttattttttatg

SEQ ID NO: 73332 - DNA, 691 bp, Homo Sapiens
  misc_feature (628)..(644): n is a, c, g, or t
attgtgcctctatttttaccattttggtaaacgtcaggatagagataccacatgtggcaagccaaagatctatgcctctgttttttcaatgagagagaaatagcaaatgttctttctatgctttcctcaccatcatcacagtgtttacaaacttttgaaaatatttagtctgttacaaacttctgtcatgtagctgaccaaaatcctgcagggccacagtcggcactgttatttgcttcttttaatcagcaaaggcctcaagtcttaaaataaaaggggagaagaacaaactagctgtcaagtcaaggactggctttcaccttgccctggtgtctttttccagatttcagtatattctctgatggcctgacaggcctattaagtagatgtgatattttctcccaagatgacctccattctcggcagacctaagagttgcctctgagttagctctttggaatcgtgaacacaggtgtgctatattgtccttgtcctaactgtcacttgccatggcctgaatgttggcttaactgaatattgtatgaaaagacatgcctccatatgtgcctttctgttagctttctctgactcaagctgtggggctcctctatacatgctatacatgtannnnnnnnnnnnnnnnnttttgcaagtgaacaataaaacattaaaagatgctgtttccctatta

SEQ ID NO: 73333 - DNA, 1674 bp, Homo Sapiens
  misc_feature (1139)..(1188): n is a, c, g, or t
agtgtttcagagatttttattaataattacacctaaaactactctttcttacaaattttcatagtacattctgtggaaatcaatttcttcacatttaattcttataatctacctatacaatgaaatttataaaaatataaaggataacacatctaaaaccagtttcagagaagtatatattttgtacataaagtagacaaacttatttaaagaaatcatgaattgcaataccataaaagtcctgataaactgaatgtaactttatcttcacagtaatgcaaacatttatattaattttacagttttggaattctcattcttagttttaaaatctgcaagtataaaaactgcctcttattattatgaggtcttaaaaatccaatttttaaaacaacaatataattaatataagaaactgttagaaaaacagttcttacattcattagaatcataccttctttgttttggggtacttggtaggacatttattaagtgctggaacttcagtttcagtaattatttctgctagtgcagtttcagtttctggttctattgtaagtacagtattttcaatatcattttgttgtgaagtaacttctatatcaggagaagatggctggatatctgaacacatgctgacagttctgtgtctccgacgctgctgtccaatgtgagtcctactccgagaaaaactttttctctgtttagttctatttactttggcaggggttggcttgctagcattttcttcttttgcttggttcctgaataacttcagcatcactgacaatctgtgtatctttacattcagttttaacttcagttttggctgtgctgatccttttccaaagcttgttctcttcttttctctctcttttcaagtctggcaaaagctagcaaaatggcttccatttttctttcttctcgttgtcatcttcctgtttccttgtctgcaatctgctcctctgattccatttctacttcattactaataggagttttttcttctatatcatcaataaaatctggttcctgattatttgatactgatagtctcagtggagaaagctttctttgtttagtttctgggctcttcattttgttggtcgttccttcacaatccaaagtaatattctgannnnnnnnnnnnnnnnnnnnnnnnnnnnnnnnnnnnnnnnnnnnnnnnnnccgtctggtctcataaccactattgatattttccatggattcagaactacgttttagaacagggcactctgggttttctttgaggcatgcacagtccaccttgtacttacaatttccatagtcaaaatcaaaggcaatagtaatttcagttccctttggaatactgtgtatagaataaatataaagatgtatggttccatcttgaatttcatgcctcacctctgcattgggtgtacaagaccgcctgatgaatcgagcctcattcccaaaagtccttgcatcaacacacatttctagcccatgaaatttagagtagaataacacaaaagggtatggtcttttaaagaaatacccatttgcttcaaactgttctctcagcataaacttccctctgtattcaatgataagtgcatcaggaggcaaatcttttgcagatttaagaattttcttattcttttgtatatggctctctacaggaggtttgaa

SEQ ID NO: 73334 - DNA, 1053 bp, Homo Sapiens
  misc_feature (595)..(595): n is a, c, g, or t
  misc_feature (627)..(627): n is a, c, g, or t
  misc_feature (636)..(652): n is a, c, g, or t
  misc_feature (683)..(861): n is a, c, g, or t
  misc_feature (887)..(887): n is a, c, g, or t
ctgaaaggaatggtgaagtaaatctaatataatgcttaggagtggagtatacatgggggctgtaagtgagacctggtaaagaattgagttgtgtagctaacacttcaggatctgtagttatgcgtagaggcctttctgaaaggccatctgaaggttttcctgtcttctcattcttctcacttaaccattcattaaccaagtgcttctttgttttggggtacttggtaggacatttattaagtgctggaacttcagtttcagtaattatttctgctagtgcagtttcagtttctggttctattgtaagtacagtattttcaatatcattttgttgtgaagtaacttctatatcaggagaagatggctggatatctgaacacatgctgacagttctgtgtctccgacgctgctgtccaatgtgagtcctactccgagaaaaactttttctctgtttagttctatttactttggcaggggttggcttgctagcattttcttcttttgcttgttcctgaataacttcagcatcactgacaatctgtgtatctttacattcagttttaacttcagttttggctgtgctgatcctttccanagcttgttctcttcttttctctctcttttcangtctggcannnnnnnnnnnnnnnnngcctacagccgcgcctcgtgccgaattcttnnnnnnnnnnnnnnnnnnnnnnnnnnnnnnnnnnnnnnnnnnnnnnnnnnnnnnnnnnnnnnnnnnnnnnnnnnnnnnnnnnnnnnnnnnnnnnnnnnnnnnnnnnnnnnnnnnnnnnnnnnnnnnnnnnnnnnnnnnnnnnnnnnnnnnnnnnnnnnnnnnnnnnnnnnnnnnnnnnnttttcagtcgggaaactgtcgtgcanctgcattatgatcggcaacgccggggaagggcgttgcgtattggcgctctcgcttctcgtcatgaccgctgcgccggtcttccgtgcgggaacgtacactcatcaaggcgtaacggtaccaagatcggggaaagaggagacagtgacaaagcacaaagcagacgta

SEQ ID NO: 73335 - DNA, 1578 bp, Homo Sapiens
tttgctcttctggactaagtgttgattcatcaacatcaaccaatagtttatcaaagtattgaatatcatcaggttttaaaaatggaagatttccagatggctggtcattaacacttttcatagttcgatcttcagtttgcatgtggaaaccagtcataccacccaaaggtgttggagtagctgtcagctttcgagctggagttcgaataggaacataaccagctggaggaggaagtaccttatatccttctgggaacatagcatctaattcctcatcagaaagtgggcgatttctctcatcaatttctctttcccaccgccaagcctgaagctgttcaggagtcatactcattatgtgacctggagtaggggtagccatgttcatggctggtgtgccaattggtgtctttccaggggtcagaactggagtgcttccacccatctgactagctggtgtttcatcccaccgtgattttcttttactggctccaggagtcggtgtttcaccaatagaatctccacctcgatctgttcgaggagtctcagcccatccacttccatgcccaggagtatctctctctgttttgggggtttcatcccatctgtttttacgagcactggaagttgcgcctccatggcctggtgtcgcatggcctggtgtatcacctcgtccaggagtagcagctcccgctggtgtgtggctaggtgtaggatcccatatttttgagcctggggttgctccaggagtctcgcttccctttgcacgacctggtgtctcatcccatcttaaggaaggagtatgcccaggggtctctgcctgatcccaacttgatagttttttgggagtggcaccaggagtctgatcagctgtttgatcccaacgccgttttcgttttgatggaggctgggacgctgctgctccattgacgacttttagttctccagctttagctttttctgctagctgttgcctaatttctcgttcttctttagtcaagtgttgttctcgcattacatccatgtaagtcctagcattcattttaggatcaggggtcttccctcctgcagaaaagaacagcaacaggaaaaagagtacaataaataaaaaataagcaggttcaactgatttatctgccctgctctaaatattatgttattccataatcatttaaattattttttgatggaaaactttaataattatacatcttactttttattgagtttgctgatcaatttaacctgtttgaacacaaacatctacagcagtttaaaacaaatattttaatgcatataaaaacaaaatgacagcacagtttagagtcctcaggaagtgatgggttcctgggttgctaatccggaatacgtacactttcgtgcctttatctccatcagcagttctgacttcaagcagcagaatagatgcggtcatattcttcttgggcttctggttcttccagccctcatggttggcatcacatatgcctgcatgccattaacaccagctggccctacccctataatgatcctgtgtcctaaattaatatacaccagtggttcctcctccctgttaaagac

SEQ ID NO: 73336 - DNA, 565 bp, Homo Sapiens
ccagcagtggtcttgttcttactccttttggttgaacaagcagcggccctgggagagcctcagctctgctatatcctggatgccatcctgtttctgtatggaattgtcctcaccctcctctactgtcgactgaagatccaagtgcgaaaggcagctataaccagctatgagaaatcagatggtgtttacacgggcctgagcaccaggaaccaggagacttacgagactctgaagcatgagaaaccaccacagtagctttagaatagatgcggtcatattcttctttggcttctggttcttccagccctcatggttggcatcacatatgcctgcatgccattaacaccagctggccctacccctataatgatcctgtgtcctaaattaatatacaccagtggttcctcctccctgttaaagactaatgctcagatgctgtttacggatatttatattctagtctcactctcttgtcccacccttcttctcttccccattcccaactccagctaaaatatgggaagggagaacccccaataaaactgccatggactggactctaaaa

SEQ ID NO: 73337 - DNA, 821 bp, Homo Sapiens
  misc_feature (581)..(581): n is a, c, g, or t
  misc_feature (684)..(684): n is a, c, g, or t
  misc_feature (723)..(723): n is a, c, g, or t
cggtccggaattcccgggatgtgttcgagtggacaaaatggcgaagatcgccaagactcacgaagatattgaagcacagattcgagaaattcaaggcaagaaggcagctcttgatgaagctcaaggagtgggcctcgattctacaggttattatgaccaggaaatttatggtggaagtgacagcagatttgctggatacgtgacatcaattgctgcaactgaacttgaagatgatgacgatgactattcatcatctacgagtttgcttggtcagaagaagccaggatatcatgcccctgtggcattgcttaatgatataccacagtcaacagaacagtatgatccatttgctgagcacagacctccaaagattgcagaccgggaagatgaatacaaaaagcataggcggaccatgataatttccccagagcgtcttgatccttttgcagatggagggaaaacccctgatcctaaaatgaatgctaggacttacatggatgtaatgcgagaacaacacttgactaaagaagaacgagaaattaggcaacagctagcagaaaaagctaaagctggagaactanaagtcgtcaatggagcagcagcgtcccagcctccatcaaaacgaaaacggcgttgggatcaaacagctgatcagactcctggtgccactcccaaaaaactatncagttgggatcaggcagagacccctgggcatactccttnccttaagatgggatgagacaccggttcgtgcaaaggggaaccgagacttctggaagcaaccccaggctccaaaatatggggatcctacacctagccac

SEQ ID NO: 73338 - DNA, 497 bp, Homo Sapiens
gttttctgttctttgttgtggctcttgttttcatttttgttgtacgtgtagatctgtaaataaaattgcagtatttaaagcttaagctttcaggaaaaagaaaataagaattcagtgtgtgcatgacaactcgtgtgtatgagaaggagggatatgaaggaagatggcttgcagagtaagtcgggtggcaattgtcagggtgtgggaatttcttttcctacggggtacgtgattttgtaaaaaggaagtatttctcccaaaattgggagtaggcaaactactaatcagtttagctttgtgttgtatgctagtttaaaaaagaaaatatgtaatataatgtaccccaaaacacccaaaagcttttatgatggattttgtaaatagatttcttacagggtgacctgttctctagctgtgatcttaccacttcaaatgggtgtaatttgaataaattttgtatggtaaaggatcaataaaatgattttttttaagaaaaa

SEQ ID NO: 73339 - DNA, 1586 bp, Homo Sapiens
  misc_feature (539)..(597): n is a, c, g, or t
  misc_feature (1356)..(1369): n is a, c, g, or t
atttggtgggagaatatcccaagagcccttagtttcatgggctccgggggatttcccttggggaaaacaggctttaggaccacggttttcagcttacccttactgggggcccccggggcccccaaagagaaatggttttagaaaaaagctttttcgaggggccggagggcggggccgaaaaggggaaagttgtggtattaggtgtgcgtggccggtttggcattaatatgtacataattttcttttttaaaactaggcataccaccacaaaagttaaactgattaggtagtttgccttcttcccaattttggggagaaatacttcctttttacaaaatcaggtacccggtaggaaaagaaattcccacaccctgacaattgccacccgacttactctgcaagccatcttccttcatatccctcgttctcatacacacgagttgtcatgcacacagtgaattcttattttctttttcctgaaagcttaagctttaaatactgcaattttatttacagatctacacgtacaacaaaaatgnnnnnnnnnnnnnnnnnnnnnnnnnnnnnnnnnnnnnnnnnnnnnnnnnnnnnnnnnnntacaaagcagctagaaagtattctggcagtgtttacaaattaattgctatttttgtacaaaattgctaaataatgaaaatgtgagtagactacatatcaacttaaataaaacgattgctatgcacaactctgtacatataaacacactcctaacactgtttgacagctcatgtgttgccctttatacattttattttctaaggctcacgcagtcataatttgcacacttgtaacttttagccatttcgtgtgtgagctttaatagcagcaactcaatggtaccaggaaacctgcatacttagtacttaaagtaacgcaaatactgtagtactaaccccacttggtgtgccggatactaagtcaaaaagaaaattacttaatgcaaacaaaatacagtatggacatctaattaatgtacaccagttaagcccagtaactggaaaaaaatcttatgcatgaaggaacttttaagacttattagtattcctttcattttaaaaacaataaatacggcattacattatgaaaaaattcaacaaaacacacaacaatctagccaggtgagctcagtctttagactttggaaaaaatcagctttgtgcagctggcaaagagaattacacaaagctggaagcagaggcagctaaccagatgagataaatatgggaaatggggaaaagcttggcataaatggtttcccatacaggaaaaaaccccacagtgcatttccagtaggcacttaacacaaagctccctctnnnnnnnnnnnnnnaatgcttcatctaggaccacaccgacattttgtaccaagtccagtgtgtgtgaggggaggaggccagggatggaggctgaagaagaaaaaaaggaagatagtctgcacctttgtttttcttcccaaacatacacccacgcatacccacacaaagagtttaaagtgctggtgtcatctgtcttgaccccaccaccactttgcatattgtggaaatccc

SEQ ID NO: 73340 - DNA, 1619 bp, Homo Sapiens
cggtccggaattcccgggatgtgacctgtcattccgagccagcgaaccccagcagtaggaatccgtaccctagggatctgtctgtcatttctctgttgctcttgtgattggcaagtacagtatcctttgggaaggccatccccctcaggactgtcctggctccgacctttgtgtacactgcagacgctggttctgaggaactgttgtttcggcctcagtgaggttgcctggatgggatctgtattagacttgagtgcaggtctctcagcactgacccaaggagttctgttatggtactgtacctgtccagtcactggttctctcctcatgtcctctcgccccatgaggttgtgttgtgtcttctaagcgtggtactagtgcttgccacctggtcaccagacctccaaatatggctgccaccaccaggacctttccagttactccttatatgtgtgttctatggaggggcagggaaaaggtggcacttgtgagtgtgtgtggattggcagggggtccattcactttgggttccatcttgctttaaatttcttcattttgattaagagacctctttttgatctgtattgggctaaccagagccaaatacttttgaagagtttcccagggactagtcatggtaatagcatataattgatctgaatgagatggagagaagaatgaaggggtggtggttctgggtttgatttgagttcacctgtgggcagtgggcagtgggcagtgtcttggtgaaagggaacggatactactttttgcctcaccgtaaagtactcactagtaaatatttccttctctctttactcccactttttacatttgcaggtgccaaagtaatgtccacttttccctttcatgctgcatattaactggataattatactgcagaaaccttttcacctccactagtctgatacagtacatctgtacttccatataccttgcactgattttgtctgagtgccctgggagaagtagaaaatgattgaaagtgacttccgtatctcagcccatgactcagcaaggcagaatggccacccctgccaaagtttgcttctcttttcaacagtgcctcaccctccctctaggattaaagtgcttctgcccttccacgaactcctcctccatttcctttttgggatttgtcaccatccttctattctctggtcttctatttttggtgttgttcaagtgaaggaagagatgttccctctaatttctctctagcccattataacctgctatcttggggcaacttttgatgtatgacatgtcacccttcccaacttggtctcctccaacatgctgtcttcatgtggagccctcaccacaatccctgactccggtcatttgtgcctttctcttgtcatctctgtacactacttatattcactgtgggttgggggagctaattttaagcatgttcagtggcagctcccctccagtttcagtgtcactgttaaaatttatcaaaaagcaacttcactaggggttttcttaagggataaaggccttttacagaagctaaacccttccccacatgtggtagaatgtgctcttctatatctactcctcaataaagcatgttctctgctcaaaaaaaa
